United States Patent Application Publication US 2007/0054278 A1 - sequence listing, part 102

SEQ ID NO: 97683 - DNA, 435039 bp, Homo sapiens
  misc_feature (1)...(435039): n = A,T,C or G
acacatgatacagtatacacatatgtattgcctatgagttacatatgtaaagataaccttcacatgtagctagaaaaatattctctcggttgccaagaaatgttcattaaattatgttcccagttgaaatgaggtcactgtgaactcagtcaattgcctatcctagattcttcatatcagacgagttcataaaaccaaaaagaataagataggggattctaagtttggctactgagtggtttaaaaggaaaaaatgattaaccaggattcttgttacacgtaataaacattgtttttggtagaatggttgaatttcacctgtaaaatgtacttattaagaagtttttaattaatgaacaccaaataaaaaatctagatgtctctttgttcgagaaaaatgtgttccctaaggatggtgattcagaggctttcaacgtactttggaaatgcatgacttcctaatcagttcttaagtaagagaattaagaatgactacttctccatttccatggaataaagaatgatttctggcaggtgaatatggaagacctgggtttaaattctcatctgttctctaaatctgacctttgtcaagtcattcagtgttcttgtttcactttcttcatctgtaaaacgggggaaagaagtcttgccttaaacagggtagcagtgaggaaataataaatgtgaagaaaattttaaaatgtggttttgtttgaaaagaaatccactgatttttaaactttttttcacttttatttgggcatttcttatagaaaattctgtaggcttgtttccttgttttcaagtcctcgctcttctattctaatacagatatggtccatgctgcctttattgttgtgaaaaatacatgtaatgtacaaaaaaacacatttaaaagaatgcttatatccagaaacaagtataaataagtattttacttagtaatagaattgggcacgaattgtgtttagtttaatcaaaactgaacctgtcctgagccaggccactttaggcttctcagctgcatctaataggtggatattctagatttcattgagctgatttccattttcaacatgattgccaatggcagtgaaagtgggaataaactcatcagattaagtgccaaggctcacaaataaagcaaactttacattgtcaaaatatccaacttaactagagaaagagcattataaaaaacaccttctcagaaaacacgtttaaaggaaagcagtaaaatccccagcatctggggtgatggaaaccttattgatcacgtggtgcccatcaccactccggacataggtgacatgtatgtcaatatattattttcaagagcatacttttccaaagatatataaaggttaaacctttctacactccgtagcatcttttggaagttcctactttcagactccatccaccgacccccaccatcataaaaaaacaaatcccaaaatgtgcagcaggagcctcatcaggaaagacagacaggaatgtgttacaatcacatcttgcttctcaaataggagatacttgtctttggggatgtcctatggtgctagcatcatctaaaaggtaccttttttgccacttgcatgagagaaaaaaacagattttataattctggtacatttaatctatgatctgggaaagctagatgttggagacaataagtttaagattaaatcatatttctgagagctaagatgttgatctacccttgatttacctgttttgtcgttgtgccattcctttaatggatatacatataccccagccacccacattttctttctttccctgtttatgcagctttttctggatacaagctatttagaagagcttttcctgtccctcttactgttcattcagggctctggcccaggctcttctctcattctatgtaatcttatgcatgatctaatctagactctctacagttacaagttacaagcttatgattctcaaagttacagccttagagatcttttatgaactataatacacagactcaaatattccacaacctgttgagtaccttagtttgaatttccccagaccctcaagctgatcacataaataagagaatccatttatatctaccttggccaaattcttcccttccagtgttcactacctcaatgaatggcattatccttctccaggtgcccaagtcagaaacctgagcatttggcatttttcctgacacctgtttttctctcttcctacatataatctctagtctttgccaattctacctcccatatatcttttattttttattttgttttattttattctcctgcctcagcctcccgagtagctgggattacaggtgcccggctaatttttgtgtttttagtagagacggggttttgccgtgttggccaggctggtctccaactcctgacatcaggtgatctgcccgcctcggcctcccatagcgctgggactacagacgtgagtcactgagcccgcttttaaacgagtccacagctctctatccttgttattactgccttatctcaggtctcccctaagttttgcctagatcatctcaaaacctctcaattacactctgcctataattttatagccccaaatagctgagtgaacttccacaaagctatcatagcagtcttcttaacattgtatatccagttatgtcagtttactgtttaaaatgctttgatggttgtttaagaaaggctgaaattcaaattcactatagcatacaagatctggtctctgtccatcaaaaaactccacgtctattccctaccacctaccttgtgctacatagctacctgcgtaacaaagtattttatttgcaaatctaggaaattgccctgctcttaatctctcctctttcttggataaacttttcctgctgcttatagtgttgttgacctctttgcttgttcagccccaaactgtcgtaattctgtacaaaagtcacttcctctgtaaagttgtttttgatcttctgtttacccccactacttggacttgattaagggtcccttcctctgagctcctgtattatgaagctctatgttcagttattacccatttcagtatttagtaagaactgaatgtatgtgccagacattggactaagagctggagatatactaagatgaagacacaaactcttccctctatgatgcacttggtctagtctagctcctttttggtactatgtaatgctggtttacttgcctttttcattgtactatgagtttcttgagaccaagacatcttggcctataaatagcttcagttttacccgtatgtggaatgtaacttaaggggccataaaaatccttgtaacattttttaaaaactagcatgcctatctgcaaatgggcagtgatgttatctacttatttgtggtttaaaaaaaaaacaaaaaacaaaaaacatcttttttgacatgttgttttggtctttgttcacatccgttagcattttggcagaagcccaagctgtatcagggcattatttatgtaatgcttcctctcaatacatgccttggctgagtggcatgaaagcaccagcttttccattaaatcaggtccttatctctgacagaatactcaccttggttttcttattctgcattctagttgctttaatagacatcctagagattttcttattagctcccactgctgcaaccatgacagctgtaaaccatcagttgttgggcttgctggaggcctgcaaagtactgtgccatgatagcatgcttcatccaattcatggaacaaccaaagttctgaatttatgatggaactttaatacggatggttggggtagaaagtatctcagagctactaaaactcacttttcctcccaatcaatgccacagtgcatttcagaaagcactttttttaacaaccaaaaagaaaaatatacatcttcatatttcttgcctgatgaggtaaattgtagatactttttggaaatgttttgcataaaacaactcttcaaaatttttatctgtcattgggtacatgaattgtctgtacatggaaaatgagataggagttgggaaatgtctgaacacactcaataaagggttcccagctgtttttatgatagtttcttttcaccaaggatgaatgtcacatacttacacaagtgtccctgagattctgggatcctgtctaaaggtacaatgttcccaaaggctctttgaagaatgaacaaaagcttaaatacttcactgctgtgttagtgttttagaaattaaaggagacagacaaaagaagcagcaaaatacatttttcatacattatctcagtacatattggctactcaatgaaaatatgaaatagggataatatgatgtttccattgatccttgtatccttatcaagttaatcccctctcctatgattctattgtaacagaaatccaaaaggaaaagcaaatattcccacacagtatgacagtgtaatactatcttggtttttaaatttctcaaaaatacatatttactattcatgcatcagtaaattctttttaagtgactagttggtgatgacattttgagaagcgttgagaacttgaaagtgtccaaaatgagcatctcccattcccttaatgaacttaaaatgtaggaaagacatcagcattaaacattttctcacataaacacatgactatagtaagcaataaagggtatggagggaaaagttaaaagcacagtgcaagaacataacatgttaagcagctttttccccatgtctacacccagcatggatgtgcagaggagtcgtcctagaaatggcacggactaacaatttcacagctccaacatgggcagagctgcccactgttttgcttgcatcaaggttcgttgttgtgttagtcaggaaccatagctggggcaccatgctgcctgatagccagggatggtcccttcctggctcacagtattgtctatgattggccactgcctggaaaggtctatttggggtttgccagaggaaaacttaatgtttgttgcaaggcagaaagcttgaaacatactcttctagttttctaagactccttccagactgttcacaacaacaaagatagcattctttatacatctctctctagttccaaactcaaccacacacaccattcagcttgagcctcacagctcccaagagaggcacagcttagtgttcttagttacaagataagggaaccaaggctcagaaaggttaagtgccttgctcgaggtcacacagttaatgcattttggcactgggattcaaacccagctctcctgaatcaaaagcaagagttcttgtggccatgccctggtgcttacctcctaagatgttcatcaccccaattccagggatgattgtttacattctggtttctgttgccatctggtttttgagcacttcaggaacaattctagtctttccagaacttaagagtggtaggcagaagacgagtcacaagtaacagatatgctaaaagtatctcttagtaggagaaggaaattcaaatggccagtgtcacattgtcagagatcaaagtccgggcaactgacaaactgagttttcaacaaaaatccatgggaagcagtatgttaagagaaagagataatgaacagttttgttaagacatgggagtctccaagtggcagatctcattttagaaactgtttaaatacttcaagaaaaaaaaaagtagattttatcaatgtggaaaaaaagtcccagggaaaggcatactcatttgaggaaagcatgcatgtattcattcattcacacatttatttatttacggtagttcatacaaagaccagagttgaggtattaaagcaacaattacagctagctgctgctcctgcctggtgagcaggtaagaaaggctgtgagttagacctgaaaaaaagctgtttagaggcaagtgtgatttaccttaaaatattccattctgcacttgaagtcagcctttaaaaaaatttctctggcttacatcatgttctcagggtacttggttctctcaactggtgtatggtttttctaaggaacagaagtagtggtcaagtcaaaccagtatataattatgggttcagtctggattgctgcagagtctaggaagtaaggtgaccttggaagattagaaattagtatttagtgtattctctctttttctggcctctcagagcctggaatgcaagaatagtaggattatttaaagcacagaattggcagggcatggtggctgacacctgtaataccagcactttggaagaccaaggcaggtggatcacctgaagtcaggagttcgagaccagcctggtcaacagggtgaaaccccatctctattaaaaatacaaaaatttgttgggcgtggtggcacatgcctgtaatcccacctacttgggaggcttaggcaggagaattgcttgaacctgagaggcggaggttgcagtgagccaagatcatgccattgcactccagcctgggtgacaagagtgaaactccatctcaaaaaaaaaaaaaaaaaaaaaaaccctaaataaataaaataaatcagtcacagaatctgaactcaggctgcctggtgctgaatcttggctctaccacttatcatctgaatgtctgagaggaaggtgttttacttctgttatctcacctataaaatgaaaatagaagacatttctttttcctgttctttctcgtcacttttccccgtcctttcttctctcctacccatcttccttctctgcctctctgactccttcccttctactttctacccggcatcatactccctttttttttttctttccttttagcatcctccacttgtaaatcttcccaccatggtagccaaagaggccagatatcctgtcaactgcaatatgaccttgtatgggccaacaactctgcctgcagagactttgcctctggagggcacagcacacacctgtaaagggacatgaagaatggatggtaagagcacagccacggcagtgtggtgcggtcaggaggcagcatccatcctagctgcactgccgcactcccgggtcccctgatccctagaccatgcctcagccttcctgtaggctggctgtagtttccttatgtccatccaagcaatttctttcttttttttttcttttttttttttttttgagacagagtctggctctgtccgccaggctggagtgcagtggcacgatctcggctcactgcaagctccacctcccattcggaggttcgcgccattctcctgcctcagcctaccgagtagctaggactacaggcgcccgctaccgcgcccggctaattttttgtattttcagtagagacaaggtttcaccgtgttagtcaggatggtttcaatctcctgacctcgtgatccgcccacctcggcctcccaaagtgctgggattacaggcgtgagccaccgcacctggcccatccaagcaatttcatccaagcaatttcttttctaagttaaccaaagttatattgttttcttctaagaatgctgacagatgaaatgggaagaatacttcatttgcaaggactaaaaaaaagtgcaagttaagcacttagtataccagggggcatacaataagcattgaacaaatattagctataataattataaaaactagtactattttagtattacaggctatcttactgtatttaaaagaaatatactttttttctgggtataatttaaaatacatatctgattaaaagagaatgaatgatgaagtataagaattctttaaaacacagaaaattatgaggaaaaaaatggagatagttcttactctcgttaactaaagagtaatgggtgtgactgctacggaggtaagccacttgaatctcccttccagaaagaactcacagtacagctgcaagaagcataatgggctgacagcctccagatatgaaacacctcggggattgtattagtccattttcacgctgctaataaagacatactcgagactgggtaatttattaaaaaaaaaaaaaaaagaggtttcatggactcccagttccacatggctggggagaactcacaatcgtggtagaagatgaaaggcacatcttacatggcagcagacaagaaagaattgagagccaagcaaaaggggaaacctctaaaaaagtagagacttattcactaccacgagaaaagaatgggggaaaccgttgccatgattcaattacctcagaattataggagctacaattcaagatgagattgggatggggacatagtcaaaccatatcagggatcctctccagcttttgagttgaggccatgctctttccaggcaaagccagccagtaactatacttgagcatggtggaggtaccagggcctggccaatcttgcttaatagggaacttctctaatgatcagtcttgctccagagatctctactgggttggcagagactgtgtcacatctattttgtgaacccttcctgtccagtcctgctctccctcctctttcctttcacacacacttgtctgaaggctttttctgcccaatcctgcttcctcttccttttttctctcacaggtcttactcccacaaagtgcttaaaatcctaattccatcataatgcctgcttctagaagacccaactaacagaagtatatttgtttccactcatttttctaaatgtctatatttgtgtgcatgtgtgtgattttttgttacataattgagctcatatggtagacctaattccatacaatttttgtcttcacattaaatataaaaatgtttccatgtcatcaatttctaaagactaatgattatgattattttacttgaatacagtacctcatttaattttacatcaattcagaattggcactactaaccccatgtttagagatgaagaaactgaggttcagggaagttaagtaacttatgtgcagaaacaaaggaagtagactgggagtagagccccccagtctgtggtcccttgttagggcagcactagcaaatgaatacagacaagggggctgacaaggtaggaaggacctgattagggaggtccttatatgccatgtgtaggagttaatgctcttactcaaaaggcaatagggtgctaccacaagattttaatcaagaagagataagacaaaattcacattttatttttattgatttttgagatggagtctcactctatcacccatgctggagtgcagtggtgccatctcagctcactgcaacctccacttcctgttcaagtgattctcctgcctcagccttctaagtagctgggattacatgcacccatcgccacatccagctaattttcgtatttttagtagagatggggtttcaccatgttggccaggctggtctcgaactcctgacctcaggtgatccacccatctcggcctcccaaagtgttgggattacgggcgtgaaccaccgtgcccagccaaaattcacattttagaaatgtttatctcctgtactcagtggttccacttttgcccttatctagctctcccatgctgagagaaggtgggacttgggggatggggaaagccactatcaggtggctggttcctatgtatctgaccaagcttcaagctgcattctcctgcaatctcatcattggcttgtctttatttccaactttttttgttcctccaagaataattcctgcagctacaacagactttcttccaggccaccagagtcctgcctttctcaccaaatctcattactgcttatgacccagcatgacatttagagaacattggaaagacttatttaagaagtgacaaaacggaggtacttgtaattaagagccgtctactgagcctagaaagggatgcaaactcctctgggcatagtgaagaacacaggtgatgcctgtgcagtgcccaaaggaacaagtaggcaggaaactgctctatgctgtcagtgtccagcccaaagctttgggtgggtgccaggttaatggaggagaagctggataaactgggttcatgtggttcggatgagaggtccagagaatgactatctataactggctgattagaagagatctcccctgaacttcatatatcacattgcacaggccctgtgaggaggtcttgctgtttgtggggcattacgagattaaaatgttggcaaggaaattggagttctaacaggaagtaggtagaccacaggataattatctatgaacacatgaagcatcctcctcttccacctcgactcctggggactcctcaagacactccgggtagtgatagagaaggggctaagtactttcttggaacaggttgctgagagcctaggaactagtgaggactggtgaaacgtgtgtttaccaggtcaaggaattacttaggtaatcactgagtgtcattccccaatttttattgccgctctgtcctgttccttgtttagtgtgtcagtactcatacagcatgacatatatcaaactattatatctcttttctaacttctggtaggaaataaggatagatggtttggctggttttgccctctgtacataacatgacttccgcatgtatctcctttacttttctaccttataaaatgattttgtaattagtaatagctttattttatatgacagagtgggaccaaggtactgctgtttcctcgtaaaaatccccatgacatttgatgttatgctactcaaagaaggcaataaaaattcattgttgcactcaaagacagttgggcagaatactcaaaagccatcataaattgagtagaggggcctctttctatgggggtagggactaaacttaaaggtatatttacagactcggccatggttaattcagggactatggtggtcttgtctgtgggcagcatcttggcttaccttttcagcttcctgtggaccatagatgctgcccacagacaagaccaccatagtccctgaattaaccatggctgagtctgtaaatatacctttaagtttagtcccactcctcaattagccttggtaatggtgtggcagattatatttttcaagaatagtaatggcaatatctctggtctcacatgcatttctagaatcttgccacttttccatcacatcctagatgctacttcccttctccttaaaacagggccagtctttgtcgaacaagtagaaagaagcagaagtaatgatattacttctgaggttgggtcatcaaaggccatacaacttctacttggctgtctgttttttatatgctcacccttggaagctagccactgtgttgtaagctagccaaggccccatggagagactatgcctaagtgtcccagcctacagcccccattaaggtcctaggtgattgcatcaaccacagacgtgtgagtgaataattctccaggtgattctagccatcaaccttcaagctcccaccgtgtagaacagagctgtccctccagggccctacccaaattgtggagttatgaacaaactataagttattatttgggggtggctgctacacggtcatagtaactagaacaaatgggcttggtgccagcatgacacggttttcactgtggtaggggtaagggctcaatgttctggtaccaagaacatgaagtagcagcattctgcagctatcttttaggctgaaattacatagtgagaaagagcaaagtctttggaacccaaagaacctgggttcaatcccagtactgcccctaccagtggtatattgatccccgttgtgagaagaggacaatttaatttgcctcactaagttgcagagagcctttgaagtacttaatacatactggcatataatctcttaggaactaagataactgacccagtggagcccaattttttaggaagaagcagcagcactttggggaataggctattaaaaataataatgggaggaacaccttccacttctaccctttgattcttgaacctgtggcattttggctgtggaatttaaaagcaccatactgtagtcactggttcagaacatatataacactttcacttaataaaagagtgttaatgtccacgtacttcattatgatttggtggattagatgtcattcggttgatgatgggtatctcaggttgtaccatcacctggtattccaagtccagatatttagactctatttgggctcattaaaaagcaggagccagaggtctatacataggcctctttgtcatagatttcagcagcattatgccagctgggtcaaaagccctaaatggtagactagtttgcaccgcagcttggacctaatgcagaccttgttttgctccaggtctcacccaacactgtcagttgcttagcagatgaatgagggcagcacactcaaattggtataagctatttcctaaattcaaagagaccactatgcctctttcttttttaaaaaatttttttattatactttaagttttagggtacatgcgcacaacatgcagttttgttacacatatacacatgtgccatgttggtgtgctgcacccattaactcgtcatttaacattaggtttatctcctaatgctatccctcccccctccccccaccaaaagacacacgaaaaagtgcctctttcttaatggtaggcaacttgtctttcactttggaaaggatatcccaacaagccccagacatctgaacccttagtaacttttccaaagagacagagcccttaagtttcatggtattcaccacccaccctctagcacatctttgtcttactaaggcttctaggatactggccatgtgctgttcttccagtccagtcagtgtaatgaatgatctataggatgtcaaaagtgtcaaagttctccacacccttatgactgagaggaggagagttaatgagttgataccgccctttccttgccaggtaaaacaaactgcttctggtagtccttaatgttaatatagagggggaaaaaaaagcacttaatcagtatgcatatcggctgtcaagggctgcgttgatttgcctaagtaaatatgccacgtctggaacagcagctgtaaattaaaatcactacttaattgaatttacgatactccacagtcattctctacaatcgatttgccaaatggggcggttaaatgaggatgtgataagaattattaccccttcgactctcgtcttctatgagggcattattttctgttgtattcccacagataaagcagtggctctggcttacatgctgataaagaagagaaattccttgggcttctacagaaataaaaaccacaaatacccacactctacagatcagggaaccaagtgatatagtttgagtgttttgtcccttccaaacctcatgttgaattgtgatctcccatgttggaggtgggcctagtgggtggtgtttgggtcatgggggcagatcccccatgaatggtttggtgcagtcctcaccacaatgagtgagttttcacgttatcagttcacacaatatctggttatttaagaaagcctggcacctcctccctctctctcttgctccttctctcgcctgtggctcgcctttgcctttcaccatgattataagctcctgaggtcctcaccagaaacagatgctggcaccatgcttcgtgaacagcctgcagagctgtgaaccaaataaacgtgttttctttatacattacccagtctcagatattcctttatagcaacgcaaacggactaacacaatgtaatgattttgccattttctcagtatgcctgttccaactctgcatttaggaaccaaggaaatgtctacagaatgactaggcagaactgctgggtccactgtgagataaactactctagccacgccatttcactgctgatctccacaagctcccactaagattcttagaatccattccaacacatattttccaagttttggctcttataaaatgcacattttcctactttttagtttaaacttagctatatcctagttagaatttttacatgtctttccaggactttctgtactatgactctggtaatgggtctagaaggaattgggtatattggagtgggtctaggggagaatgagcatcttctcacaaggcacctgcttcaggggatcttcaggcaggtgagcctctgtagtaaaggaggaagaatttcttgtactggcaagggtgctcaggaaattgaggggcttgtggttttcagatttcacccgaagatttccttttcaattctaaacatttatctccatttcaattaagaccctaattttcacatgagacttggaaagtatacaaatactacttatagttttcaaactacagaaacaaattttgagtctggttttcagctctcaatccttgctgatgctgaaagttttaagccttaagcttgttttctttgtgtaagctctctgatgcagttagaagtgctcaaatcatttcaccatccttaagccaccattaccattgtaatggtcaggttcagtgttcaattggccccccaagccttgtcttctatgggtgctctttcccaggattcaacagataatacatgagttaattgtgaaaataaagaatgccatgggttatcagtatcatattttccactggtaatgagatcatttttttcaagtccatttatattcttattttgataacctttttcctcagatacctctgctgttaccaagtatcagtaaagacctacagaggaaaacaaacaaaagaaaacattaagtatttcaagcagaaagaacttaatagagtaaaacaattaaaatgcatgaaaagggctggagcagcagaaagaagacaagatgtcaccctgaaatcaggaaattgctatcatcttagcagtgaagcccattggcatgcactttctaacatgccggaactagaacttccaaagaatgctgcccctgccagagctgaaagccatgaagagttggcttgcaggagtaaatgcacagccatctggtctccacaactcttcaacaaccagcagctactagagcaactgtcaatgtgtttggagccagaatcaaaattgttcctccttctttccactctcagaccccttatcggtacacctccttttcggcagaatttaacaagaagccagctgctaaaagagtctgataaacacaatcccttcttactcagagtcccagttccggtagttcaaagtagactacagaataataggtataaagttggtagaaaatataaataactaaagatggctggatgggaagataaatttggggatgttggtggcattgagaaattgttttaatagccctgggatattctgttttatgaaaagtaaaattccccatttatttaaaaaatatttgtattcagggtgtttaggatatccatcacctcaagcatttgttatttcaattgctttaggacatttcaagtcctcatttctattaatagcagttttgaaatatatactacattgttcttaactatagttactctactattgaacattataatttattccttttattgttcgtcctttcataaagtctaagaacccctttgtagaacactcaatctcatatcctcttgcagttgttgctttgcacctgcatcaccagtttttacctctcttctgaatctttcccaaagtcatacaaacatgcactaatatgtcctaccttgatagctgcctagactccaacttctaccccagttactacatatttctgattcctttatggcagaactctagtgttgttatctcaacttcatctccttcccccatttcttaaatcaaccccaagcaggtcttcaccattcccctgccaccaaaagagtttatgtccatttctccgtgacttctcaggcctcaccttattctgtttatcagaaaccactaatagacacagtggctctgattctttctttacttagactgtagaatactattatctttgtcctttgatataacttcctatgtctggttagttacttttcccaatacttacctgtctcccagacccctaaacattgtgtgtcctaggtcttggactcacatacctcttctatgtatctttttagattatttcattatgttccacagattataatatcatcatcttgacgagaattctaaaatgtctatctgtagcaccaatttctaccctcaactttggtctcaaatatacagaactggctacttggcatcacaactttgttccactttaccctaaattaagactctcaaacttaacctctactgaactcttcattccactcaatcctgtctctctctagtgtctccagtctcagaaaaatggaaacacctttcttctagacattcaggcccaaatccttgacttcatccttttactctcatatttactcatactctgtattgcaccttgaagcacatcctatgtgctcttctaaatatttccaaaatacgattatttcttttcaatcctgctgctaccaactgttttaagacaccatcatttcttgcctgcattattgaaatactctattagtttggtgcaaaagtagttgcggtttttgccattgaaagtaatggcaaggctgggcgctgtggctcactcatgtaattccagcattttgagaggctggagcaggtggatcacttgaggtcaggagtttgagaccatcctggccaacatggtgaaaccccgtctctactcaaaatacaaaaattagccaggagtggtggtgtatgcctgtaatcccagctactcaggaggctgaggcaggagaattgcttgaacctggggcagtgagctgagatggtgccactgcactctagcctgggcaagagagactccatctcaagagaaaaaagaaaaaaaaaagtaatggcaaaagctgcaattacttttgtaccaacctaatatatggtctttatttccatgttttgctgtgtttactcctctgctgaaaatcagatatgggtgaaagaatagacacacaattagtgagacagtatagagagtttagaaatagacccacataaatatgatcaattgattttctataaaggcactaaggcaattcactggaaaacagataatcatttcaacaaatggtgttgaattaactagacatccatgaacaacaacaaaaataaacctcaatctagacttccaactgatataaaaactcaagacggatcagagatactaatgtaagtgtgtaaaactatgaagcctttagaagaaaacttttgtaaacttgagttacagtttcagacatctcaacaaaagcatgatctataaaagaaaaacatgataaattggacttcttccaagttgaaaaatttttctctgcaaaagacacttcaggagaattaataagccacaataaagcaaaaatgtttccaaatcacatttctgaaaaattatctgtatctagaatatataaagtattctcaaaacttaattttaaaaaattaaattggtgaggattctaaaatgtctatctctaacaccaaattctaccccaaactttgggtaaatttttttttaaaaaccaaaaatagacagatggatatgccctgactttcccaaaagcttaattctgagtttttcagtttcctctctttggctagagctggatcacgtgttcccataaataaaagggcatgtgaaaagaagaatattttgatttaccgcattgtatccctgaggctgcataaaactagtgctttcctgctacataaatatttatatattgcctatatattatttatatgttaataagagtgtccttgacctttagcacttccatttattcctgtcttgtaattatgttcaacaaaaaaatgctcctaggatatggaaatttagcaacacactcttgaaaaaatattgcgtcaaagaagagataagaaggaaattagggctgggcatggtggctcatgcctgtaatcccagctactcgggaggctgaggccggagaattgcttgaacccaggaagcagaggttgcagtgagtagagattgtgccattgcactccagcctgggtgacagagcgaggctctgcctcaaaaaaaaaaaaaaaaaaaaaagatagaaagagaaaaaggaaattaggtaaacaagacaaaaacaaaaatacaacatatgcaactcacagtatgaagcaaaagcagtgctaagaggaatgttcataaaaataagtcccttaattaaaaaggggaaagatttcaaacaacctaattttacatttcaagaaactagaaaaagaaaccaagcccaaaattaggagaagataggaaatacaaagattagagcagaaataaatgaaataaagaacagaaaaaaacataaaactaacagtttttttaaaaaaaaacaagcaaagttgacatacccttaaactaagaaagaaagaaagagaggactcaaaatcagaaataaaaatagagacattacaactgatgccacagaaataaaaaagatcagtagagactaatatgatcaacctagaagaaaattcttagaaacatacaacctaccaataaagaaatagaaggtctgaacagatctataactagtatggatattgaattagtaacaaaaacctccccaaaaagaaaagcccagagctgcatagcttcatgtgttcattccaccaaacatttaaggatgaactaataccaatccttctcaaactcttcaaaaaaaaaaaaaaatgaacaggagggaacaattccaaactcaatttattaggccagcattagtctaatatcaataccaggaaaagacagcacaagaaaaccagaggccaatatccctgaataatatagacacaaaaattctcaagaaaatgctaccaaagcaaatccagccacacattaaaaggattatacattgttgctaagtaatatttatccctgggatacaaatatgattcaacatatgaaaactaatatgatacattaatggagcaaatcatgaaaatcatatgatcattgcaatagatacagaaaaagtgttaggcaaaattcaacattctttcataataaaaactcttgataaactaggaatagaagaaaattacttcaagataataaaggccatatatgaaaagcccacagctaatattatactcagagaaaaacaaagtgtttcctctaacatcaggaacaagatgaggatgcccactcttgccatttccattcaatatagtactagaaggcctagccagagcaattgaagggaaaaaccaaaagacatccaaatcagaaaggaggatgtaaaattgtagatgacatagtcttatattaatgtttataaaaccctaaaaacaccattataaaaaaatccattaaagctaatacatgaattcagtaaacttgcaggttgcaaaatcaatataaaaaaatcaactgaatacctatacatgaacaaaatatctgaaaagtaaattaggacaacaatcccatttatgttagtgccaaaaagagtgaataaaaaacctagtaataaatctaactaaggtggtaaaagacttgtatacaaaaagatataaaacactgatgaaagaaattcaacaagacaaaaacaaatggaaagacatcctgtgttcatgcactggaaaacttaatattattaaaatgttcatacttcccaaagagatctatagattcaaagcaatctctatattaaaaccccaatggcatttttacataaatagaaaaatattctgaagtttatatggagccacaaaaaccaccaatagccaaaccaatcttgagaaataagaacaaagctgaaagcctcgcactgcctgatttcaaagtacattaccaagctgtagtaatcaaaagagtatggtagtccaggtacagtggctcatgcctataatcccagccctttaggaggcaaatgtgggtggatcacttgagctcaggagtttgagaccaacctgggcaacacagcaaaaccctatctctacaaaaaatacaaaaatttgctgggcatggtggtgtgcatgtgtagtcccagctatctggggggcaggaggattgcttgagcctgggaggtcaaggctgcagtgagccaagagtgcaccactatactccaacctgggtgacaaagtgagaacctgtcttaaaaaacaacaagaggaggagccaagatggccgaataggaacagctccggtctacagctcccagcgtgagcgacgcagaagacgggtgatttctgcgtttccatctgaggtaccgggttcatctcactagggagtgccagacagtgggcacaggtcagtgggtgcagcgcacggtgcacaagctgaagcagggcgaggcattgcctcactccagaagcgcaaggggtcagggagttccctttcctagtcaaagaaaggggcaacagatggcacctggaaaatcggatcactcccacccgaatactgcgattttccgacgggcttaaaaaatggcacaccatgagattatatcctgcatctggctcggagggtcctatgcccacggagtctcactgactgctagcacagcagtctgagatcaaactgcaaggtggcagcgaggctgggggaggggcgcctgccattgcccaggcttgcttaggtaaacaaagcagccgggaagctccaactgggtggagcccaccacagctcaaggaggcctgcctgcctctgtaggctccacctctgggggcagagcacagacaaacaaaaagacagcagtaacctctgcagacttaaatgtccctgttgaagagagcagtggttctctcagcacacagatggagatctgagaatgggcagactgcctcctcaagcgggtccctgatccctgaccccggagcagcctaactgagaggcaccccccccaagtaggggcagactgacacctcacatggctgggtactcctctgagacaaaacttccagaggaatgaacagacaacagcattcgcggttcatgaaaaaccactgttctgcagacaccgctgctgatacccaggcaaacagggtctggagtggacctctagcaaactccaacagacctgcagctgagagtcctgtctgttagaaggaaaactaacaaacagaaaggacatccacaccaaaaacccatctgtacatcaccatcatcaaagaccaaaagtagataaaaccacaaagatggggaaagaaacagagcagaaaaactggaaactctaaaaagcagagcacctctcctcctccaaaggaacgcagttcctcaccagcaacggaaaaaagctggacggagaatgactttgacgagttgagagaagaaggcttcagacgatcaaactacaagctacaggaggaaattcaaaccaaaggcaaagaagttaaaaactttgaaaaaatttcagacgaatgtataactagaataaccaatacagagaaatgcttaaaggagctaatggagctgaaagccaaggctcgagaactacttgaagaatgcagaagcctcaggagccgatgcgatcaactggaagaaagggtatcagccatggaagatgaaatgaatgaaatgaagcgagaagggaagtttagagaaaaaagaataaaaagaaatgaacaaagcctccaagaaatatgggactatgtgaaaagacaaaatctacatctaattggtgtacctgaaagtgacggggagaatggaaccaagttggaaaacaccctgcaggatattatccaggagaacttccccaatctagcaaggcaggccaacattcagattcaggaaatacagagaacgccacaaagatactcctcgagaagagcaactccaagacacataattgtcagattcaccaaagttgaaatgaaggaaaaaatgttaagggcagccagagagaaaggtcaggttacccacaaagggaagcccaacagactaacagcagatctctcagcagaaactctacaagccagaagacagtgggggccaatattcaacattcttaaagaaaagaattttcaacccagaatttcatatccagccaaactaagcttcataagtgaaggagaaataaaatactttatagacaagcaaatgctgagagattttgtcaccaccaggcctgccctaaaagagcttctgaaggaagcactaaacatggaaaggaacaaccggtaccagccagtgcaaaatcatgccaaaatgtaaagaccattgagactaggaagaaactgcatcaactaacgagcaaaataaccagctgacatcataatgacaggttcaaattcacacataacaatattaactttaaatgtaaatggactaaatgctccaattaaaagacacagactggcaaattggataaagagtcgagacccatcggtgtgttgtattcaggcaacccatctcacctgcagagacacatataggctcaaaataaaaggatggaggaagatctaccaagcacatggaaaacaaaaaaaggcagggcttgcaatcctagtctctgataaaacagactttaaaccaacaaagatcaaaagagacaaaaaaggccattatataatggtaaagggatcaagtcaacaagaagagctaactatcctaaatatatatatacacccaatacaggagcacccagattcataaagcaagtcctgagtgacctacaaagagacttagactcccacacattaataatgggagactttaacaccccactgtcaacattagacagatcaacgagacagaaagtcaacaaagatacccaggaattgaactcacctctgcaccaagcggacctaatagacatctacagaactctccaccccaaatcaacagaatatacatttttttcagcaccacaccacacctattccaaaattgaccacatacttggaaataaagcactcctcagcaaatgtacaagaacagaaattataacaaactatctctcagaccacagtgcaatcaaactagaactcagcattaagaaactcactcaaaaccgctcaactacacggaaactgaacaacctgctcctgaatgactactgggtacataacaaaatgaaggcagaaataaagatgttctttgaaaccaacgagaacaaagacacaacataccagaatctctgggacacattcaaagcagtgtgtagagtgaaatttatagcactaaatgcccacaagagaaagcaggaaagatccaaaattgacaccctaacatcacaattaaaagagctagggaagcaagagcaaacacattcaaaagctagcagaaggcaagaaataactaaaatcagagcagaactgaaggaaatagagacacaaaaaacccttcaaaaaattaatgaatccaggagctggttttttgaaaggatcaccaaaattgatagaccgccagcaagactaatgaagaaaaaaagagagaagaatcaaatagacgcaataaaaactgataaaggggatatcaccaccaatcccacagaaacacaaactaccatcagagaatactacaaacacctctacgcaaataaactagaaaatctagaagaaatggataaattcctcgacacatacactctcccaagactaaaccaggaagaagttgaatccctgaatagaccaataacaggagctgaaattgtggcaataatcaatagcttaccaaccaaaaagagtccaggaccagatggattcacagctgaattctaccagaggtacaaggaggaactggtaccattccttctgaaactattccaatcaatagaaagagagggaatcctccctaactcattttatgaggccagcatcatcctgataccaaagccaggcagagacacaaccaaagaagagaattttagaccaatatccttgatgaacattgatgcaaaaatcctcaataaaatactggcaaaccgaatccagcagcacatcaaaaagcttatccaccatgatcaagtgggcttcatccctgggatgcaaggctggttcaatatacgcaaatcaataaatgtaatccagcatataaacagaaccaaagacaaaaaccacatgattatctcaatagatgcagaaaaggcctttgacaaaattcaacaacccttcatgctaaaaactctcaataaattgggtattgatgggacatatctcaaaataataagagctatctatgacaaacccacagccaatatcacactgaatgggcaaaaactggaagcattccctttgaaaactggcacaagacagggatgccctctctcaccactcctattcaacatagtgttggaggttctggccagggcaatcaggcaggagaaggaaataaagggtattcaattaggaaaagaggaagtcaaattgtccctgtttgcagacgacatgattgtatatctagaaaaccccatcgtctcagcccaaaatctccttaagttgataagcaacttcagcaaagtctcaggttacaaaatcaatgtgcaaaaatcacaagcattcttatacgccaataacagacaaacagagagccaaatcatgagtgaattcccattcacaattgcttcaaagagaataaaatacctaggaatccaccttacaagggacgtgaaggacctcttcaaggagaactacaaaccactgctcaaggaaataaaagaggataaaaacaaatggaagaacattccatgctcatgggtaggaagaatcaatatcgtgaaaatggccatactgcccaaggtaatttacagattcaatgccattcccatcaagctaccaatgactttcttcacagaattggaaaaaactactttaaagttcatatggaaccaaaaaagagcccacattgccaagtcaatcctaagccaaaagaacaaacctggaggcgtcacgctacctgacttcaaactatactacaaggctacaataaccaaaacagcatggtactggtaccaaagcagagacatagatcaatggaacagaacagagccctcagaaataccgccgcatatctacaactatctgatctttgacaaacctgagaaaaacaagcaatggggaaaggattccctatttaataaatggtgctgggaaaactggctagccatatggagaaagctgaaactggatcccttccttacaccttatacaaaaatcaattcaagatggattaaagacttaaacgttagacctaaaaccataaaaacccgagaagaaaacctaagcattcccattcaggacataggcacgggcaaggacttcatgtctaaaacaccaaaagcaatggcaacaaaagccaaaattgacaaatgggatctaatgaaactaaagagcttctgcacagcaaaagaaactaccatcagagtgaacaggcaacccacaaaatgggagaaaattttcgcaacctactcatctgacaacaggctaatatccagaatctacaatgaacttaaacaaatttacaagaaaaaaacaaacaaccccatcaaaaagtgggcgaaggacatgaacagacacttctcaaaagaagacatttatgcagccaaaagacacatgaaaaaatgctcaccatcactggccatcagagaaatgcaaatcaaaaccacaatgagatatcatctcacaccagttagaatggcaatcattaaaaagtcaggaaacaacaggtgctggagaggatgtggagaaataggaacacttttacactgttggtgggactgtaaactagttcaaccattgtggaagtcagtgtggtgattcctcagggatctagaactagaaataccatttgacccagccatcccattactgggtatatacccaaaggactataaatcatgctgctataaagacacatgcacacatatgtttattgcgacattattcacaatagcaaagacttggaaccaacccaaatgtccaacaatgatagactggattaagaaaatgtggcacatatacaccatggaatactatgcagccataaaaaatgatgagttcatgtcctttgtagcaacatggatgaagttggaaatcatcattctcagtaaactatcgcaagaacaaaaaaccaaacaccgcatattctcactcataggtgggaattgaacaatgagaacacatggacacaggaaggggaacatcacgctctggggactgttgtggggtgggggaggggggagggatagcattgggagatatacctaatgctagatgacgagttagtgggtgcagcgcaccagcatgtcacatgtatacatatgtaactaacctgcacattgtgcacatgtaccctaaaacttaaagtataataataattaaaaaaaaaaaagccaggcacagtggctcacacctgtaatcccagaactttggggaggctgaggcaggaggcttacctgaggtcaggagttcaagaccagcctcaccaacatggagaaaccccatcactactaaaaatacaaaattagctgggcatggtggcacatgcctgtaatcccagctacttgggaggctgaggcaggagaatcacttgcacccaggaggcagaggttgtggtgagccgagatcatgccactgcactccagcctgggcaacagagcgaaactctgtctcaaataaataaaccatatattaaacaacaacaacaacaaaaaaaaaacaaaacagtatggtaaaggcataatgatagacatacagagcaatgtaacagaatggagagcccagaaatatatccaagtatatatggtcagctgatcttcaacaaggctgttatgactacataatgggaaaataatagtctcttcaagaaatgggactaggaaaactggatagtcacatagaaaataatgacgcatctcacaccatatacaaaaaccaaactcaaaatgaattcaagacataaatgtaagaacagaaactataaaactcctacaaaaaagtaggggaaaagctccttgacactggtcttggcaattatttttcagatatgacaccaaaagcactatcaacaaaagccaaaacagacaagttggactatatcaaactaaaaagcttttgcattaccaagaaaatcagaatgaaatgacaatttatgaaatgggataaaatatttgtaaaccatatatttgatatgggcttatcttcaaaatgtataagaaatgtctataactcaatagtaaaaaataaaacaaaaaaaccaaaacagtaatccaattgaaaaatgggcaaaggacttgaacatacatttctccaaagatgacatacaaatatacctggccaacacgtatatgcaaaaacattcaaaatcactaatcatcagggacatgaaaatcaccaccacaatgaggtatcacctcaaacctgtcacaatggctatttaaaaaacaagacaacaaatattggtaagaatgtggagaaattagaactcttgcatactgttggtgggaaggcaaactggtacagccactatgaggaaaacgttatgcaggttcctcaaaaaattaaaaacataactgtcatataatccaacaatcctgaggtgttttgttttgttttttttttcaaaaaatcgaagtcaagagctcaaatattaacactgctatgttctttgcagcactagtcacaatagccaggatgtagaaataacctaaatgtccatcatcaataaagaaaatgtggtacatacagtcaatggacactatttaggtgtaaaaggaaattctgcaatatgcaacacatggatgagccttaaggatattatactaagtgaaataagccagtgacagtaagacaaataatgcataattcacttatatgaagtatataaaatagttaaaattgttagaatcaaagactgtaaatggtggtggccaggggtcagagacagggagaagtgaggagttgttaataaacaggcataaagtttcagtccagcaagttgaataagtcctagtcatctgctgtacaaccttgtatctactgtcaactatatcatattatacacttaaaaatctgttaagagggtagaactcaagtattcttatcaaaataaaaatgggtttcaaaataaaataaaaatgatatgataccagaactgaatcaggtattttacaaccttgataaaagaatatatgaacaaaatccacgtgttaagccatgggactatattaaatgagttcatacacaaatttctaagcacacaataaatgctcaagaatgttagtggtattaccgttactgtggttgtttattgttgtattttaatgcctaaagaaattcctcaaataaaactggtggtgttgcgaggtgcttgaatatttaatattttctctctacagttcagtactttttctagtaaccagtttcctggttctaataatataatcatacgtgtttagatgggcctgtgcaacctaactgggctaccctgttgctgtaccaccaccaccactcccccatccacctttattgagtgcttttgatgtgggcattaggatgttccagattcagtttatttagatacctgattcaacggtgaccaacacagtcaaagatacttcacacagataagattcaaataaaagggttagataatgtagattatatatgattttaaatcccacgtatgattttaaatctcatccactaattattgaatggtgttcgtttcattcttcaggagtttaagatcccctttaaagtgtttttaagtatatgtgaattattatgtaagcagtatttctgtaatgctttcaattatgagtaaagtatttctacatttttgtatacttgttttcaaaatttttttctccatatggtcttattcaaaagtatctcccctttattaaatattaaatgtaaattttgagtgtttgagttttcaccctccaaaaaattatgtcaggcaacataacagttatttgtcctcacaaaaatgatcaaatttgaaactctgcctttttatttttacaagtgcataattcatcttccagttctataacaatatcatatattaccacaagatttccaggaaagctcctattaattacaaatgattctcctagttaccctccatctcattcatgtattttgaggattctactgtgttgaaaagtctttgtattttaaaattaacctcattgatgatactgtggcttctacctcattgctaaaatacattgtctgtgaaaaatgcagtaaatgagttttacatatggtactatcttgtattaatattgcttcagaatccttttcttgctccagccaaagaaactactccataatattcatttttacacacaacttcctttaaaaattatgtttattgaagtggaagaacattactagtggtcatcaggcattcaatcctcctatatttcctaggcatacaggaagctctattactcaccgtcttgacattaatcaagcaattaactatggccaatggaatgtaagcagaattaaccgaagtcatttgttgccaaaggcagtaaaaagcccctgcaagaaacttcagccctttcttttcctgctagggagacctagcagcgttatctaagctgatggaggacaaaagtggagcacactagttctctaggtcattgcttagaagatgcttcttgggaggaagccattagacccatagcaaacctagtgtgactaaaaaataaacttgtcgtatattaagccattacgattttgaattaatttattaccaaattatagcacaatttctcctaagaactacattaaagtttattttataatgagaatacataatctctggaggatttttttttcctttagtggttcacaaaaatgcagttacttgtatagtcatttaaagagtctttaaaactgccttaagctgagaaatgttgaaacatttttactttaatctattctataaccattctcccatactggataatttattcaaatgctatctcctccaaatctgcagcagcaatattttccccgtgagtctttccatagcatttgccgagaaatgaatttcggtttataccatattattttccaagtcatttcagccaattatgctgtggcaaaagaacaggtgtttccccaatgatgtattttcgtctttccctattaggttagaaaacttcataagaaagttctaaatatttatctataaattcactaaaaaatttaaagtaatggactgagaatcctatgaatttaaacattgtttaaaaaagttggagaggtttattttcatgttctggatactagatgttcacaagttttaaattctgagtagttttcaggcttactattatagcttcatgctggtatgtcaagctctaatatacatttcaggtgagattcatcttgcagtgtgtgtgtgtgtgtgtgtgtgtgtgtgtgtgttttgcctggcttctcgtctgatctgtttagatggtaatttttttaaattcaggttgtgtgtgataatgaccttgtcctgtattttatattttatattcacatcatgatttcctttcaagaatcattttaagacacttctatgtgagatttcatcccgttataattagatattataatcaacgaatccacctaaccaagaatatgtaattttaaatatatgaccacactgaaattaaataaatggataaagatgccttatcaagccttccacattgatggaactctcacaccctcggagggatacctcccatgacagagtgaagggtgactcagtgagcatcatcataaccgtcttccttcaatccctccattttctccaacattgtagatggggaaaaataaacccattataagcccttctttaatctagggtagccatgtgacattattctagccaatagaatataatcagaagtccctagagaaagtacccattcctagataaaaccttgctaggagaaggctttcagtttggtgctttccttttctctcagcgtggaacatggatggaatgcttgaagtggaagtagcagcaaccatcttaccttgagaagcctcacatgccaagtcacatggctaggaaggatcaaggtgtaaggactaagatcctgaatgtctgatttcaaaaccaaaatgttcttactccttttggtttactacccaccatagcagagatacagtgagcttcgtgggagagagaaaatttcaaatgaaagaaaactatagcaatggagagtcaagaaatgtctaactcggtaggacaacaggattttaggagaaggggttccacaacgcaaggcaaaaaagcaactgatgtcctcaggacatttgtggaaggaaggtattttgatgaagcatctttattattaaatgtgatcacacataaattaactttgtagagataatctaattgttggtgaagccttaattgaatgcagattgttacatgctctttgtacggcaggatttattggaaggacatgaagtagagaaatgatttggtatcattttgacaagcattgtctacttatttaaaaggtgtgatgacatatgatccagcatcagatccctagataggaacctgttttacatataggtatatgcagtttttttttaaataaaaattaacattttctcaatcttttccattattttgctaaggattttcttattgtagtgtgggtataaatttaactctaattctagccataaaaactatttaaaacgatttggcctcattgtatggaatttaaattttgagaagtgttttttctttttttctattgtacaagtctggtacatcagagaaacaagtaataacagaccaggtattttttgaaactttaatttactggtttgagtagagcaagggctcatagaattcatgagaagtagaagctgaggaagactggggccaggctgagatttaactgaagaaatcttggaattagagaggaccatggatttcaaggttaagtatgtgatgatcatcattgagtcaaaatagaaagaatgtagtgtattcaacaagtatttgttgaaaatttacaactgtataggaaatttgcaattcttctatcaggaattatgcttgactttctgtgctttattatttttcagatattccagaatataataaaatcttgtttttattaaatctgcaaccaacttctaaatatcccaacccctgagcagtgatgagcagaagactaaagctatattgttccaaatcaagtcagaaatgaggagaaatcaggagaataaggtcctctgtggaaaattccctggcattagtttcatgaagctgaattttgagcactgataataggaacactgctgccaacctagatatcacggcacacaggtagattttgaaagacatccagaccgcgtacctcttagcaatttgtagctggtgtttagcacctgatgttatattctgacgtacacccagaacctggtcacgacatactgtctgccaccttaaccatttcaaactcttgggctctgtgccagatgccaaactggcaaactgtagacaaaaaaattccataatccaattatggaagtataagccaggtgagtctaacttggagtttgaatcacaaaatttcaataatttccttcccatttcattctatctaaaggcttctcaactttgtggctattaacatttaggctgggaagtttttttggctgtgggaggttatctgtacattgtagtgtatttaaaagcggcatctctgggctctactcacctgaggccagtagcaaccacccgagtcatgttgatcaaaaatacatgggaacactgacagaagagacttggggacaaaattgtaccccatcctcacttagtcaacaaccactgctctgtgcagaagttacaccaatgctgaaatattccaaataaccgtagtccacagtatcaagcagaacacagaggtcgcatagcacaaggctcattctatttgacagcgtggacactgcaggggatggaaaggcctaattctgacaaagtaagaggaatgtaggctacattcaaggtttggaaaggagatgtgatagaagaaaagtagaaacttgctacttttctgcaaactggtgtgaagggagggaaggtgactggtatttgcagcgttcagtgccaaaccgaacaatgtgctgaacaaaaagacttttcttgtttgtttaacttaaggacttgttttctccaagatagagacagctgagcaggtttagagtcagaaaagagttaataaaagagtatgtaggcagacatggaaaagggaaacagaagggggaaatggaagttcaacgaaaggaatggtagttacaggatgtctgaagaggtggctgatgttatggaggacagaacaacacagccagaagaattgagaatccagaactgggctgtgtaattttaagtcttgggtttactatttagatgcatgacattgggttttgtttttttaaatcttagaattccagttttctcatctgcaaaatgcgggtcataataattcccactcttcagcgttactgggatgtgcaaatgtgaatgtctgtaaggcatataacaatgcctgtactaaatatgcagctatagaataatactgaatgcatgatgaggtgtcatggagcacacagggcacacatatgcagagtggcttccacagtgactgtgatgatcctgtgtagtccgagctcagtgaaaattaacaagaagatatgagcatgccctagcaggcagaaggagagaggaggattaaagccttaatgtgaccacagacccaggatggaccaataatctttggcctttctaatggctatgctggaaatgggtgaatgcagaggaggaatgcaatagctaatctgccaggagcattgaaagtgagagacgacaggtaagtagctaaggaaattgtgggagttggggcaccaaggccatggtctttcttaacagaggagcaaggagaaatgtctggtgactctatggtccaggtgtggttcacagtgtcagaacatgcattctctgtggagatggggcttggagttaaaatctcagcccttaaaatatcatctctcccatataagtgcccaatacatagctgttcagtggacaattgaataggtaagggaaactagtagcttctttctgatgtaaactcttcttgcaaacctttaaaatcttcatagccattacattttaccttttatggctatttacatatgtgatagttaattttgtgtcaacttgacagtgccacagggtgcccagatatttgatcaaacatgattctgggggtcagaggttttagttgaaaccagcatttgaataggtagactaagtaaagcagattgccctccctgctgtgggtgagccttatccagtcagttgaaggccaatttcagatcttgggacttctacctccataatcgcttgagccaattccttataataaatccctttcacacacacacacacacacacacacacacacacacacacacagagttgacacttgcatacaggtttgaactgcatagatccacttatatatggatttttttctgcctctgccacccgagacagcaagaccaacccatcttcttcctccttctgcctattcaatgtgaagatgaggatgaagacctttatgattactattaaatgaaaacggataaatatgttttttcttccttatgattttcttaatcctttcttctagcttacattattgtaataacacagtatataatacatataacatataaaatatgtgttaactgacttattggtaaggcttccaatcaacagttaatttttaggggagtcaaagttatacacaaaatttcactgctcagggtggctggtatcagtgccctaaccccctcattgtgcaggggccaactctacatctacatctgtctcctgtttttctagagaaccatgaccaatacacacattttgcctgttattataattactgtatatttgcctcagttctttcaccagattctacatctgagatagttgactataactttttcagttttttgtctcatatgaccttatttttaatagccacacatctagacatttgtagaattaaacgcaatttcaaagaataatggtgaaaaaaagacacaaagctacaatgtcagattggctggagagtcacaatttggtgaagtgtttcttaaactggaatccactgatgtattcaaaaagttgagaaaaaaaattcctttaatttgctattttaataatctacaataatattttatcagttacaaggacagacttgtcttttgtggtgaaaagcacaactgaaagatattttgatagaccctgagctcttaagtcagtgcctctatgacttctcaggctttttattcctattaaaggagttacattattcaaatttaagaaaattttggttggagaaagaaccccaggatggatatcaggagagcagtttctaactctggctctgccaacattgtgcaaattattctagacctaaattttggtgtttttttaaattaaaacaaagggtttaaatttgatgttttctgagtttctctctgcttcaaatgtctaagaatgttgaaattagcagggaaaaaggaaaatataagtgtgaacaagatagtacatatttcaaaaaaaaagtatcaactatagctatagagtaattactatatatcaggcatgattccaggtacttgatattcatcaatgtacaaattaaaatccctgccctcaggaagcttgcataaagggcatatttgggtgaatgagtgggttaaaaagaaaacaaacagtgaaataaataaattcacatatgacctagaagaaatatgtgaattcatattcagtggaaaactatgcactacctagaagatatctgcttctagtcattcactgtctttgagcacttttacagatctttaagttgtagataacagagagcaatgtaaaacaattcttttacagagggtccctgatttaggatagttcaacttactattgttcaactttaagaaggtgcaaaagctacatacattcaatagaaaccaaacttagagtgctcagataaccattctgttttttcacttttagtattcaataaattttaagagatatacaacattgtattataaaatagggtttgtgctggatgatcttacccaaatgtaggctaagataagtttgtgaacacatttaagataggctgtgctaagctacaacatttggtaggttaagggtattacatgcattctcaacttatgacattttcaacttatgagtttattgaggtgtaactcttgtaaattgaggagcatctgtatacctgaagtttagtgaggtaaaattgacttctccctcatctctccccaccccaaataaaaagccagtttagtctccatttgcacattcatttcagtgttcctgatctatatataaatttgccagatctacagattgtcctttgaactcgtcttaacatctgcttggatgttaattaagggataaaatagaatctttaaaatgctcatttttatttatgagggttatgatttttacctttctctgaaagttatcttttagtcataaataaagtctacaaagaaaataaaccagatgaatgtggcggagtgttatgaggtgagctgaggggctgaacagcttcacatctgctcatcaggaaagtcttcttgcaggagggagacactgaactggaatgtaaatgatgacagtagcatctctgagaggccatggggaggaacattccaggaagaggcagcaagagagacaaggatcctgaggtgagcatttctttgctggattcagggtatcagaacacagccaagacttgagactagtacacactgcatgaagggaatatgacataaggtgaggacagagatatagacaattgccagatgtttagggcatcaaaggccatgatacggtgtttgggttttattctcaatgcaattgggaagacataggaaagaaatgatctgaattccatattcgaaagaacttcctgtagccaagacacttgatttactggttgatctgtatcacttgtttagtcctcaagctaattctatggggcaagcattctgattttcccccacctcatagataaggaaaatgaagctcagagggtaagtgggcagctaatatctacaaggcaatgactgtaatccgtcaatgtaaataggtgtttgcataatattggtgattaagttgtgaatgagttcaatcttttatcaacaatacttttctgaaccattgaattgaattaggttttatagatttactttacagagtttcttatcctttttcttttaaggttattttctggctctcctttcaggaaatatttgtaaagtttgttgaggaatttgagttaacactactattgaatcaatgctagctattaaagccttgggaagcttatccaacttctgtattgtttctatcagtttttatttgtgtatataatgaaccatagtgtaactagcatatagtcttacacacagcagatgcttacttactcactactcatataatgcagttacactggcacatttcttctctaaactacttaccatgtcagcaacaaataaaatgcatctttttttttttttttgagatggagtctcacttttgtcacccaggctggagtgcagtggcaggatgtcggctcactgcaacctccgcctcccaggctcaagcgattctcttgcctcagcctcctgagtagctgggattacaggctcatgccaccacgcccagctaatttttgtattttttagtagagacggggtttcaccatgttgtccaggctggtctcaaactcctgacctcaggtgatccaccggccttggcctcccaaagtgctgagatgacaggcgtgagccaccacacctggccttgcaatgcatcttagtcttatttgtaatagcttttaggttgggtttgcgatttaatggctatgtgaatgatttattttttccccctaatttagtgaatctattacaaactgtattattctcactgatagttcacaatttaacgtttacaatactctcactattggagtagaaaaatcgcattttggaaacaaaggaaaaaaaaatcagtggattggttaagtcaagtcccacccaatgagctatgctgagaagacttgtctatctttgcaacttctttagatactgtaactttttattatatataattcctttatcatgatgatgtgcttttgctgttgactgggaatataatccgctcccatttcagctaattttccatggaccaatttagatgctttcccatctcaaaatacgaaaggttttgaagtctgacaagacaataacaatttggacacacactgaaatgaaccaccagtggtttcccagaagaactgcaatgactattttgtgtggagaacatttctccctgagtctcccgaatcatccagcttggccacatcccaattgttctttcagcaaaaatagagaaaaggaaaaaactagctaagcaaaacgttaagtacaaggaatatttcaggaagggcagtcagctggaagttttcagtcaaaactatcagctttttggatccaaaaggtttagggatttcaaccttacaagggaaaataacactagtcgtcctgagcatgtgtgtgtttatgttaatacaaacacactaattgtgcatctttcttctactttaaataagttttccaagcagatggtcgtgattaagcagataccttccacactcacagtggcctggtgagaaacaaaaataacacactaagcatattaaaatgtataaatattttctcatactgattttattagctgagcatctcatatgcgtgttgcctctaattcagcacaataggtttattttcatagattctgtttttttcttcaggctaggcagaattcctctgaggtgaagacacataatccctttagactcttgggtcaccccagggacggagtgcttttattgcttgctcaagctttaaaagagctgcttgttaagcctaagagatcagaatactatccttaaaaaaccctcaaatagggcaggcacccttcatcatatgtgctatgctaatcttcccgggagaaaaaaaaacccattgaactaaatgccttttttggagggcggggggaggcaaataaagcagagtttaaaaaatgaaaggaaaaatagtggcttctcttctgcctagaacgggaaggctttaactccatcattctacccaggtgaactaaaacagttacatattagtatatcagtcatcatttttagaagttaacctacttctggtttttgttccacgtcagcttagactacaagaagccccataacttaaagtatcaaatagtaagaaaacattataaactgagtcaaaacaattgtttcaactagatgagacttaaggtcagataaatgtattattttaaaaatagtaagagttataactgataacagcattaattactaacagtcctttaaaaatccttaatgcattaataatgcatattttatgtgattgttaattacttaagacatctttttagggtcctgaaattacatgcgccaagcacctgttacatggcttctttgaaggttaatgaagcagaaaaatggagttcaaatacacggagagaaatataatgaaggaaaaagaggaatagactagccttttagaagcacatagtgaaaaaacatctaatgatcttttattgtgttgacatgtattttaggtttaaaaagaaactattagagtcaatcattatattatgttttacaacccttacctattttaggcctccaaaccgtttttacctgtgatttaaaaaataacttagaactgcacttctgccattcactggagctgatttgcactccgaactctgttctaacctaatcagggccccactttctcattgggtaaccaagcaaaaacatgaaagcggtgagttgtacacaaagacacatgagggccaaattgtcttaagtttccagaatggccagtgaagatggcagcaacttcttgctacattttgatggatccctggcatggaaaagcaagatgatcccttatcctataactatgtactgtccaacaatggcatctttgtgataagatgtttccactttcaaaggaagctatgcaggcagcttccagaatcctgtgtatcaaagtatttcggttggtgcaaaagtaaccgtgttttttgccattaaaagtaatgaaatcatttttaggttggtgcaaaattgtggtttttatcattccttttgcaccaacctaacaaaacacgaaacacatcatttgataagatacaaatatcaagcctgaacttaattaaaaatgcttacaatgtgaccaatttagagactatcttatgaacaagaacagacatctcttatggaaataagagcttaggtttatatggatttaaactttttgaagcaattttacattttattgcatttgattcttctatctgtgaggattgttgtaatgacaaaccacagagaatatcattggcttaaaacagcacgggtgttatttcttgctcatgttacttttcatggatcacctgaggagagccacttgccctctattaccctcactcaggtatccaggccaagggaagctccatctctgtgcttctgtgattgcgaagtcagggaaagggagcatgctgagtggtacactagctgtatcttcttgaaagtgattcaggtcacttctgctcattgtttgtgagccaaagcaagtcccatggttccttcttcaaaggaagtgaggaacttaaaccagctctattcctggaaacaaaacaacccgaatgtgtaggagagatcaacaactaccacattcttcttaatagctctatgaggaaatacagtcctggaaaccaggcattttttccaaagacgaaagtagacaatggataggcaactacacggggaaagcctcttctttgctggtatcatctcactatgccattgtaaaccaaaaataaaatcccaagacccccaaccaattaaatggacccctcctcttgggcaagagtgttcctaaatatatctgaaaaactagtttaggccatgatgagaagggggatcgacatacctcattaaactcccatccctttggaattcaagcacagctcaccagcatttaacattaaaatggagaccttaagactgacaaagcaaacactttgtggcaataagataccaagtgacagatagcaggccctaaaagaaatcaaagtatttaaccctaaaatttatttctttgacatattttgaaatggccctgcaaagttgtctcttgtagggaaaatctacgttctgtagagaacccacttccctttccaggcctttttcctgatccaagagagaattaattaagagtctggcatctttttaagtctgataagaaacatttactatctattctctctgaagcctgctacctggaggcttcatcagcataataaaaaccttggtctccataactccttatcttaacccagacactcctttctattgattccaggtctttagataaactcttttaaccaactgccaatcaggaaatctttgaatccccctataacctggaagtccccatgctttcagttgttccacctttctggaccaaatcaatatttatattatgtgtattgactgatgtcttatgtctccctacaatgtgtaaaaccaagccatagccagactgctttgggcacatgttctcaggacctcctgaagctgtgtcatgtctatgtccttaagcttagcaaaataaacttctaaattgactgagacctgtctcagatacttttggtcaacaccacaatgtgtaaaattttattcctcctttctttaggctgaacaatgccttgcttaacacaaaaatacctttcttaacatcctgttgtgaattgttagatgatgggaatatactcttcaagatgaacatgaagcacagtcatgatacaaaaatcaaactattaagtggtgcaccccagcctgattcagtaggaagggatttctggcctacagcataggaggtctccatgacttttgtagtatggagtggaaagatgggtaggatgggagttgggaggctctttttaccaaaaggcaggacagtcctagggggaaaaaaaagaaaaaaacacctctgtggacatttttgaagataatacattatgaaaaagttaagtaatgtgtccttcttaagtaatatttcttagaactttataaagcaaattaaaaacaaagtaagaattaaacagatgatgcgtgtaaaaactgcgaacttgcagaaaaaaaaaaaagactgagaattttcttgaaatagctgtgctagccctagtcaagtaattgaccattccagtgaagcttaatttgggacactaaatttggaatcaggaccatgaaagaaaagttgacagatgggacttggagacatacttctactgaacacactgaagtatctaagaattgcaagttgataccaacattgtgctgtatattatttatatagcacatatatatactttcttacattgacaaggtgctttgatattttgatcataaaacttttttgaatgaagccttcatgaagtcccatattcctgactttttgctagcattctcataaaatcctgtcatatttttaattcatagtttctagccatctttttggctttaacactcaaaagctccattggaaagctttttccaggttgaaggaattgctttattgcccttctattcctcttgccatgtaaagacaaattgttaatctcctccagaggattcaccaataaggcaccatgttaaaaatgaagaccaggtccttatcagacacttaattgatcagttccttcatcttgaacttcatctctagaacaataaaagtttattttgtataaattcctagtctctggtattttgttacagtagtgcaaatggactaagaaactgatactaggagttgggtgttgctgtaacaaatacctgaaaatgtgggaacatctttgaaactgggtcatgggtagaggctggaatggttctgaaatgaatgctgaaaacctgctatattgctatgacagaaaattaagggtgattcttgcaagacctcagaagaacagaagagctacagagacagtctcagtcttagagaacatctaaatggtcttgaacagaatgttggtaaaaatatggacaataaaggccattctgattaggtcttcatagggaaatgaagattatcttattgggaactggaggaaagtccactcttgttacaaaatgtggtaaataacttggctgaattgtgtccgtgtcccttctgctttgggaaaggaggaatttaagagtgataaactaggttatttggcatgagaaaactttaagcaaggtgttgagggtgctgcatggtttctattatctgcttataataaaatgcaaacagaaattagttaaatatggaatttattatcaacagagaaaccaaccaaagacttagaaaattctcagtctggccatataaagaataaaaagtgttcagaaaaggaaaccaagggtgtggtaaagttaccctttgatagattcctatagacagaaggaagccagtgctactcattaagacaatgaaagaatgtccccaaaggcatctcagagatccttgaggctgccatgctcatcactggcccagaagtaccaggtctctgagggaagaattatttcaaggaaaaagcctagggcccccatgcgatctcagagctatttgcacatgttcatatcaagtctctgtccccacactctggtgcagtgccccttggcagcctcagctgtggcccaagaaggcccaggtatagcttgagctgcaactccagagggtacaagatgtaaacctttgcaccatccacatgatgccaactctgaaggtgcatgaagtgttgaattcaacataacattagaaggatcctatactacgaacaagtggaatgtatccctaggatgccaggatagtttagcagaaataaatataaataaatacatgtgatataccacagtaacacaatgaaggacaaaaacaatatgatcatctcagtagattcagaaaaaacatttgacaacacccagcatccttttatgataataattctcaacaacttaggtatagaagtaatgtacctcaacataatgaaggtcacatatgctaaacccacacctaatgtcatcctcagcagggaaatgttgaaagtttttcctctaagatcagtaacaagacaatactcttacctcctctattcaacatagtactgaaagatctagctagagaaatcaagcaagagaaagaaaaaaatggcatccagattggaaaggaagaaattagattgctcctgttttggggtgacagtaaatagaaaaccctaaaaactccacagaaagtattagaactaacaaatttagtaaagttacaggatacaaaaaccagcaaacaaaaaaacagtagcatttctatacactaaccaaaagataaatcaataaaaaacaatacaaatttacactagccactaaaattaactaaaatacttagggacaatttcagccaaggaggtgaaaaatctatagactgaaaacgataaaacaccgatgaaagaaattgaagaacacacaaataaatgaaaatgcattccatggtcatggattggaagaatattaatattatgatgcctatacttacccaaaagaaatctacagattcaatgcaatccctgtgaaaatgccaaagatgctttccaccaaaataaaaaaaaattctaaactttgtatggaaccacaagagaccccaaatagccagaacaatcttgagcaaaagaacaaagctggagataccacactacctgacttcaaaatttactacaaaactatgctaatgaaaacagcatggaactggcataaaaagaggcatgcagaccaatggaacagaatagagagctcagaaataaatccacacttttactgtcaattgacccaacagcttccaggaacacaccgtggagaaagaatagtgtcattaaatgatgtgggacaactagatttccatatacagaagaatgaaattgatttttatcttataccatgtaaaaagtcaactcaaaatggattaaagacttataagcaagacctgaaacgataaaactactagaagtaaccatactggaaaatctccgtgacattggtctgggcaatgatattttcaaggtgaacccaaaagcacaggtagcaaaaatagatgggtgggactacaaactaaaaagcctctgcatagccaaggaaagaatcagagtaaagaaaacctatagaatgggagaaaatatttgcaaatcatatacttgataaggtgttaatattcgaaatatataagaaactcaatgtaaggaaacaactcaatttttaaatgggcaaaggatcaaaactagacatttctcaaaagatgacatacaaaggtccaacaggcatatgaataaatgctcatcactaatcccagaaaaatgcaaattaaaaccacaatgagatatcacttccttcctgttagaatgactcttctcaaaaagacaaaagatactaagtactggtgaggatgtggagaaaagggaacctttgcacaaggttgacctaatcagaatggcctttactactgttgtagagggccctcaaaaaaataaaaatataactgcaatatggcctagcaatcccactactgggtatacaaccaaaggaaatgaaatcagtatgtcaaagaggtacctgcccttccatttcactgaagcattcttcacaataggcaagatatagagtcaacataagtgtccatcagcaggtgaatggatcaagaaaatgtatatgagcctgagagtttggaatgaaccagtcacacatgtgtattctggtgaagagtgatagaatcctttatatcagtcacctggcctagaagagttatatatgactttttttaaccttaaaaatgaaggacattctgtcatttgagacagcatgggttaacctggcaggcaatacattaagtgaaataaaacaggtacagaaagacatatatgatctcactcacatgtggaatctgtaattgaattcagaagtagagaggagaacagtggttacccgaggctggagtgtgagtgggtgttggggagatgttcgtcaaatcacacaaaatttcagttaggaagaatgagttctagagatcaattaaccatagcatggggactatggttaattatagtgtatcatatttttgaaaattcctgagtagattttgttctcaccacaaaaatttgaagtaatgaacattagttcaatttagccatttcacaatgtacacagatttcaaaataacatgtagtacataagtactatataccatctttgtcaaatattctcagatggtattcttgtaaccaagcgagttatagagaaacgccacactttgagactaattcaggagtcctttattagccggcgactgagagatggctaatacttgaaattctctcggccacaaagaaagggctagattttctcttatactttcatttagagagggcaggaggaactgagctgaagcaatcttacagaagtaaaacaggcaaaaaaaaaatggaaaagacaaatggttacaggaaaacaaagttccaggtgcaggggctttaaattcatcacaaggtgataggtgtgggggctccggacacaaacgcgggggctttattatactatcacccgagcgaattcctgggaactgtggacacagcttgccgcagtaccttatcagttaattgcactctttgatgtgctgagagtcagcttgcacaagttaagtccttgaggaagggggtgggtaaggagatcttaatgtcttgcaaatgaaggagccaaatggaatctgtctggctttttcagctaagagtcaatcaagctaatacaagttagggtatcacagtatgtattttataaaagttaaaatacatttttaaaatgtattgctgcagcatacttgtgcctgtttactttagtgacagccttattttgaatttttgtataaaaatagggaggtaatttatatcctttactcttggcaccatgcccaattgaagtcagaagaccatcaggatttgagttctggttttgtcacttacatgctgttggatctacccctagccattgacgagatcaattttcacacacatcaaaataagaatatctgccatgccttagctagcttgtgttgtgaaggctaagtaagtttaaaatcataaaaatggaaacttctaatgtgttttagaattttaaactaggccgggcgtggtggctcatgcctgtaatcccagcacttcaggaggccgaggcgggtggatcacaaggtcaggagtttgagaccagcctggccaacgtggtgaaaccccatctctactaaaaatacaaaacttagccaggtgtggtggtgggtgcctgtagtcccagctactcaggaggctggggcaggagaatcgcttgaacccgagaggcggaggttgcagtgagccgagatcatgccactgcactccagcctgggtgacagagcaagactccatctcaaaaaaaaataaaaaaataaaataaaataagtaaataaataattaaacagtgacatttatagtttaaacttaggtaggtctctttaccctgtggggtaaagaatgcactttaattatcatcagaattagaaatattactgatatttttagttcacttttgtggcagctgaaagctttggagattaactgtctgcattctgtgtggattatttgctatcttgtttctagtacgtgttcttagtgagttcctgagacatgtttaactgtgaacgtactaagggtgaaacaatcaaatgtcttgtttcatatgaaatttaggacctaaaataggcagacttcagtaacaatctcttctcaaattcagtaataatctcttctcaatttttctcctagagcaaaatttactgctttatgcaagctgaagaaatacagagacaagctgccaaataaggtaacagaagtatttttaaattgaaatgaaggaggccaggtgactgatatgaaagattcctaccactcttcgccagaatacccatgtgtaattggttcattccaaactcttcaagaaaaggaattgaatcctggaagaaatgtcactgaaacaaaatatttaaaaaaatttctcagggatcaaaaaagcatgttgaacataaagtatttgcgggtagattttttaaaatacaaatttcaaaaatatatgtaatgtccatggggagaaagattactatttaaatataagatattagattcttcttcctaaatcttattattggattaacagattccagcacttaacactaaatgccgcctggataagaagggatactccttaatgtggtttaccttgtttctttacctgtaacataactataatgtttattttccttttttcctgtagtttcttgcctaagggtaatgttttatccttcactaaaacaacaagatcgtgacgcttcttatttctgatggaaagcaatcaattaaagggcctttgatttctagtctcacccaagaaaatcatgcttcacatttcaaaagaaaagcagactaaaattttcaaatacgctttctccattcctgaaaattttacttgggcaattccagtaataagacaatcatcacatgggtgctttcagcaaataacccaaggacggaaataggagctgcattttcactaatgcatgagagctacaagagagccgaactctacatgggtgagacttccagagaaaacagttttaatacttatagaaagatgaggctattatcacagtcaaactccaaatgtatttagtgtcagctggacttgaaagcaaagccagcctcctctctgccacacacccacatacagctgtagtcaattccctttagattttgcttcctcaatgcttctaacatcaaccccgctcctgcctgtctccagttcagactgctgctacacgtgcaagttcaggcttttcccatttctgtttttgctcatgctgtttctttcatctagaatcccttcagacttgtctgttgaactcctacctaagttcctttaagagttaattattctgccctgctgcacccccagccctcccgcaacacacacacacacacccctccctccccaccttctactctctcactagggcactagatagccctccaatgtcttaatgacttttttggagcattcagcatattctgacttcatttctcttaaatcattttcctgccactcaaaagcctttcctcattcctcattcctgaactagaagctttatttatctcacagacctatgcttcgtgctactactttctgcaacttgggctgaaattcccaccattcttttaacaaatatttattaaaagcatactagctaaaaaaaaattcatacttaattgactcccttggaagagatggccaacctggtgctttacagaggggagattctgttagatgcctgagggtcactcaggaagaaaggattcttcttttctccagccctctaatgagttacagattatcttaatagtttattattgctttagatgacctagctgtggggataaaatccaggacaggccaggtgtggttgctcaagcctgtaatccagcacttggggaggctgaggtgggtggatcccgactcaggagttcaagaccagcctgggcgacatggtgaaaccctttctctactaaaaatacaaaaataactgggcatggtgatgtgcacctgtagtcccagctcctcaggaggctgaggcaggagaattgcttgaacccgggaggcggagtttgtagtgggcagagatcacgccactgcacttcagcctgggtgacagaacaagactctgtctcaaaaaaaaaaaaccaccaccaccaccgaaaaaaccccaagacagttgttttaacaaaacaatggagtttgagggttcaaggaacataatagccaaattctgagtgtctgcagtcatagagagcagaaggtgttaggagagaacagtaaaaagcaaggtactggataatggattgtctagaaaaggataggggtgtggcgaggagatgctgtcaaatgaattgggaaaagccgaggataggagggggagagataggagagaaagacaaagtcgtgcatgtaaatatgtactacacattttgattagaattaaatctggccctaagaagaatgtttaagaagagagacattgtcaataatcaatactatgagtgtgtatcaatgactcgggaaacatatctgtgcagaatacacccacagagattctaattcaagtgcgtggggtggggccaaggaatctgaactttgaataagcatcccaagtgattgagacatgtggtccaagggccaccctttggaaacagtagtagagactgtaaggttttgctttcaaaacataactcagatcccagcacctactagttagattcatgggcagtctgcccatgaatctgatgtctgagtagccggaaaatatctagatagcttcatgcgtggattgctcactattcttgttgtcaccaaaggtccaacttaagagaagaatctatagttttgatacatttaagtcttaagttcccatatccgttccatttaggactgctacatgttctcagctaaagagtatggcatttttctttcatatttgcagttgcttaaaattcaacatcgcatgtagttttcagtagtaaaggctctacagatgtcccagtgataattcataaactcacaagagccaaacatgcaagtacaaacataattcgttagctttttgacttttaaaccatacccagaaagcacaattaagtctctgtacagtaattttctcatgaaaaatggccagtaaattcttcccatagataatttattttagtgttattgattttttcccctcctaaaaagctgtattgaaacaacagccattaaggcttatagagctttgcaacatctggttatgattgcagacaattgctccattcctttttcttgaggcagcaaataataccgttgagaacaccttcattagccgcctactatttccctttcagatggcacctggggaaaggcttgcaaaagagataaagaaatatctgaaggcaaagcaatggttattgtccataaattacttatgtcatttacccagagtctgctccctggtggtgtgttagaagaacactttgcttctatgttcattacttgagatagctttggccaacgcatttagtgaattaaatgcatccatttttcagctagacgcatactagcacaatcttccacttaaacaatttggtgtaagtaaacttcatcaatatatttttttgagacagagtctcactcttttgcccaggctcaagtgcagtggcgcgatcttggctcactgcagcctccttatcctgggttcaagctatttttatgcttcagcctcccaagtagcggagattacaggcatgcaccaccgtgcccagctaatttttgtatttttagtacaggcggggttttgctatgttggccaggctggtcttggtctcaagtgatcagcgtgcctcggcctcccaaaacgctggggttacaggtgtgagctaccatgctcagctcatcaatattatagtcacttttgctggctgaaagaaacaaactgactctggccaattgaagtgaaatgattttatcaaaaagattggagtaactcaggaaacttcttggaaggcttgagaatgaggcttagcaaatgaggaagtactaggaaacatcaggtaggtgccaggaccaaaggaaattaagggagaatacttcttcctctgccattggagaggacacaatcctggctgccaccatccacactgggaaacttctgtacaaacttctggtgtggtttctgtacaaatgaatgcatttcactgtatgttgctgcttcaaagttcaaatgccagtagaatcttggtctggttagctaagcctacatctcaagtctctgggctagatgatggcaagcatgagactgaatctaaatgaactgggctttccaaatctctagaaggatgcaggctctgtctctcaccaagatacatagtggaaacctaagaaggttcagaggctggacagtcaaaaaatcctgaactgttcactacatttagtggcaagacccaacatgaagtttgaattatggttccctcagaaaacattgactcaaacagttagtttttaacatgggctacaacacatctaaaagagtaaaattaattaccaaatacctgtcacagtattagtagttttaaggagtgtaaaatggtagagagtcggaatttatgcccacaaatataaagtttataaatatacaaacatgtagctgaatattaaagtttcccattattctttcatccaatctgtaatcaacatacattttgtgtttgatagaccacacactccattagatactgggaaattagaggtgaatttaactctgttcttctccttaacggacccattgtagaagatgacataggtgcagacacatggtgcaatgcagtggcttgggtgctttacgacagggatccccaactcctgggccacagacccgtattggtcctcaacctgttaggaactgggctgcacagcaagaggtgaactgcaggcatgcaagcattatcacctgcgctccgcctcctgtcagagcagtggctgcatcagattctcataggagcatgaaccctattgtgaactgtgcatacgagggatctagattgcatgctccttatgagaaggtgatgactagtgatctgaaggtagaacagtttcatcctgaaaccttcccccgccactaccaccgtggaaaaattgtcttccagaaaaccagtccctggtgccaaaaatgttgaggaccgctgctttatgaaattatgtaccaagcgtggtaaagataaaaaatgttgagaggtcaaatctacctaagcaggaaagacagacttcaggtaaaaaacaataaactgtcatagaaaagttagaagggttctcctgggaaactaagagaatggatttccaggcataagacacagaagcaattcaatgtgatgtggaaatgggagaatgtgtgtatgttgtcagggttagggagaacacaggtgagagaggaaaggagaaaagaaaggaaatgagactagagaaggagagaaagttaagatttgaggaacctcttccttgtagagaatttgagtttagcatgtaggcaatagagaatctaaaaggtttttaatcaaagtaataccatatttcacgtttaggctttgtgtttcatggagtattctgtaaaggttgttctgatatgcagaatggattgggggaggtgagaagagacaggaagatctgatagatttttgggaatattccaaggaagagattcaaagctagtgaaattgactattaatggaaaatgagagaaggatttgagacttttttttaaaaaggtctggcaaggctttctaacagcacatagggaatgaggggagtggtagaggaggatgctgggctaacagccaggctttggcaggggtatggggtgccaatgggagaagagtaaaggattgggagagaaaagaaatgtcctgtaaacttcgagagatacaaactcggaatgcaggagctattttaattagaagtatcactattaatcaccagggtagaggacatgagatatctctgggagaatacacacaataaaaagagacgaggacaaagtaaccctgaagcacatcaacatttgaagaaatgacagaggagcctgcagtggaaacaggatgaatggtcagattggagcaatctgtggacagggtaacagaatggaagggtggagagcaatggaagaaaagtggcatggtcaataccatattaaacacattcttttctgtgtctataaggccatctatcgcagggacaatacctttcttaagacttaaactacccagcatctaatatacttttaaacatggttggtactcacaaatgttgagttgaagtataaagcatgtttgctaccagaggagttggtgatataacaccattcaaaattttcccctaaagaaagtctgcatatcagtgagttcccaggagtctcgagctcaaacattcatggtggtgtcatagtatctgtattctgccttcagaaaattgctagaactgttgccagctttagtataatcaggatgttactcatctagcccaaagaagaatctcttactggccaattagaaaaagacagtacattttcagaaaacaaagggatgaaaaagaagtggctggccagagacctcagagttcattttaacgtgggctccagtgagacatgtagagccatcactccaagggtaacaggtaatcagtgacaagtcggtagaaagtatgtcattagtaatatcgaaacatgcttgtgctggatgtatagtagaatatgtcttctcattccataatagtggtctatcttgttaacacatcttttggttataaacctctcttggtatatagacataaacctatagagatgagatatagttatagatgcagatagatacagatacatgcatacagatgtaaacactgtataggtatgaaaaatatgcatgtagtaatggatatggtcatgaatatggagatgtttggactaggtaggtgcctcctgactattgcaggatggattcaggtgcttagggcaattaagaacaggtacacagtactgtcaaaaagcttatttcatattatatgtacaaataaaatgacatgatacctgagatttgctccaaaatattatgggaggtaaaataggtgaggcacagatcaagcaagattcattgtgagttaatacttgttgaagctggctgatggatatatggatgttcatactaaactgtttacttttgtatttgttgagatgtttcctacaattaaatgtttttaaaaagtgaaagcttgttttagcctcagagtactacatattcaaatagcatcttattagctactaaacagtgtggtagagataattaaatcagtggacattcaagggggatatcaaagaggggatgagcctagaagcaggacattgaagtgaggggatatagtttggatagacagaggaattgggagggcatttgggaaggggaagcaatagtgtgatggttaatactgagtgtcaacttgattggattgaaggatacacagtattaatcctgggtgtgtctgcgagggtgttgccaaaagagattaacatttgagtcagtgggctggggaaggcagatccacccttaacctggtgggcacaatctcattagctgccagctaatataaagcaggcagaaaaacgtgaaaaggagagactggcctggcctcccagcctacatctttctcctgtgccagatgattcctctccatgaacactggactccatgttcttcagttttgggactcggactggctctccttgctcctcagctcacagacggcttattgtagggccttgagattgtataatacttaataaacttccaaatacatatacatatgtatacacacacatatcctattccatccttctagagaaccctgactaatacacaatagggaaagaaaaaggcatttgttgaacaataaaaatactagtttaagactaatggatgactgatgtaaacattgaattgatagagttctatgttatgaaaatccttggatcctacaggattcaatttatatcccatccataaagtgagaaacaggaacccattgatcatttctgaaaagaataagaaatccattttaaagaagattattctggtataatgaagaatggatagactaacagcaggaagtcctactaaaaagacttgtcagaattctcagggatgatgtgataaagacctcactagtgtggtggtggtgaaaggaatgggtgggtaagagaaaacacttgaagcaagaattaaatgactccgtgactatccagaggtgaagcaaaggaatgctcattgtacctatgtaaagacattaaaaaaatcaaacttttacttataataaagtaactttggcaaaacctggggagctgatttaaggttttaagaaatgacatgttcagatatttttaaagatgtagctccatttaaattttccaaattcatgttttagacagccgtattttcattatcactctctttttctttgggcagagtataacatctatgactgatattccaatgcatactatatgtgggtaggtattctgaaaaatacaaaagtaattacaccagggcaggaccactctattaaacgttatactttgtagacaagaaaaaaatttgaatgtacattataacacacccacacaataagttaatattcatgaaaccccattctctgattacataagaatgtaaagaacgtctcaattgtcacttaatgcatctgactttattaagattgagcataaaaagcaagaggctggattaaaaaccaccattaaaatacccaagtgaatttaattcagtatttatggaactgagtatgttttactctaataaggaacagcttaatgcaattcagtctgaacaaacacaaccctatgcagaggataaagtaagagtgacaagatgccaacacattatgacagctactgtgctgcctgatctagaacattatgcattttctaaaagtgcataaaaagcaaattttattattgcttccagcacatcaacctcacatttttagtttttattacccataatcccacaggttctggtaaaacatcaaactagagtttattagttaacattttaaaagaacacgattttaagatgctttctcaggtgctctatttcagcaattttgcttcataggccaagtagcagacatatcaccagcactgaaaacagccaacacactattattaccaacagggaaatccacccgcgagttgaaccagtaccaaccaaccacactgaaatgctgacagcatcacgggactttccaactgtagggacttggaaagcagctgctataccccttcactaaatgcagatggggagaagtgagtttgtttttttcatgctcaggaggatggatactgatgggaaaaccagcatgaatttccacagaggtaccagtgatgaggccattagttccagctattagttgcaaactgatctctcatctgccacctgctccttttcctgcattttctttctcagttcactgcattaccatctacccaatggcccaagctagaaatctccaaattggcttttttctctatccctcctgactcccactgcccctactgctcccgtcaaagttaagagatcaattccatcccttctctgaccccactgccatacttcagggtccttaccttgcccttcacataatactagaggttttaatcagattgtgtttaaccatcatttaatgctaactgagctatcccttggtacctgtaggggattggttccaggaccccccagaatgtctaaattcagagatgcccaagtctcttacacataaaaaagtagtatttgcatataacctacagacttcctcttgtatactttaaatcatccccagactacttataatatctaacacaatgtaaatgctgcatacatggttgtaacattgtattgtttagggaacagtctacacattcaggacaaacacaatcattccttgtctccccagatatttttgatctgcagttgaatccatggatgtacaacacatgcacaacacacgtgggggcctgaccgtaaaaacaagtctacaatgtgtcatctaatcatcgattaaaggtaaaacctattctcatgagagactaaagacaaaatcctttttatctctatcaatgattagatgacacgtgatagacttatagacttgttgacccattatagacttgttgctggaagatttagaaactgttaatttagaaattaggaatgaaattagcacttggaatcacttatctgtagtgcttataactcagatttaatattctgagtttaacagaatattggctgacatataaattccatagacattccaaatattaagaaatgctaacatttttcagagaaaaagatactggtcagttaagtggctgacactggatttaagaatcctttccttctgctgctcctatcctaaggctgatcaaggacgtgtttctcagatttcagattcgtctccctgtacacacttgcaaatgtgacaaacctaagttcttaagggattcattttcagaaaattaacatatcatctttgatttttaaatttggaagttgatacagggagtgggctattttcttttctgccacaaaaaacaagttgttatctcccaaaaacctgaagtggctattttgaggaatttagtcagatccagtctctgagcgacagctttgaagggagctgtactgattacacaatcccttttcacccaggccactgttcccagccttgtcagggcaggcctattgctatgtgccagtcaccttggagacacagcaagagcagcttcatcttgtggccttttctttagttcctcattttgaaagccacttacacttgaatgtattatttaatatggtgaaaaatgcatcatttcttccagagcttcagagctctaacgggcttaaaaagctctggaaatctttctaaaactaaaataaccttgccctcagaagaacagtgtatggtgttcatatcaggattatcagcagtgggcctggatgagtaaaataattaaacgaacagctttatgaatgtgggtggcatgatgcccctcacctccacccaagaagcttaaaagggccacatgtgtcataaaccaattatccctcccaccatgcctgaaagaagtacaaaattgctatagccatagcttcagaggtcctgttaaatcctagacacacaataactgtgcaaagagaaataacttggtccagcgtcgagaacaaagactaaaagacttcatcagatgttcaatttcctgacaaatggtataaactgatcatgttgattgaatcagagattgccaattcagttaggtcatttaaaccagacttagagaatttatatatttcttttaacactcctttttagctatagacttgaaccagaggtagaaagaaagaatggcatatggtgtctctgtattgtcagtgtagctaagcttcaactttctcaaaattcttttctctctatggctcttgcctagagctgactgcaagagaaatttgtgaaaagagtggactccagaagcgaatctggattcttgtttagcttggcaggagagcgtagtgtcagaagtgaagttcatgtgtgttgcggatatgcgggttcaccttgtcggcttctgtcttatctcttccatcagctttcctaatcctgggccaggtgcatttttaggaccctgaaagaccgtgtcagcttctcctgaaagtcatcggcctcattgaaactagaggcttgaaagttgtgaaaccaactcagtttccagtttatccttatggattcgaatttgtccttgttctctctccgttcacacctatttttccttcccaaatccctgctcacctcaggcctagcaccagatgcaaaagcaacagccatacatgaaatgcttaaccaaccctcagaattgtaccatgcccaggtcctctaataaatcccatattctatcacatgcctgatggtttacatctctgaccaaattctgagtgacacaggaggtgtgccaggctctgtcacaggcacattgctataaattgcacaatcccccctcacaaaagcttcagttttaactgaattggaaggaaaaaatacacaaaaatgccgacagtcacaggagtctctgtggcaccaaattcaagctttatgttattaggttggtacagatataattgtgggttttgccatttaaaagtaatggcaaaaacagcaattacttctgcaccaacctagtatttccctcgtgtcacatagcttgatgaagtctccccagtcaaagcacattaaacattgacattaggaaagtgaagacctcagggtaaagaaattagagctaagggccaggctataatagagctagaaggaaataagttgattaaataggcacagagctaagaagcaagtggtaagactaaattcagggagtcaacagaagttctcagtctttaggtactaaagagtctcagtaaacccttacaacattaaagacagaaaaatcctcacatgtatttaagattggggcaataagctaataaattgaaaaaaaaaaaaaaaaaaaaaaagggagacaccaagtccagagggcaaccaggacagaatgtcgagaattttggaagccaggagatcaagtattttgtgaacagctacttttgcggacggtaaatttggatgccttatggttcaaaggacagaacaaagcgagggggaaaagccagctcataggtgagaactagattgcagggattgaagaagtaggagaaacatacaagaggaagggtttaggaaaggctgagataagggccttttgggtgagtcaaggataattctcattagagcctaacctaagcccatctctgatcttgacatttaggcacaaagactaaaatgactatccagtcagtcaacaggactcgagctcaaagccaggttagtggcaaatcagggtgactttatgttggaccacaaaatatttgtctggagattctttctctctttccggaggtcagagttggtcctatcagggttgtacgctgaggtcaagtgattcttgcagctggcaaaagatagggaaccagaaggggtgacaagttgtgaggcttgaaaaagaaactgtgtatgaatagacatatcaattacacataaggcatgaaactcaatgattaagtgatttaccagttttacacttatgatccatatatgtaatatttgttcatatgacatatctaacagatattatatatgctccatatacataacgaggcaatgttgaccacattttcacgttaattatatttactggaactgagtgcagagattcaacttttcttagtgatcaaccgaagttcctgtgtttaaagatctattgctttgtcctaaactacttacactggagtaaagtaagtccatagactttgaagtattacttttctcttctgatatgaagatccgttattccacattaagttgtgcttttccagtttcttgtcacaagcatgtctataaacaattatattgattgaacttggctttgatgttctaacactcctggaattcacacagtggagtttcaaaagtaatgagcccacagatgtatatcctgccaccgccaccactcccacattcacacttttaaatatgtcttctgaaagaaatacaagaagactctcatgcagttacctgatatttacagccagcaaggaaatgtttgaaaaatatgcaggaatggcagctttctggctttttggcttattagatcccttgcttaaaaataacaatttcaagactcagcaaataaaaactctcattgcaaagatgtgataaaattcacaaaaggaatctacttcagcagtatttggcttaggtcccttcttggtaatgattcattttaatatcctcggtcttgttaaattcttacacttatttttatttgctcactgtgtcctaaccagcaagaaagctattaacatgatggtcatggatgttcctttctttacatattgcattttctgttccccttcactggaagtaacagcttcaaaatgagtattagattattagactttcattcatgcataattttaatgcagtcaatctggaccaggaaagcttctcctttagttgagctatgggcagagagaaatttctagatttctcagttctgaaactgggtgtatagtacagaattgggctaagccgatttccagaggaaacctggggataaatcacatcatgaccaggattatcctcaggctggctattgggtcagacggaactctagtttccacagatagtttcagaaagaaatgtttatgggaaaagttctgatcccatgaagatcacttatttatattgacatttgaaggagatatggaggtggagggaggaaggaccactggctgctgtgcaccaaaacctactcatttgacccaaaatacttgtagttacacagaagggcacagaagatgctaacttgaggtactgagaatcttctacaagcagggcagtatcaaggcccctgatgagagaagtctgtcctggtacagcaataagggaaaaaaggagctttgactctacagaattgaaaaacaataaaaccaaccaaaagtggttttacattttattaacactattagttggtaattcctaacatcagtgataaattcaaactttcttcggtctaaaatctaaacaatcctgcagtttacaagtgagttttaattatatatatctgccttgaatggggatataaaaatgccaggcatgcatgctacaaaaaggatacctaaatacagcaaataattcgggagtttttgttttgctctacttaatgatatgtaatctgtaaatatagctactgttgattgtctcatggacaggcatggctaccaggataacacagaagcatttcatttaaaattgttttagtgtatttttgtacagaggtatgtgatacctttggaaaatatgaagctcagtatggccatagttgagtagaacaaaactttcactgattttgtccccttctttcatccactctgctacaatctatgcttttccaaatgagtacaagaagcagagagatggtaaaggccttcttgaaaatgacttctcatgtctcatcctaaattcaggaggtgtttcaagtcctgaatactgacctaatctttgtaacacacatcgtccttaaccctcatttttaactaatcaaacaaatcaataggaggtaaagaagtaaatcgaaggtgaaatagcataatcctgctggtttatatgccatggagatcatatttacagatattaacacagcaaggaaaacaactctcccccccagagtatagcacattttaaaatcattgctatttttagaatgtgtctttttgtgacaatgaaaaagagtttcacatagtaattggcctttacaccaaatttggataaataactgaaacttggttcaggtttcaaccatgtcacattcaatcatcacatgaatgaatattacgaaagcaaaactgaactactttttattagaaatgtttttccctgtgtatattttgtatttcttcccatgtcttgacattaagccagctcaataggagatgtgtcctactaaattacatatgatccttatgcaattctagtgtccaattaatagtggcaatcacatgtcaaaaggacacatgcagagtctgtagtttaccatcattactttcctctcagcaagctgtaataatccttcattttgtttctcctctcctttcttcgacctcagatagcttctacctactttcttaattcttacaaaaaaaaaaaagtagtgcttacttttgaggccctctggtatttcacgcctgcctctgatattcttaactttacgttctccttgaaaactcattatttcaaggtagtatatgttgaactaatagattttaatacttgcatagattggatacaaaaatcactaatatcactaatagtcaaggattcttcaactctactgaagcaaaacaaaataaaaaaaaaaaactgtccaaataacatttagcattcaaaatggaaaatagaaaaaaaattaaagtaaacccagattattcttaccactttacaacttgttgaatattcttgaatacccttggagagttgataatagtaattagagagcttgcatgcgaatgctggttagatcagttgggttaaattatgactctgcccttgttttagctaggccaccttggacaagtttctaaacatctctatgcccaagtttcctcatctgcagaactaggaaaatagagttgtaaaaattaaatgagctgatatttacgaagtgcttagaatagcaccaggtctaaaccccagtgttatttgagacagtgtgagtcttcctctcagaagcactaagtacatagataatacaagagaagtgattacttctttcattgaggatcatggaagttttcacagaagaatggactcagtccaagtggggtgggacaacgtcagcgctactaacaccagttgtattgtaatacatcatagatgagataatgggagcctgaaatggtaacagctatcaggtcaaattaaagacagctttgactttgactccataaagaataaatctacagaatgtggcaactaagtaaagcaaggaatctcagccttggcatcagggagaacgagtatgtcctccatgcacacagacacaaagcactccagaacccgggcactgggtaatccttgagcagatagcagtagcctggagtgtgagggcaggaatatatgttagaaggagaatgccaagatcaaggaagaaacaggcagtagaccaagcccagaacttaggtgaaggaattagagagttgaaaaaaggttgctccttgtgtgggaacaaaaaccagaacacaagggcagggaggactctctcaggggacctctacctgtctcccagaggttcccaaatctcttatcaccaagagccaagatttgccctagataccagggggtcatcgtaatactgtagaagttcaacttaggaggaaagaacgatgaaaatgccaggaaatagaaggaagttctccattgtaaagttctgtatagaaatcaaagtcctggaaaagaagtatttctacatactttgatgacccaaggtagaggggttttaagtgaaaatgaagaaagaggaacaacaggagtcacatatttttaaatgactactttgaagcacattaggtacaatatgaaaagtaacaataaagaaactgcctagaaattcacagactaaaacagctgggagaggggccagaagacacttagatgtctacatactgacatacagagatttggcaaatttaacttagatctttcaacttgaaaagaaatgtaacagctcatatgttatcaagacacagcaacaaacatagctgtggaaaactatatcccactcaaaataaacacagtttttgctttgtttggttttcagaagaatatgaaaaatgttctgttatcaaggcatatacctgtgtatgttgacataaatttatacaaggaaattaagtgtcatgagtttccttatggtttctttctaagtgggtctcgaggcctttgtatcaagagtggacctaagtaggccaggcacggtggctagtgcctgtaatctcagcactttgggagcccgaggcgggcagatcacttgaggtcaggagttcgagaccagcctgaccaacagagtgaaatctcatctccactaaaagtacaaaaactagccaggcatggtggcgtgcgcctgtagtcccagctcctccacaggctgagacaggagaattgcttgaacctgcgaggcgggggttgcagtgggccgagatcacgccatttcactccagcctgggcgacagagactctgtctcaaaaaaaaaaaaaaaatagtggacataagtaaagctagcctctctctagggaagccttgaccagagaaaagtcaggttcggctgtgtcaatcaggtaagacacaatgacacgacaaaacgaaaatcatgaaacagaagaaacgtgctacttacagatctcagagcaatgagtggtgctgacaggaggctgacaggaagcctgcgggcagcaaaaagctcaagcagtgagtgaggaaacaagagaaagaggtaggacctgtgggccttatttattaagctccatgggtattattctttagggtttcccgtgggggggtgtggattggctagttcagagaaaacacctgtgtgacaagcaggaaaacttaattataggactcaggtgttggccactaggtttactgtggccagcagctgtaatgtgtcaagtttgggatcagtgagatgagaaataagcaagctatatcacgaaccactacaaacacagggagagcaagttttaactaggccataggtgttgggtactatcgcatttcaaataacttacatcagctaaaaatggaggctgaggctgcaactatattaaacaaagttataacactaaacctttggctagagaatagaaggaaaaagggaatatgaagaggaggagcttctgggagaaccagcgtcatactttgattacttaagagttttttttgttgttgctttttgtttttttttgggctcggatctggtcacgaggctgagcaggtagctatctgaagagacggaagatggagtatggctttactttcggcattgaatacagctgtaagaatgttgatgctaaacagttgtgctatcaataaatcctgtgtcttcagactttctaatggcctagttgctcattaagatgtgagtgagaaatatttagcaacagactgttttggctgcaacctgcctgcttcaacataatgttgaaaatacagattctgaataagaggtctaagtaactcccacccacaaaagtgtgtatgcaatttatccagtgcaaccattatagcggacaatggttttagccacaaatcaaaaatcaatgtcatgtgggtgcagtgtggtgaggctggccacttggtatcaatcgtctgagccacagcctcacacagagatgataattaccatcagtcatacctgcagagaaaaggccggcacacttctctttcctcgtcctttagaataattccaaatttataactctgtaattcagccttgaactatttgtaagtaaataataagaattataaagccacatgtttaaaatggagtctggtaggttatctacttagacattgtttttagcagttaactgccatcatgatagtaatttaaaattaaaagaacatgacttttacaataatctgtaattctgatagaacatttctgaaatgagtaggattactgaagtgtgtatatgtgtgtctgcgcataactttaaacttagaaattttagagtaggttaatcagattaaaatataaaggatcactaagcaatttaaaatctttttgacaaatgtaaggagcttcctactgagtagctgcgactatgggcgtgtaccaccacgactggttaatttttgtatttttaatagagatggggttttgccatgttgaccggtcttgagctcctgacctcagccggtctcggcctcccaaagtgctgggattacaggcatgtgttgcttattttgaagataattgtctgtaaatgcatagctgtaaaatagtactgtagttgtatgccattgaaaattaacacaaaagagttttcatttgtcatgaagttatttgcaatgagaaacaggacagccaaagagttttgttgttatgataatgagactttcaagtaagataataaaaatatgtccaatacagattaccatcgtgttcttgacagtattttcatgttcagcctgtatgttccactatatttgatttactagtacttcatcaaaattcatgtctacaagaaacaacataatttcaaagtcctttcgtgcattaggggctatcgtggcttattcattacaaattaccttttaatctaatagtatttaagctgagaaatatttggaaccttttacctttttttctcagaaaaaaaaggaaaactttatagaaaaaggctttctgttgcaaagaagtgtcacatttttaattttttcatggatataactgtgataaagcaaggggttttgtccaaatgtaataaccaaagctcacctgtgttcattgtatcaaactctttttgtgtaattctaactatggaagctgaagacgctcttgtaaaacttgttgtcatgacaacaaaattccataagaaatgatacaagactgtatgtgaaggaagtattcatgacatgatttaactgaaagatgcttcagctacccactacagccccatttttcagcttgtctattgtttgcttacatttttttaacatctaacaaaatttccatctggcataactctttaataaatacgctaagattagcagttattttcagcttccttttaccaactgttatttataataagtagaaaggaaggttactaaaagttgtcaacctttataagttatgaaatattttccttgaccacttatcctttatttgatctgaagaatctccttcaagcatcctctcacagatttctccacaaaggaaagttttgaagctctgggcaaggagaatttgtaagaaagtaaagatttattaatattatttgacaaagatgagaaggtaaaaagtgaaaaggtaaaaataataattttaaataacaaagcatacttgtttttgcgcacacaatcacacacacacaaaaaaactttaaaactagtctcaaaaaagaaagcttttgctacttgacattttttggattttagattctagactctagaatgagaacaaaattctaataaatttcaaaatgtaaaatatgggtgacaccttccagttttgggaaaaattaagaaaaagaaattatgggaaaacagtatggaggttatcaaaagaaccgcaagtgggactaccttcaatccagtgatcccactactgggtatctacccaaaggaaaataaatcatcatatgaaaaagacatatgcacatatagcaacacacctcacaactgcaaaaatatggaaccaacctaaatgcccatcaaccaacaagtgaataaacataatatggtgtatatacaccgtggaatactactcagctagctatttaaaaaagatcaaaataatgtcttttgcaggaatagtaaaccaaatgtcatatgttctcacttataagtaggagctaagctatgaggatgcaaaggcgtaagaatgatataatggactctggggacttagcagggaaggttgagagggaagtgagggataaaagactatatattgggtacagtatacactgctcaagtgacaggtgcactaaaatctcagaaatcaccactaaagaatttatccatgtaaccaaaaaccacctgtagcccaaaaactattgcaataaaaataaaaattaataataaaggaaattatgaaaaactttgtagttttcctattcaatgtttcttattactttcttaatctcttcttatataagagcttaacacttactctgggacttggggttcttcccattgtaatgataaaccacctcacgagtcccttctttgccttgtagcaagagttttcatacaataatttaatatctaactgtacattttgctcttgccaagttaaactcttctttgtttcatgaagatggtcataaccacccagaatctttcttcatctccaacagttttagtcagtgtaataaggcaagaaaaggaagaaaggtcatataaatcagaatgggagagataaaactgtccctatctgcagataacatgattgtttacataggaaatctcaagaatggtttgaaaacactcctagaactaatgagtaaatttggcaaggccagagaatgcaagataaacatacaaaaatcaattatatttctatacaatagcaataaacaggtaaaaaccaaattaaaaacacaatactatttgcaatcactcaaaaaaaaaagagaaaactacttaggtgtaaattcaactaaatgtgtataggatttgtattttgaaaaccacaaaagtctgactaaagatatcaaatatcgctgaataaatgaagggatatactatattcatgacttggaacttaatatagtaaagatgtggattttcccccaaattaatacacaggtttaatacagtttctatcaaaatcccaatgagcttgtaaaatagctataaacaagattattctaaatttttatgggaaagcaaaggaactagaattgctaaataggccgggcacagtggcttatgcctgtaatcctcgcactttgggaggccaaggcgggcggactgcctgagctcaggagttcaggacgagcctgggcaacatggcgaaatcctgtctctactaaaaatacaaaaaaactagctgggcgtggtggtgcacacctgtaatcccaactaccggggaggctgaggcacaagaatcgcttgaacccaggaggcagaggttgcagtgagccaagatcaggccacttcacttcagcctgactgacagaacaaaaccctgtctcagagaaaaaaaaaaaaagaagaagaagaaaagaaaaacaagaataaatgggaagaaattactctaccccatcctgtcttattatacatttatacatctctagtaatggagatcatgtggtattggtagcatgataaatgcataaataaatgggacaggtgaagaaggctagctgatgttttataaaaatgcaaagacaattcaatggaaaaaggatgaactttttcacaaatggttctggaataataattggacatctttgggcaaaaaaagtaaacctcaatctaaatctcataccttttagaaaaactgagtcaacaggggtcgtagatttaagtgtaaaacataaaaagtctaaaacttttaggagttaacctagaagaaaaccttcaggacctggaacttcatgaaaagttcttagacatgattctaaaagcactagatattttttaaaatctgtaaattggacttaatcacaattaaatacctttgctgtatgaaagactgtcaaaagaatgaaaagacaaacaatagattgagagaaactattgcaaaccatacattcaacaaaggattcatatttagaatacgtaactcatcctcaaagctcaacagtaaatatatgcatatattcaattggaaaatgacaaatatatgaagagatatttttctgaaaatgatacactgatggaaaatgagtgcaaaaaaaacacaatcaatatcactagccaatagagaaatgcaaattaaggccaccaagaaatatcattatacatctacagtacagctcaagtaaacaatagcaacaataccaaatgctagcagggaatggggaagctggatctctcatgttgctagcaggactgtaaaatgctccagtcgctatagaaaacagtttgtttcttaaaacactaaatatacacttaccgtaagactcagaaatttgtgctcctgaatatttatccaaaatgaaactaatgttccccccaaaaaagctgtacacaattgtccatagaaggcttatttgtaatagactaaaactagaaacaaccaaaatgcccctcaatggtgaaacaaactatggtatgcccatattgtggaacattatgcaacaataaaaaagaataagctattaatatacacaaccacttgggtggatcttaagggcattatgctgaatgaaaaatgccaatctcataagttcccatactgcatatttttgtttatataaaacttggagatgacaaaattacaggtgtggaaaataaacttgtagttatcagcggttggggatggtgggaaaggactgggatttgggtagactagaaggtattagcataaaggagctctttgtggtgaaggaatagttctgtattttgattacaatggtggttacacaaatcaacccctgtgataaaatgactcagtactataaatgcatattggaccaatatcaaagtcctggttttgattttgtactataactagacaaaatgtaaaatgtaactattgggggaaaatgggtgaaggatacattggacctccctgttttaccttataactgcctgttaattgataattatttcaatcaaaaagggtaacttaaaaaattggtgctagattgttaagaatttacatgtgggtttgagtggaaaagatgttaaaaacgcctttgcagccctatttcagaagggtaatactaaatcttggcaaattttattcactaacagacaataaaagtgggtggggggagttgtcatctgcaatacttgtgaacttttggaatagcacaacactcacaaaagctagaaaataaaatggtacacgtgtatttctgtaggccacatttttcaatctaatttatatccagtaaaataatatagtttctataaaccttaactcataaaccagctaataataggctctgaagaagcataggtaatacggtaccttattacacccatgttcagaaaaattaataggtcagatctggaaaattgtatacatcactggaacatccttcaacattgaactaaggcaaggcacactcttgaccattagtcacatcattgagactcaggagctgtgctttctgtccacctgctctcctgctcccagctcaccttaagatccacccaagttgttgtgtatattaatagcttattcttttttattgttgcataatgttccacaatatcggcataccatagtttgtttcaccattgaggggcattttggttgtttccagttttagtctattacaaaaaaggcttctatggacaattgtgtacagcttttttggggggaacattagtttcattttggataaatattcaggagcacaaattcctgagtcttacggtaagtgtatatttagtgttttaagaaacaaactgttttctagagtgaatggagcattttacagtcctgctagcaacaggagggaatacaaatgcaggtagaccacaacacccatgctcccatctggaagtctgaggatgattctttccacaatcattattttctctgcatccttaccacattccttccacttgtacctagtcctttatattatttgtatacctctcagcatcctaccttgtattctaagctcctctgaaggcacgaactctctcccgtatgcctctgtaacgctcccttttaaggcgtagtagttttatgtagtatgaatctaatgcatgtctgtaaaataacatacatttgaaaaattacaggaaaactaaaatgatatagttgtatattggtaattccacatattctaaaatgttattagcatcataccagaatatacagtagtgatctcttcattttaacctttgaaccaaaaggaacaaatctgaagaaacctgaaaatactgagtagaaggtagtctctctaagagtcagacagtgaggtattaagatattcattcaccattttatgatgttgacatttaacaatgttaagataacattcaacatttgtttagtcaacaatgactgattacattctacacatgtggctctttgttagatcctggagaaacaagggtatccaggaaatgtggccttggccttcacagaatcagcttacgggatcagtagagtgagaatgggatttaattttgtaaattagtgggagcccaatctgcactttacaggcacagaaccagtgtatttagaagcagtatagtctgaggtcctagaattgtgaaacacttttcaatgggcatcttctttcaaagcttcaccgtggcttgaggtgttgcagggaaatgtaagccaaaagacttggtttggagagatattgaatctctccaactgtgaacaattctgctttgcttggaatagttcatgctctttcacatcaagtcattctggaaaaatgaccattagccaacaagtcaaaagaaaaataatagtatactttcctcaacttttccagaatgagtttacaacacaaagcaacaaagacttttaaattccatgttattataattcttaagcttgtgaaacaaactataattttttaaaacagaatattattgtatagccatatcacctgctttacaggatttttcaccagaaaaatcttcttattttagtttaacttaaaaaacaatgcaccaaagaaaagcaaagcctgctggagaaactaatggatagaaccctgactaaataacttttccatgaaataaagggtctgactgagagcttgaaaagtaaaccagcccaagatactgagttgcctgaattgcaaggaatagatcttgcctagatgtgcaactataatttttaaggtgctttacttttaaagatttttatagtttaatctagcatttattacctgcatgaatggatgaatactagacaactataagaacagttcagaataggaatgcaaaattcctcctgaattcttttcaaaatcagcttttgagattaataaaatctcaaatctctcattgggataaataaaatcttttgagattaaaatctttggcaccaaactgctttgcagcacctattaagaaatagtgtaaatgggttccttgaaatagtcagacatattaagcagtgaaggaagctttgtaatttcaagcaatacctcccaaaagtgctaatgcctctgatcccccttcccaataattcactaaaatatctgagaagtgcctagtcttatagctcagaaatcaattaattgtcaacctattgggactgaaaaatagtggcaacgagaggcaaaaagaaggtgagagatgtaaacattgtctcaatacaatatattccaatacacctttcaccaaagaagatgatatagaaagggcacaaataaagatgcttaagatcattaatcatcaggaaaatacacatttaaaccacaggagataccactatagacccactaaaatgtaactaatcagaaaggctgataatactacgtgttagcaaggatgcggagaaactggaaccatcgtatgtgttgttagaaggaatgtgaaatagtacagtcacttgagaaaatagtttggtattttctttaaaacttaaacacacatctaccaaaggtcccagtaattttactcctacatatccgcccatggcaaatgaaaacatatacctacacaggcattatttataaagcaaaaaaaaaaaattagaaataatctaaatgtctatcaattggtaactagacaaagtggggtataactgtgtattgaaatactcagcaataaaaatgaactgctgacacattcaacaacatggatttacttccaaagcatggtttaagagaaagaagtttggcaccaaagcctgtgtattgtatgattctatttaagtgaaaggtctgttaatggcaaatctaaggaaagagaaagcacaagaggactgcctgaggcttgggagggtagcgaggactgacaatgggcatgagggaccagcttggggtaacagaaacattctagaactggatcatggtgatggttgcacacctatatgaatttactaaacccatagtattatagatttatagtgaataaatgtatgctagttaaactataataaagttattaattaagaagcaataaagtttcacaatgaaacttctccaatagatctcactggtgccaatgtacaaataccagacataattcatttgtaaacaaagtgtggctcactgtcaggactaagggaagcaagattcctagagtctagaaatatcacctaattctcaaagaaataagagtggtggctatcaagttaagatgattacttgcctcataagcttatttcatttacatgaatgaggtgtatgtgtgtgtaattatgtagaagccatcacattcagtcagatctgcaataatagtggtaatggaaacataaacctaagcaggattctcaatgagtttttgcactgacgtgcacaggcaagcccatatctctgcctctaagcacatactctctttccaaaggttgtgtaatgagtgagtcagagctgtgtacacataagaaaggaaagagggcaaggcagggcaggaattcagctcaatgaagccgcggagcctccatttaaaaatgatactaatgagcccacagaagacatttttaccaacatttgttagatcccctacaatttaagctataataaactggatagtatcaaaactaggctcatttataacttgacagacagttaaaagagttatttgattgttgagcagattcttcttccaaaataaaaactaatccattttttaaattacaaatttcacatgaaagaagctagtatctgtgtatgaatacttaaatatcaaatgaaaaagacacaaatgttctgtaaagtctattctgaactgaaagttatagcattggactgggaatttttgctttgtcatggcagaatatggttctgctctattcagacaggcacaaagggactgtgggatgtagagattatatacagactgaaaggatgagcatggatctgccgtgccctaacccccagcctctactgtggtgctttgcactatttctaggaatgttctcatgagttactttctgaataagccaacttctgactgtggctgaattgtgggtcaaatcattcacataatggtttgtgtaatttgaaaagagcaagcagcatgccgtgtggtctaaatcagggaatctcaacctcagcactttgggcatttgggatgggataataccttcattatgagagttattctattcattgtaggatgtttagcagcatcacttgtccctatcaactagatgccagaagcactgtcgccctaattagacaacccaaaacactcccacaaattgccaactatcccctaagagcaacactggccccagttgagaactactgatctacacgatcatttcaaactctttggagtagtgaaaagattgtatagaaactttgaaaaagtatcatttccttcactgttgaactgtccagataactgtaaagctattgataccttgaaaatgcaaagtatcttgaaaagtgaagacatttgcaaaaagcaaagtgtcattatttcacttttattgcatcaacgaactccaccattaagaacggtgaaagaggaaaacacatttgatctaagcattcaaactggatttaaaaagagattcatttttactacctggctgatgcaggtccaagctaaaccaatcacctttattatgaaatcacagcaaaagacaaaatccaaaatttatacacagagtatcaccacgtttgactacaaagccttatgatatacagagaccctcacttaattaaaccatcaaagtgagaacagccataatgtgctaatttttgttgagcagtattagttgatggacactaaaattctcctgaataaagtgaattatcattctgttctagtggcctcctgttcaccccgtcggtgagggaggagtcccccaccctaaataatacaagatggccaaacaccaaaccctgggcagatgaaatagcaatttgttggtcacatatactcacagcccagaggagaagaacatcccataccatgtagggccacactggggttggactcagaacaatcagaggccatggtgaggcacactttgtagtaacaagggggtgagataacccctggttcccacaggaggatgtgattggattgtttgaagaaatttgttggatggcaagaaaatgaaagcctgttaggttgcagactggtggagtgcagctggtctgactaatagggaaactagccaggtggaagcctttttcactgggggtcaaggggacacatctagcaagaacaagggaacttatggttaggtctttggggcccggtgacgcacaaacatatcaaggcatcacatggtgttctaggccacataatacacattgtcagggagttggaagtgttttatgatgtctcactcattttgaatgcaaagagaataccaagtgatagatatatcctcctgcatgacttagctgtactgaagcttttcaaaacaggagtgagtcttaaagaaatagacttgaactactctaagcattctttcaagacttttaatagtagtagctatactgggtatagtgcacacttctaaacactgtagggagctattaaacaagaagggacacagcccttttccttttttttttttttttttgagacagagtttcgttcttgttcccaggctggagtgcaatggcgcaatctcggctcactgcaacctccgcctcccgggttcaggggattctcctgcctcagcctcctgagtagctgggattacaggcacccaccacaacgcctggctaatttttgtatttttagtagagatggggtttcgccatgttggccaggctggtctcgaactcccgacctcaggtgatccgcccacctcagcctcccaaagtgctgggattacaggcgtgagccaccgctcctggccacagcccttttccttaagtagctcatgtatacatgaccatagtgtcctgcacagatatcaatgctcctgtgggacttttccacataggtcatcatgcaaaggagaaactaagtggatgccatgaattgtaatactccatatctgtaaatagaacatacacgaaggggaaccctagcatttttcctatgttaggaacttcagcacaaggctaaaccctggaattctgtaatcagattacaaatcctccaaaaaataattttaacatttatttctataggtcctgatgtaaaaaccaagggcctaatgcaggtctgagagtcactttgaggcaaataagagctgaaagtcagagacctgagtttgaaaacattttctgatactttctagctatgtgaggttacaaggggttatcacccagagcctatgggcttatttctctaacgaggttgttagaagcattatatgtgagggtgtctgagactgaaaaatagtagatatttctacttatccaaacatccgtatacaacacgcaaaattataagaatcttggttttatatcaaagtcaattcaataaaacaacaagaaaaacacacaagatgcagccctgtaaaaggtacagacatcttgccagagaatagaagggagggaagttgaatgaaggtattggtgttaaacatggttccggtgtcatgttaggtaaaaacattttaatttgtccactccagcattatgtatgccctcactgtatctaaatgggtcagagtcctaaattagcgaaacatctagtggcccctctacatctttagcatgaacttttggaattgatcttatagcgctgaatcttaaatcaggaagaactctgaaacagcatcaaatacctactatgtgtaacagagatcttacatgatattgacaactaagtgtgaaagtgaaaatgacgaatagtactgctattttagagaatttcagattagtaaaactgggactatattttcatatagcctatatgttaataggttcttcacatacttcctgaagtgtggaagtagaggagaggctattatagtgtttgtgtttgcccttatagttgacaggaaggtaaaaggactccagctgttgtggatcaacaaactttgaacttgtccaattttctctatgtataattgagaaaatcttggaacttcactaggagctgtgtgtgaatatatgttattaatatttatggctctttctcaataagttctggaatccacccttgactactgggaaaatcacaggcaaatagagagaacctcaagctttgtatagcccattatatttttcaaagcattttcactgctattatctcatttaatctggtcccaacctattataggctatacaaggaacaacgctagcagaggaaaggaagagaagagaggctcctggtaactgcactagcacagaaatttcttatttgctgctgatgtcctgaaaggcaaaacccctccctgccctccttccactcagcctcttcctttcagggcattcaatggcaattgttggaaatcttgctttcatccttccttttctcctcgggcaggcagggggccacagagccatcagcttaaggttgcctgcagagtgttccttctcctctccctgcttatagcagaatggaaaactacagggaaggaaaaacagtgtgtgaatgcagcagtgaaagcgccagacctctgaaaatctgcaacctgctctccttacctgagttgtaaaaatttaggggaagggtgttaagaatggagaatatggaaatttaaagaaagcgtgagagggctgaaattctcccgtctctaaaagcaggtattattcttcctgacactcctgccagtgagtggattccatagttcaaaggtcattaacatgaagaatttcaacagaatcttgctgtttgtctttgaacaggatattcacagttgtggaagaaaactctaagatccactatgcagctgaatttggtcagtgtggagtgcctagagcagtattatacattggaggaacgtttgttgataggtcgaaggactacaggtgacaagttgctagcacttgtccatcagccactggtggtattgaacgctgttatttataaactgtgaacacagatacatattttttcttttcatgggaatagtcctagagaattttaagaaccaaggaagatgtcatccccaaacacacacacctacacccacacccacgcccacacacgcacacttcaagacttaagctaagcttgggtgccagaggacagtagaatcagatgagatggaaagctgtgtttgatgcacccatatgcacccacaggaagcaggaacccagaagttccagtttctgctccacacgagtgatctggggtggtcagcatccagccagtctttattcagtcttcttgaactctgacccaactgtgtgtccttagccagatacaacaaataacctgtctagttctgattctaaaaccaggtggacagagaatatcatgagtgtagaatgtgaaattacaatcttcaatatcaaagggagagagtacaccttttatgagatgtcagttgttttttaagaaaactggaataaaggacacacacctttatgtaaatgacagagttgaacacataactatcctttctgcaatattcagagaggagactagcaacactttcagtagcattagctaaagagtgtgtgtgtttgtgtgtgtgtgtgtgtgtgttttgcactgtgaaaaaccagatggcatgtgatatagcgtaagaaacattggacttggagtcaagacaactgaattttaatcccaactcctcccaactcccaactttaatttccaaagttgtcactatacatacaactttggagaattgcctaccctttccaattcttggtttcttcatttctcaaagtaggcatggtgctaattcatccccaatgccccttctggctatataaggtcagccctgcatcgctcgccttgggcacatctttatttaatcaaattaagagcatgttacactgattttcctagattaaacagaatgtacccaacttgatataggaaaacttagtgttttcaacaatcttacaggaagcaaaagcctcctaactgggtgggaatagaaggagctaaccacaagtttgaaggttggaaggttaaagcatgttctatttttcatcacattccctgaagaaaacatcctatgggacaaaaacttctcattctgcttgtaatggtatttggcacttgagtatttcctcacacatctacaatatgtattatcatgttttgaatttttttttttttttgagatggagttttctctttgttgcccaggctagagtgcaatgacatgatcttggctcactgcaccttctaactcctgggttcaagcgattctcctgcctcagcctccctagtagctgggattacaggcacccaccaccacccccaactaatttttgtatttttagtagagggagggtttcaccatgttggccaggctggtctcaaactcctgaccttgggtgatccacccgccttggccttccaaagtgttgggattacgggcgtgagccacctcacccagccaaaaattggtatctttcttaattattaccatggaacttagaaggaaaggttgcaatttattgttgactgtgtgtgcatgtgcatgtgtgagtaaggaaagaagaaaaaaaagaggaggaaaatcaacaaaaaatggagaaagcattaattactgttcatttgtgtagaaagtttcacttcattttgacaattcattttgttatctgtgatcatcatgtccttgattcctatataattgaaagctaactctagaatgctctaacttatattctaatacagccatagcaaagacgaagctttatttggtggttctgtaatcaacatgtaattttacgtagccataggtatgaataatttttcagtgatgtgccaaaaaagtgttcctcaaacttgttttttagttagaagaaaaatctgcagttctcgtgtggcagacatcctatgttacatattcagctcttgtttttcaataggaatttggcaaagccatttataatttttttcaaaacatgagaaaaagtatacttttattccatgtacattctgccctttaagcctctaaatttcactgcttggaataaattaataatgttatgatattaatagaattttagaaatattgatagagaaatattttttaatcccattttaaaataaggatttctccaaattcctattcagatatgctcattatctctatctttcaaggtacagagaaatattctaattcaaccaaatttactcctggagcttaaacttttaatttctgatataatactactttatcatttataccataatgatacaatttatcagaggaaaaatattatgaaagtttaagaaaacattggaattctaatatatcaaaagactgtttcctctaaacctattgcgttgtgttttaatattggggagcttttcacttatttaactaaattcaaaatagcaatttccaacaaagacccaattcaaattaattccataaaatgcacattttattctgtatcatgaaaaaatatccacatttaaataaagtgtgaaaaaaagcaaagttagtcctccctgatgaaatacagtttattgtgctgaaacccagatttcttttgggctaaaagcttccacctgccaattcacttttcaaaatgaccattttttgagaacaaacgttaaataaagtgataatcaccacaaacttcccagaagcaactgaattttgatcacaattgtttcataattgaccctaaagtcacaaagttaaaatattttcacacatcctgtcagcagtcaggtgataggtcaacagtacatacaaaatttctatattatacattgcagtatctttgtttaagtagaaaaaaggatctgcttagcatgaatcagattttgaaaaaagccaacaagtactgcttagcataatggtattaaaaacatcccacatgaaatttttgcattgtttcctttgtcaatgcatgaatcaattatttctggtgaattaacccttaaaggcagaggcatttttaatacccccaatatctcaccaatatggttgcagtgacaaaaacatttaagaagttgcaaaattaattcccatagtaacattagtgttatagtagaatttacattgtagtatacaaaatgccacaactagtgtaaacaaagtcactagaacatagactaaaaagaactctataattttcaatatatcgtgaatctgcacattttgtgttgtttgagtaccaagcacttctaaaagtcattgctctttcaacaaactacaatggatgttttagggtaaaaaaatggttctaaactggtttccacttttcataacaatcacttaagaaatctgttcctaatatgaaatgcatattcccccttgctttattaactgtgaacaggttctaaggtggaaggcgactgcttgatggaagatgctggtgcagtcaaccctaaggagatgaaagtgaacactacacttattccctctctgataaagggtcataagaatagcaatgtgaaaacatccctgcagaggtcaaaaaagcaattctgacaactgttttttcctgaaaatgaaataggctaatcttgattttaaatgaaagtgcgtttggattttgtgtaagttgacagttcatggctgtgacataatataccaatattaaatacttaggactatcaaacactgtaacatggaattataaatgaatctttgttgtgattttgcatagtttactagctaggtattcttcctgtttgcagtcttggcttcatcaggaatctttcccgctataatttggttgaaaaagttgaggagcaaatgaggggtccatggcaacaatggttctaggaacaacaataatctttatgttgctttttgccaaagtccaatttctctaactcaatggagagtctgaccaaaagctttggatagagggaagtggttacattttatattatgaaatatgatttagcagagaatggggataaaattacttaaattagttattatggatactcaatctggtttattgaagcttcaaggtgaatattttggctttgactgctttggtcattcaacagtcagtgattccgcatgaatgagagagagtgatcagatctttttgtttcctcccatcaaaatgcagcccaaccagccaagtgcttaggggattgggtttgtaggtcagaaccagaggttctaaactcattggttggtgggagaacacttatttctaaagaaggccccagcatttgacaagctttcaaactgcttccaaaggtttttgttaaaaccttaatgacaatgtgtcatcttaaaaacaaataaacaaaagctatttaaaaggcaccacatacagaaaactcattaaaaggaagcaactgctgtcccttctccacactcctttttcctcagttataactctggtcataagctgcactttttggtttactcttctttgaccaagtgcctttacaagtagtacaagacatgacctcatttaaataatcatgcagtggtaatgtaaaagccaggatggaagtgagctgactataaaaagctttggatggtgtcagtggggtccttcacagtcattattttaaaagtaggattcttcctttctatgattacctctggctcagttattagccaagtgaaaacaagatggtttgggctgaagattccagcatgtagtgttgtaatatcttgtttttttctccttatctcaagacacttgctttagaaatctcaaagggtagaacaaataaatcacattcagaaaattaacattttttcattagagaaaattattgaaactctctgaagtaaatatacatactatgagctcattaattttggaaataaggatacaagttgccattctaaacagaaatagttcatttggataatgtatttaatagtggtttggccaagaagccaacatcagtgcaatcaataaaaatatctgaataatctacttaaaacccaatgagtcaaaaaataaattttaaaaataaattctggagtctcatccaaatcccactattaaaaagaaaaagaaattatagaaaaaaaatcctgaatgactcttgctttccttaaccattaggcattacctctttaggttaaaattcaactggaaaagaaaatgttgataccagtgaccatatatcaaacataccacatttgacagtttactttggccgatgtctttcaactgttaggagaagtaaaggaaaattccactgttgggacagggcaccttttgcttaagacagtatgatttcaaactctgtcattgactctgacctatcaagaaaaaccaaacatttacattcacattatcgagtgcaatttttaagaattattttaagaaatctttaaaagtatgtgtctggaaaaacctagactagatggttgaactagatagttcttgtaatgtcagtattctacaaaataaaggtttctccctaaggtctgactgcctgtgttagaaactcaactttaccatgtaacaagtatgccatcctggacaagttccttaacctataccttcatggggttgctgcaagaattaaatttgataacctaaataaaatgcttatcatagtgagaccttggtaaatataagcttagttaacttatttaacttctaagcctaagagtaaagaagcagatagattctaatcagtcttttctcaacccttgccttcatcatctttctagttcccagtccaaatcctcagtggtcctgaccctcataaagaatgcaaacacaggggtcttatcctacaaatgaagtgatagaaaatctcaagtcagaatataggccaaaacttacaacacatagcacatagttaagaattttgttataagagtgtctgcccatgtggaatcatatatcttgaacaggtcatgattattttaatataaaaagttgaaggatgaactactctagtttttatttgtataaatttaaggggtacacattcagttttgttacatagatacattggtgaactactctataccttggccacttaccaattttttcacaaaattgagaatttctgccaagcagtatgattaagtagaaataagaaaaatcacaaaatttacctatctttctcttctctctctcttctgtcaaaggagcttcattctttccacgtttatttgatttgtagttctaaattcccacataagtatgaagttttatgcttacctgccactagcaaactatgcctctctccattaacctctgaccagataaatctcttctaaaacctaaaagaatatttagataaaaatcacatcaccgtcaatccctgaaatctcttctaaaatctagaagaatattttgatagagagtacatcgtggatactcttctatgaaagaatgaaaaagtgatcacttgtcataatgtgattttcacctgcaagaaagataattttttcattgaccaatagcatgttgatataaggaagcaacagctgttatctttgttttcttatttattggcggggaaatggtaccatttggtacactaggaaaggttaacttgcccataattacacttctagtttgtggtaaagctaaattcagaacacaagacaaagctcagatactaagacttaaggtgttttccaaaagactgtttttgtcttttccccctttccattaagatgagaagagaaatacttttacacctaatagaaaaaattatagcacaacattcacatgattataaaatattcatatttgaaagttatccatgtatgatatgcacattctagataaatgttctcattacctacatggaattttggaaaacaaactcatagaaaattgcttaaaagataaaaattatacaagatagtggaattcattagaaatatgatgaataatttcacaaatatctgccactgcacacttcaaaacagtcactgctctgaaggctaatattaaaaaaaattccaaatgactttagctatttaaaataagatatcaaatggaccagatatcacagggtgaacaaaatctccttaaacagaagggaaaatgtgattttcatttgggctccaataaggttaattttgataatggtactttagttagcggtcacaactaattttcctattaaagtgttgagtacaacagaagtacacattttttctagagcaatttcaaaccccagattttccatttttttctctgatatacataaagttgtttgtaaaaaatacttaggacatttttagtcctatacttaatgcaagatgcaactagtgtcataaaaattttccattttaacaatgaagcatgggcctgtattcaaccacgtcattcaattcaaccactgtgcctgaaccattttcagtaccattcatatagctttggtattgtcatctggcttttgtgtgcctatttgctttttatcataatctcttccatctgctagatcacatttagtgcaacaatatcctgatacagactgataaaacctgccattatgatacatcactcacatttccattctaatttgacttttgctattttgttacaaccacctgtcgaggatacagcatctgatcttacctattaataacatcatagaaaaatattgaaggtgtgtaaattgctttggaaaatgtttggatttctaatacatatccatttactcctattaatatattatttagaaatataatattaaaatttttattctggatgcaccaagagcatctatacagtgtaggaataaaacatgcagttatctggtcctcaaaagagcatctactgtctatgtgctagttgaggcaacatagaacatgattttatcattattgcatgtattaaagcaaatattctcccttcattcaaatctgagtaaattcaactgctaagatttgtggaatctgggaacctaaaagactactctatatacaatgtttgctgaaaacatgcattcctgctgaaaacagcagggtgcattcagcacctcttcatatcatgcacacagagaacagagatggctgaaaagacactatgataactgcaccataattaaacaattgatactttccctccttcctaacaatctggagtaattcaaaaccattatgtttctcacatatatgaacaataacattgtaggtcgattaggtgaaactctacgtcaatgtcagaacacagtaaatatttgcaccactaatatgcaaagccatgaattagaacttcaaatcatcatgttgttcacagtcattcttttatagctttacaccaatagttagttttgaagcactggctaaagttaaactaacaacttctataatcagattcttattttaaccacacattcacctttaaaagcttaagccaaacttgacttaaacaaatagaaaaataccctgaaattcaataaatgtcagaggtcacgaaaaagatatcatcctcaccatgaaagcaacaaaattccaatttcaaggctgattctttactccataattatttcattttcttgtgtttgtggtaggtagatattgtagcattacatggagacgtgttcccctgaaaacttccattatggttaatggaagttatacgcataaagaaaggaaaatggagcccatggctcatatgttttgagactcctagattaaagaggcacatcttgtgggcatgtgaagttcaatagaaattctaaaatagcaactgtttttataaatcactgttttgcacttctcaagtctgaatgtgataacatgtctttcagttctagtggctttggttgggaatactgggagatagaaaagctcatacaaatgggtataatagatcaagatatctccttcgattttgccatcatcttttgcatattgttaacatatatgtacagatggtcccgtaatatataaattactcacacatttttttcaacttcatgcaaacactaactcccctgctccccatattaaatgctgtgcatgcactgactgaaaagtatgcttccctgaacgacttcctaaaatacagtttagtcaaaagaaataagttctcctgggttcttacaagtgaatgtgtattttattctcaatccttatcatttaagggactagctatatacaggacaactctttgtgactttttttaaaaacttgataataggcactttctacaaagaggatttgaattcaaaagactaaaattcagtctttagtatccccctttcacaaatggacctgcctgagccacaatagcttattgaatcaactcagcagaagtccagcagtagaagtgtgtgcaaaaagctttaaaaaactataaccacaataaaatgatagaaaagcagttatctgagtcgagcaacttaatgtctacttcttggttggttggtttgtttgttttaccacatttcatgtgttatcactacaaacactaggattcatgtgtcaacaatccgtaccagtgtttcattctttctaagttatatacatgccacaaaaatttatctatctgtttacattcttttttattttataccataatagttagcattttgatatgattacttaaatgcttttttttttgtatgtttctttgctaacaagcctttcaatgtcactcttgaacatgttttggaaatacaaatttagagcatttatcagctttggaaattcagcatctcttacatgaattgtcaaaaggcccttataccctgtggtgcagtgtttctataataacatactctatattaatagtttagtatttatgatgttgataatgtcagcttacaagatggcagctgttctccaagaaggagggagtagggatttccttacataagagctaatgattactatctaagtataatgttaaaaaacgagaggtatagttgatcaaaaatgtaattcatgcacaaaacccatagcaataagttttcaatatcccacactcttatctgacttaggcaactaaacagtcatttaaatggagcaaacactgcctgtaggggaaaagaacctaacactaagttacagaaaaatatcctatggaaagagatcataacatggtactaatagtttaaaagactgaactcttccttggcattaatctatacttttaacttaacagaacagtgagaaaatgatagctcgatatacatactcagcctgagatcaaatttgtcatggcaacattggcaggttggaccctgattcttcaaatattacattgccttgggtaacaaaaatcatactcttttattatagaatagagattataaataaatgtaaagtgtgcatgcagtcaactgcataatatacaagcaatatctatgtttttaatcatcatcttctttggcaggccagaatccagctggacatgcaatatttacatatcaaaatccatgtgtggtcatcatcttgaaagcaagtgaaaatatatatatgtatatactgtatatacacacatatgtatatactgttttaatatattaacaaatatatatgtatatatattaaaagtggatttcatctttgtcagattcaggtgattcaggccttgagacactaaaaatatcctgacatggtatctgggggggtacttggagtggcatttgggatttgggagatgaggcctggggtacgcttttttccgacagtatttttaaaatttctgccacctgcttttctagggcagtcattctgcagctgagcagctggatgtcctctttgagttcgtgtttgacttcctgcagtgtggtctgtaaggcctgctcggggatgggataaaaggggtgcttggcatcagcctggatgggactgtgctctagcggacttcgggcctccccagccttatccaaacgaaggtcactttttgtaattccactgtcacaagaatctgttttycttagtgggtttttggtcacactgttctctgaatcactgctcttggggtcctcagacaatagccccattgactcagctttagtgacattattccagtcttcctttttctcctcatgggctcccatattattcttgagtcgcagccacccttttccatttccattcttcattcttattgggctgttgactttgagacatttttggtcagcaccgccgttgggcttgagttccatggcatcacggttgttctgcttaagggattcactggttttcacataggccagagacgtctgaatgggagtaatctgtgacacagtcaccacgctggttccggtgatggrggytccattctgtaaggagcggctctctacctggagttggttcctctcagggtcaccctgtgttgagccctgattccgcagctccttctgctgcttgaacttctggaagagctttctgactgggtggtccacgggaatgctgagggtyacctcattcttctgccggaggcgctcctcctcctctttcttcacatcactgatcttacgaaagatgatctgtggaacgggagagatagtcacagcctgattataaaagcagatggattaacagttgtataatactatgctgtatgtgctttgtgttacaaagaaaacccttgaatatttgataagattatttctcaagaaaaaaaaatttaaataccatttatggaattgcatttatgaaatttatggatgcaatatggcttaaacccaacatagaaatgttggctacttacttacttagttctagtcccctacatatcagagggagaattactcaagagacaactgaatagagaggtactttgcttctagtttatgttccccttatattgccgttagtaggaaatacacacatacatacacacatacatatttgtatatgtatatatgtgtatacatatataaggaaatacatatttatcccttaaatttctctgtaatgaattgccacttttgtatgattttccttattgtgtagaaataagtttcaaaaccatttttaatattatcctctgttggccgggcgcggcggctcacgcctgtaatcccagcactttgggaggccgaggcgggcggaccacgaggtcaggagatcgagaccacggtgaaaccccgtctctactaaaaatacaaaaaattagccgggcgcagtggcgggcgcctgtagtcccagctactcgggaggctgaggcaggagaatggcgtgaacccggaaggcggagcttgcagtgagcggagatcgcgccacagcactcccgcctgggcgacagaacgagactccttctcaaaaaaaaaaaaaaaaaaaaaaaaaaattatcctctgtttgggtatcagatagtaagaattccaggctataaatgtactgaaaacttacacagtttagcaaatggcatctgggttgggtgaggggagaatttaaattgatttatgcgaccctagaaggcagaactagaatttgtgaggaaaagtttccgggaggtaacaccagcttagtacacagacttcattgcaaactgctctctattgaataaactgcctcgaaaactcatgatcgttctaccactaaaaggttaagatagaagtatgttttccatatgacatgttcactgggttggaggttgaactctttaatttcccagattctttacattttaaacataaaattaaatacatagtacaggtgaggggttagatatccacaaataaatgagcatcattttatttaaaatgtattttgaagataataatgggaagaacttatgataaccccatcagaagaaataaaaaatgttggctatataagaaattgccacatatattatcagagttggaagtaaagttaataagtgtgagatttttgctcagagtcctgaaaagcaaagtaactgcaggtgaaggctgtaaggaaaatcaaaaaagagttatattagataaggcactttcagaatcagacaattttatcactcaaggaaaataacttaccttgatcaccctctgtaggttgttggttagagtagaaacacatgtgaagcacgtgttctctaacccataacagacactcaacatatgttggttctctctccttgaactctcataaaatactcctatctgaaaccatttactatcttttgaatattcagcagctgcctggagtaacatataatcattgattttacaccaaaaaccaatactactgatggtcaccgttaacagaaaagccagaaagataggaattccccttccaggtaagagtacattttctaaaatgagattgatgcactaaattcagtttatcgagtggtactaatttgtattttgaaataaattcagtaactgtctgtaaaggccaacatattttttcttgttagtggcacatgaaattgggtctttttaaaatatgtaataataatctcaaattctgacatcaaagctccagcagtttaattagaagtctttcaaagggttgacacaattcttaygcttcccaagtaaacataggttgtactaagtcttcaagatatgaacattctttagaaccagacagacccagacacaggaacgcagatactattttcctatttcagcccctttttgaaaaagtactcactttgattctatgggtggacatgagaggcctaatatgaatgattttccacatcccccttcccactcaccacttaccctttttatttttttaaggtggttgtttagcctaggatagacatagtgttggctcgatgtggtaactgagagcagccttcacatttgggaaaatggaaccgtttcaaagtcagtggagtgtgacaagtggtaggmacacaggaaggtcaggtaaaatgcaggtcccctgtgcaatatttgggacatactaaaaacatcagacattataaatctgaattggacatatgtatyctttaacaaatattctttgtttattcraattttaattttacctgggagtcctgtatttttgtttgctaaatttggcaaccctattggtatataatagacaaggamattcctattttgtaatgtctacatgtcctgccatgcagagactataatgaaagatttggtattactgacatctgagaatttgtgggcaccttaggcaagagccttatttgtttagatctttgaatataatggctaataattgcttgcaattattgtgtgcttaccaagttcagggtgttttgtgttgtaagactgtaacatgtccatgtaaaatatcaataaaataaatctttcccagcttccttgaccaccagctgccccccacccacccccaaccaagaacaaacaaaagtgtttgaattgctactatttagctagaaacaaagactccaaataccaaaatacatagagcaaagggggtcttggcacagggcttgatttctcacctatactaggggacaaatgagacagagctggatctgtattttgctgtcgagaaatgtaaaagtaactgggaaagagaaagaatcgagctctgstacattagatgacagaattctgagtattgcacattgttcctttccccctttttacgcccgggagataggaagttaagtaattttaaacatagctcccttgaggtttgagggtacttatgaccaacaagactggtcctgaattgtcatcaagtttgcagaacagcaggacctacacatccaatctcaggagccagcaatgcacagcggaaaaacatgctctttagagagccaaagttcccctctttgctccttgcccttcacttcctttatagctcagaggggtactggctaggatcccctagagctcaggaagccactgaacgtactcatttgtgaattcagtctgctagaagccaggcaaggcaaaagcactgtgtgaggtgggaaaggttattgcaccctgtaggtgatctgccaccagggactttcaggccatcaattatgccacacataaagagagccagcagttggacatgactagctcaaaagccaacactctgaggagtggctacaggccctccagatctcagacacaagccctaggtcctgaagtagatccccctttctccttagcagcagggcctgctgacaatctgcagcccagtgagaggagaagcaggtgcaggaggaaggttagaaagagggggtcatgaggcgatttatcacccaatctatacaattggaactgacacctaaccgcaaacagtaacacttggatttggtcaactacttattatatccaggtttttaagaggtagttttttttaaaaaaaatactagtttgaattgactttataggattagaataagacaaattgacatttgttttattatacttttgactatggaacaaaataatggcattgtaaaatgataataaaatatctgtatatagcaaagtggtcacttccacacacgtattttctcatttaagtgtcatggaatgagaacattttacgagctaggacctattattctctactgtaggacacaggtcatattattcttttatcacagagaagcaaattgaggcataaagagtttaagtggtttcccttaggtcacacaactgtgtgtccaggatgcaaatccaaggggtcagattccaaacagtcttaaccattccactctcctgctcctcaaggtaacttttatactttctcctggactcygtgaaaactcggatagatgaatgggtgaagtaggaagtcgtgcagcagtttcacacccagcaggtcacccttcacagagcgtttgccatggagaaccatccctgaaagcagtgaattgaacacaattgaagctgtatacttgctgggaaagcggtagcctagaccttgaaagagctttgtgcgaggcagtctctagactctccttactctccaaagcagagccagtaggcttaaacacatgctaccattttgcagcttcyggtccccttcaaggacaccttgtgtttttgttttgttttgtttttaactttcttctacatatattaaatacactacctttatggaaggcagggagcagggagggtcaaagaatgtgactttccctggactctgacatcaaccttgattccacttacacctaaatcatttgtttacgaraatagggatttctgtctgctttgctaactgctatatctctagtgtctgtaacatttgtaacatttgtaataaacaaatgttatgcattagttcaataaccttttcatacattcagcaaatgtatgacgtggtgcgtctaggaatggaaaatgttacaaataagcagggcactttatagttccttcactatgttccactgtctaaacaaagaatcagtgctatctgtrtattattattattattgatcattaatgtctactcctcatttggaagcaggagctatatcatttgccttctggcattcctagaacctacccaactactgagcaaatgcatactgggtagactcaggttcaaatctttgacccacaaatcagtcattgaaaggtcttgaatcagaacctgctttgatttcattgcaaggatgcaataatatccactagaagctcattttctagcttatgagaaaacaaaattttctttcctactgcaaggtaagagagtataggcactgattttgaaatggaaagcttcattaaaaacaaatgaaaatgaaaaggtgatttaatcatgcttatggactttaaacactaattcacaaggtgctaccaccagctgatccatatcttgtacgcaaagtatgatagttctttgttttattttaagtttaaaagaatgtacaaatataacaaataaaaagataaaacatcagggatgcctaatataagtaactcactgtatttcaaaaacactaaatgtaattaggccctctctacaagtccttacagttttagagacagctttatgacctaagctccaattttgagtgacactgaatatttattaccaagaaagctatatttccatggtaattattatacattaccattatgagtattctcaaattaattctactgaatgtttccttttaagaagggccttttggctgggcatggtggttcatgcctgtaatcccagccctttgggaggccaaagtgggaggatcacttgagcccagaagtttgagaccaccctgggtaacacagggagaccctatctctacaataaaattwaaaaaaaaaaatagatatgcatggtggtgcatgcccgtggtcctagctacttgggaggctgaggcaggaggatcacctgagctcaggaatctgaggttccagtaagctaagatcatgccattgcatgtcagcctgggtctcaaaaataataataaataaaaattttaaaaagaagggctttttacctttagctttatttttaacatgcatatagtaaaatggttcaacttaacatagtggaaacattgatgaatttkatttagttaaactctttaaaatggtgtgtttttatttacattttaaaaattgcacccaacactttggccattgaaagaatctataaacagtaagatttttcataatccaattgaatctttcatgggcaactggcaaattgtaactcaaaaagtaaaatgtctcctgctaattcaatatgtaatttatatagcttaattttacccaattattatatagatgatcatttttctctagaaaacaagcatttttttaaaccatgaagaaattattatagaaagtgttaaaggatttgagttcataagagttcaacttgtatgaattaaatggtgtgaaaaatatatatccttacttatcaatgtagtattaaaagaaatcagcttttaaaaacctartatttggttttattctcagtattaaaaacctagaccctttttacttcatgtacattgtgtccatcttttgtccaatgrcaaatcagattgctgctgaacactataaaaattaaggacaaaatttaaaaaccagaaatcaggctayggttccagctacacatttattggtagaatgcacaataacctgtactgtttctatcagcaaagaggtttatttcatttaagctttttttcctctgtgcttcattatgttctgcagaatccatgctggaaggtttaatttatttaagtgataaaagcttcttaaacttaacagggaacatggccaactgagctttccatttcaaaagtaggacatttgmtcataaaagtgatatcaaaattgaataatttgaatgtgtactgaactttgaaatccaataaaggcaagaaaaaaaaggttagaatcatttrtttaatgtcatggattcagtgttacataatttgaggaaaagagagaggtgttttctctcaaatggctcatcactttctagatctgtgaatcgactaggaatttatagctatatgtgatcaagcagtgagtagctctggttcatctgactctcctgggatttagttggtttgattctttggttcttcttactgcttccatcatcttagtcacgaattctaactctagccctccaatccatgacaacgtgaactaatacaacaaagcattatttattcaatgctaccatgtatatatcagaggctgtamactctcagtgaaggccacagtgatggggctgtcgcaaatgaccattctacaaatttagatgtgcttagggtaacaatgatgcatgatactctgttttgagatgtggcagccttgtttacttcagccactcatcaatctgtaagctctccgagggcacaaaatgtgttatagatctagtccagtctcttaggtcctaaaatttttgaagaattaattaattaagtaaatgtaaagaaaaaggaaggaaggaaaatgggtagagaggaaaaagagaggaaggcagaaagggaggaagggagggagggactgagggagggaggaaaggagggatagggaaggaatatcttttggttttgctaatgtggcaggtgatgcctaatgtaagaaggattagtatgatgcaaatgcaaaagattctaggattactaatacagttactgaaataactaatgaaatgttctaagcgtcattttctttaccrtgtaaaagatcatttatctcaattcttcaggctatcataaacatgaaaatatgtttttcacaatgaacaaaacattgtaaactttatcaatgctagcctaactttgaaatatggtgctcaatacctatgtttttatttgtacaaatttttcatttaaaaaaatatagaaggaaagcaaagtcttcaagagcaagaatacagctattccaaggttaatctgacaaggttttgattcactgtatcaaacattgcagtagcccatgaattgctctccttgcctcaatttttagtctcgtttttcttcattctactctttgatgttgaatataaaatataatagtatactagtctaaaaattacagaataaaatccaaactccttagtaagaagtcagcaatccagcagtggtccagccctacctacttctctaacctctgcttccttcactcctcacttggcctccacacacctgccacactgagtcactttgagttcgagcatgtattcatgatatttgcatatactgttccccttcttcctcctcacccactggagaactcctacttgtcctgtgatactcagctcaactgtgtccttctttataaggtagttctagctacataattttcagagcccgatgcaagattaaaaagtcagggcctctaacatcatactttatagtaaaatactagaagctttccccctaatatcagcaaagagaggcgcaggtatgatcccatcacttctacttaacattgtattggggggttctagccaaggaaattgtcaagaaaataaaataaaagatatccagaatagaaaggaagaattaaaactcctctatttagagatgacatgatcatgcatatagaaaatcttaagaaatacatgaaaaacctgctagaatggataaaggagttcagcaaggatgcagtatacacattcaatataaaaatctgttgtatttctatgcactagccatgaaccatctgaaaatgaaattaagaaaataatgttattgacaatagcttcaaggagaataaaaggaataaatttatcaaaagaagaagtgtaggagttgcacatagaaaaactacaaaacatagacatatattaaagaaaacctaaataaatggaaagatctcatgtttacatattagaaaacaatattgctaacatggcaatacyacccaagttaatctatagttttgatacaattttcatcaaaatttcaacagcccatttttcagaaattgataaactgactctaaattttagatgaaaatgcaagggacccagaatagttgaaacaatattggaaaaagagaacaaagttggaggacttacacttaacacttttaaaatttataacaaaactacagtaattaaaggatttggtactggcataagaatagacataaatatcagtggaatacaactgagagtcctgaaataaacctatgcatctatggtcaaccggtttttgacaaggttgtcaaagcaattcaatgatgtcttaaagaagaataatcttttgaaaaaatgatactgaaacaactgcatatacacaaacaagaaatgaatgtggatatctgcctaacactatatacaaaattaaacttataatggataaaagacctaactgcaagagctaaaactttaaagttcttagaagaaagcaaaggtgtaaattttagtgaccctgaattagacaatggtttcgtagataggtacgtaaatctcaaggcagcaaagaacaaataaattcattggacttcatcaaaattaaaaatgcttgtacttcaaaggacactatcaaagtgaaaaggcaactcacagaattagagaaaatgtttgcaaataatatatctggttgcataaagtaaaggtggtatacaccacggaatactatgcagccacaaaaatgaatgcagtcatgtcctgtgcagcaatatggaggcagctagaagccattatcctaaattaacacagaaacagaaaatcaaatrctgcatggtctcacttacaagtaggagctaaacattgggtacacacagatgtaaagacaggaacaacagacactggggactctaaaagagagaagggaggcaagggggcaagggttaaaaaattaattattgtgtggtttttcactacccaatattgggtactctgttcactatttgggtgatgggttcaatagaagccccaacctcagcatcacacgacatatccatgcaacaaacctgcatatctacccccgaatttaaaatataataataataatatatctgatataggtttagtatccagaatatataaagagctattataactcagaaataaaaacacaaaagaaaaataattttaaaatcatcaaaaaatttgaatagacatttattgaaagaagatctataaatggscaataggcatatgaaaagatactcatcattagtcattggagaaatgcaaattaaaactacaataagctatcatttcacatcctctaggatggctgtagtaaaaaacacagaaaataacaagtgtcggaaggatgtggagaaactggaaccctcacacattgctggaaggaatgtaaaatggcatagcttctgtggaaaacagcttggcagtgtctcaaaaagtaaatcatagagtagccatatgacccagcaattctactcctatatagccaagagaattgaaaacatatagtcacacaaaaacttgtacatgaatgytcacagcagcatcatttatgatasccaaaaagtagaaacaacccacatattcattaattgatgaattgacaaaaatgtagtgtatccatacaatgaaatactattcagccgcaaaaagaaatacagtatagacacataatgcaatgtagagaaacctggaaaacatcatgctaagtgagaggaacctgactaaaggggccacatcttaaatgatttcacttacatgcaatgtcttgaaatggcaaacttagaatcagagagtatataaatggctgctaggcataagggaaagtgagaaagtggaatgaccacaaatgtttgtgggtttcttctggggatgatgaaaatgttctagaattagataatggggatggttgcccaactttgtgaatacactaaaaaatgctaaattgtatacttaaaatattgtgaattgtatggaatgggaactatacttcaataaaaaatacaggtctccttgttcaaaattatgaagaatttcaagatggcaaaaacagaacattacaccaaaagcaggatctttccaagtgcatggccctgcatatctgcacaggttgcacacccatgaagccagctaggaagctttcactagcctgtcagtcagagttggtccatcctatgctataccccaatagcacttactttatgcctgataaaagaaaaacttcagccgaattaaattgaaaggagtttaattgagcaatgaacgattcgtgaattgggcagcccccagaatcacagcggattcacaaccactccagcgcagccacacggcgaaagaagatttgtagacaaaaaaaggaaaagatgtacagaatttggaagtgaggtacagaatggctagattggttacagctcagtgtttcccttacttgaacagtttgaagactcagcagcatatgaacggttgaagtacggcgctgggattggccaagacttagctattgttacaggcacatactcctaaatcaggttttcaatcttgtctacctattaagctacgttacagttcatccacmaggactcaaatacagaagtacagaatccttctcaggccatatttagttcactttaacgtgcctcttattaagtgctgagatgcagcacatacaagatatttacattacggatatgtgttaaacatytaccatgttccaagctctgttttggagttaggaatatatctgtaaacaaagcaaaaatcctgagatattttatatgatgtctgacggtgaagggggctacaaagaaaaataaagtataaggacatagggaatggcagagtggttgagtatctatggggaggtgatatttgagcgagatattcatgaatgaagaagtgggccctggagagggctcagagaggggaaatcttaaggtgggaaaatgctttgtatgtttcaagcacattaaggaagatatagtgggtagcctttagtaaacaggaggagaatgctggagaggacgtggaagaggtggccagggacttcagattttacctgtgaggggaggggaagtcatgggaaatttggagcagaggactcacataatctcacttccactcacacattgaaaggttggaaggatagaagaagagatactaattaagagactttttgaccccgtctctactaacaacaacaaaaaaattagccaggcatggtggcggacacctgtaagtcccagctactcgggaggctgaggcaggagaatggcgtgaacccgggaggcggagcctgcactgagctgagatcgcgccactgcactccatcctgggtgacacagcgagactctgtctcaaaaaagaaaaaaagagactttttgagtagttcaggtgagatattatgttaacttagattagggagatagaaatggagggagtgagaagcagcttcagatttatttggtcagtaaaactgacaggtttgtggatgtgctggatgaataatcccagaggaaaaacaacaacaacaacactctttttagtctaagccgaaggacaaatggtagtgccattttccaagatggtacctggaatggtggcctataaactagaaagacaagttatccacaccattacagatgcgcgtgcacgcacacacacacactgtatacctatatacacacatgcacagtatgcaaaagtgaagaagcgataggataactgactaaacactcccataaaaatggcgaagagtgatgactgcggactggtctatagcagtgatgaaatctaccaggcaggcattctgaggttccctctgccctggcagtggaataaattcctttattattctcttagtcagctatcagggataagctctttcatccattgttctctgtgtctcctgattctatgttcttggaggtccttctttgtccgtatttctctatagtgagatctgatatgggtattggagaatttgtcctattttaggactgtagggcttcctcagctacttcctgcctgtgcaaatttgaggacccaaagtttgcttttgggctcatagaaaaaagatttttaaagatcaaacttgtggtttctttggcaatgtaattttctcaaaaactttagtaagcttctratctatttacagtcaattccatgttctgggaacttcacaagaagtactttcctagatataattctctggtctgatttaatcttttgctttcttgacatcatgtttctttctctctctcwctcactcrctcgctctctctctctctctctctctttctatggcaaatagattggcaactgtattgaagggttcaggcttggtggaaaggtcagattcctaatctcatctttgcccccaaactgattcttaacagattttttttaatacaatggattttaattttatttttatttcccycctacctagtctaatttcatttccatatctacatacaagccagccaacactaatctggcatcacctctttcatttagtgccatgttaaacataactagccacaacccaaacattactaatattgttttccacccttttccaatagagctatagcactggaaggcaatcacaggtagaaaatataccaaatgttttgttattaaataatacttgtcttcatctttccaagtctcaaatattaatttccttacctgtttctactcctgctaagtcaatatcacatattttagaataaatggcgagaaagcccactactggaaccaatttaagtcaatgcccagtagcactggaattgccacctaatcattagcatttgaaaatttggaaaaatattcagaagaatatcatcattttaattctaagttcttagcrttgaatttgtagcacatctaagctcatttgaacaaaatgataaagaaaaaccctcaccctcatgttctgctgggaatgtaagaatacagcacccagtacttgcctgaggccattaaatgaaccattagaccacattgtctttgaaacataattattccagttacaatacagattgttctcacatgttttcatcttgggaacattaaaataaaattcccaggattaggggagttatactaaatactacaaatggatcactgtctcagttaattttcataataatccattataaagatgaaaaaaaacctgaggcttagggagatttaaaaatcttccccaagtctacacagtgaagagtgacaaagcagggtttctaaccaaggttcattggacttaargactaggctactctgatttaagaatacttgaactaaatttttgtaactggcctggagtaaaggaaattaaatgattaaagaggttgaatcacttactcatgaatcactaaagttatgactccatatgctggaagtttaacatgcagaaagtaaatacatacatattaatatatactgggactcttcggtatgtatgtgaaaaataacatcatttgacattggcaaacgtaatacactttataaagctcttccatgttacctcattttccccttgcaactctgtacatcagtcagggcaattattattatttccatttgacagttgaggctcagagaagttatatgacttgcctaagctcaccagctagtaaacagccgagctctgactgaaacccgtttcctactgccaactccagtgttccttccactattttatatcgacactgctaatgctatgtacaattttgttttgtagcttgtaatgcactttcaaatacactaccctactgatctcatttgagactattccattgtccccagaaacacatctcacagggggctttagctctcgccttggaagataatggctgtgactcagggggaacaattaccaacctagggtagatacaatatctttaaagatttttttttttaccataaaagaaattttctacagcttgtatttataaagacaagtccagcatgtgtatttaaatagttgtcaatttttacatttgctttctaaaagaataatgtaattttcacttaatatcacacacatgcataaattcttcactgttacaaaaaacaggctgagtaggtaaataatctttctctattattaagaattatcttctattaagtattatcttctggaaagacttagaaatgtatatgtagaatagatgatacattacaatttcaatttttcacagctaaatcaaatttacataaaataacatattttgggggtttagtgtttgtaatattgtggtatttgatagcagaaactcagagagtcaaagtgattagccacttggatgtatagacattcattcacagtttgacctagaactcactttttctggtttctgaccccactcttcacatccctcatggggtatgttatttctggatgaaaagtgtggggtgaaagtttttaaaaataaagaattccctgagatccaagaggcaagtgtttgggtacctgaataaatttggccaagccactttgaccttctaagcatcaggtgtacagaaaaatctacttaaggtaaatcattctttattttatcagaatagtgtagctattccatgtaaaacagatatcaactgcttattttgaattgaatgagcatgtgttcacccaggtccaaaattgagaatggggtctctaagtatttgttggttgcaaaataatcaaattctggtacggtagccttttatttgccatctagattttctaactttccatagaagaaaatcagacatgcaagtggctttgccctgcctatttggatcatttccaccccattccaactcaagaatttgattgttcaatacatttagataatccagaggagacagtatttcctcgcctttcacagatcagaaagtaatgtgccatgtatactaatttatgttttatttagtaaaagtctattagaaatagcactggttattagtaccacccccaatttgataacttcctttgccggagatttgatgtttagagtatctaatgtaaagatcaatgataggttatttgatgattggcgttccagtactagccaggattctaactagctatgtgatcactattctttatttaaatagtgattaaaagatggggctgaacttgcttcttttcagctctatctrtctttgaatatacaacaacacaagaggtcagtacctgaagcttcaaaagaaaaagatatatataatctattttatactccttaaattattcctaaggtaacttcttgctaaaagataacatacttgccccattttccaggtgtcaaaatttccttgcacccaactctgctgaaatttctatggtccttagtagcaattataaatctaggatacatgagctgcttttrtttgtgttttaattctgcttattctggtggcatgctcacatactgtgctgagagaagatgaaatttgctgctaattaccaaggtttgtgcttctaaacattgctggccagtaattgacctgtagtgtctagagtcaagtactagctaataactttgttgctgtagtgttgaactttaattatttaagtcaaaggacaagtattagaagccacactgcctgtttctgtagtgttgcaattgccaagaattgaaacttagaatttgaaacaaaaaagagcctgtttaagtgactgacatctgccagtgcatttgcccaccagcatgcaaacacacagcaaagccggcagaggccctacgaagtacaccttgagctgtcatcattggaaagtctggttaaagagatttgagctctgtgcattattgaggcatgaaaaataatattctaacacattagaatatataatttcactgaaatcttcctaaagatctttatataattgttaccaaatccaacgtttaaaaaacacatatgtatctgtgatttattctattcaaaaatgtcttaaaagcccaaatttcaccactatacaatttatccacgtaactcaaagccacttgtactcccaaagcgattgaaatttaaaaagaaagaaagaacatgtctttatacagtcaaaatagatctcccactgtcatattctacttatctttagttgtgttacttttgggtggaagaacctcaaattccatatatttctgtaattagaggtagtctcctattatctttgggyagtgtgagaagagtttttgccattttctaaagcacagtttcctttggcccagttgaaactccagggagttgtgaccctgaaggaaagataatctctgaagagacaaytgagtatttctagttgaggacagcatggtgtaagaatgggaaagtatgagagttcacagtcaattgatgatatcagagtggaaggagggacagtagaagagttcacaattttgagagtcagctgaactccagacacatactatgcacagggaacacaaaaataacaaatgcagggataggtcatgtctatggtttggaagactgatcattgttaagataaaagctcttctctaatttgttcatgtatttgttataatccaaatcaaaatcctgcaggatctttttgcagaaattaacaacctagttatacagtttatatgaaaatgcaaaaggcctacaatagccaaagcaatattcattaagaagaaaaaactggaagatttatactgccccatattttactactaagaatgacagtaattgagatagtgtgatattagcacaagaatagacaataagtaaatgaacagaatacagtgtctagaaattgactcacacatatttggacactgaattatgatgaagataatactgcagtacacaggggaaacaatgatcatttaaatataagtaccggataaatggaacatccatgtcaaaatagatgtatcttgacctttacctcacaccgtataactaaatcaactctaaatagactgcagattgtaatgtgatacgtaaaaaaacataaagcttttcaaagaaaaaacaggagaaaatcttcataaygttgggatacgataagatttcttaaacatcacacaaaagtggtaaccataaagggaaaaaaagaataaatcagattacattaaaattcagatttttttctttgacagacaccaagaggataatcaaaaggcaaggaagagtgaaaggagataaatgcaatgcatatacccgataaaaactcatatccagaatctataaaaaattgttacaaattattaagaacaaagataattccaatagaaaatgagcattttaccacaagaagtcatgcaaatagccattaaatatatgggacagtgttcatcttaattaggcatcaaaagagtacaatttaaaaccacaatgtattacccctacacactcatcaggatggctaaaatgaaaaaaaaaaatagaaaaacggaactcttgtaatcttatgggggaatgcaaattcatagaaccatttggaaaactgcttgatgagtatctactaaagctgaagatakacacactatagattcagcaattttactcttaggtactccttccagaaaaggttgtacacatgtagataaaaaggcatgtacaaggaggtaggcagcaacactgtttataatagccctgaattggaaataaaagtgtttatcaagggtagaataaatacatacattgaagtgtattcagttggtacaaaactctacaatgaaaattgttgaaccacaactatagacaacagtgaataatggctgcaaaataacattgagtgaaaggtgccagatacaaatgaatacctattatatgattctattcagataattctaaaaatataaaaaagaggcaaaatggatctaaagtgttaaaagtgagtaggggcaggcagagtggcttgtgcctataatcccagtgctttgggaggctgaggtgggtggatcacttgaggtcaggagtttgagaccagtctggccagcgtggtaaaaccccgtctctactaaaaatacaaaaattagctggacatggtggcacatgcctgccatcccagctacttgggaagctgaggcaggagaatcacttgaacctgggacgtgggggtgacagtgagccgagatcacgccactgcactccagcatgggcaacagagtgagactctgtctcaaaaaaaaaagaaaaaattgagtaggtaaagcttgcataggagtgtgtagtgaatgcaacagagcagggaataagcttctgacatgtttcctgttctgtttcttgagctagatgctgagtacatgtatgtgttcagtttgtgaaaatgcatcaaatagtacacttatgatttgtagacatttctatatatgaggtatattttcataagaagtttacttaaataataagtgtttgtcccatccccaaatattctcagtttagtggaagcaggccctctcataagcatgtaactatattaattcagtgtattataattcatcaaacatttataggagcccctaatcacatgcagggctgtgggtgctgagaataccaagatgaataaaataacgacactgcttacagtctggtaaaaaaaaaaaaaaaaagcaggagacttataagcaggtaattttaacatactgtgtaaatccagaagtaggtgaatgcaaaaagtactaaacagactaaacgctctttagctgacttccacttaatcaacatgactagcttgaccatgattttccattctccttgcaaaatgcactgactgatatgcatagcacacgagatactccagagcagtcagcctgtgaacctctacttccagcagctgaattgtatgcttatcaatagtcagttatatgtatgtctatcagcagagtttcttgctccactttaaagaaaccaaagctggtggggtgtggtggctcactcctgttaatcccacaccttaggaggctgaggcgggcagatcatctgaggtcaggagttcaagaccagcctggccatcacrgcgaaaccctatctctattaaactacaaaaaaaaaaaatagctgggcgtggtggcaggtgtctgtaatcccasctacttgtgaggctgaggcaggagaatcgcttgaactcgggaggcagaggttgcagtgagccaagatcacaccactgcactccagcctgggagacagagcaagattctgtctcaaagaaaaaaaaaaaaaaatgagaaaaagaaaagaaaccaaaattggaaacctcagaggctatgttctggtattgtttttataagaaagattattaatggctcaaaacattggtaactaaatgtacatttcaaggtttaaagctaaaatataatatctaaccaatatttttattagtttataattactaagccacgtgaaatgctttggtaagagcataagctctgctgtcatgctgattgacattcaaatcgtcattcatatattcattagatatgtgattctggagaagttatttaacctttttgtgcctcattttcttcatttttaaaaggggatactaactgggccttatatgatggttgctggatctgaagaactttgaagtgtaactgatacatgaaatgcattctctttgtcagtattagttattaatatagtaggaattcatcaaaaggataaagcctagaaggaacggggcagagagacacagttagtagacaggtgtagaagactaagagcatggggcatttaaagaaccttgagctgttctataatatgtacttgaagtcaagtgttctcgagactaagagatgaaaagttaatctagaaagataatttttaatttactttttaaaatttcaatttttcccaaaaaacagtgagttccatgagtgcattcactatgttttctttttcccaaggctatgtaacccccacactctcctagctcatatgctagtccttggtcagtgaccagcctcagtcaccttatctggatcttcttcctcttcctgattctaactgtcagagtacctgaggtttcatcactttaaataacagctatagcttgattaataacactttttaatatagttacagtctcttctctaaactccagattcttatatccatataatgtatcatctaaacttaatacattttagagatgaaggtgctattcataattattccaggactacagacataaatcagcactgtcctgggcaaaggaggacatatgaacactacatatatttagcgacttactcaacatctccacttaaatagccagtagggatctcaattttaacatgtctcaaaacaactattgagtttccagacctgagcaacagaactgcatgttgtctggagatcctggactttgaatgagatactgtgcctggatgagacttgctattgtctactctgagttctaggtgtaagaaggataagccatagagtcaatctctatggcagagatgactaagatccccaaactatttcctcttcttcctttgcacaatgctagatgacatttccttgcctcccttagagacaggaattgccacatggctgagctctagctaagggaacatgagcagaaataatgtgacatgtccaggtctagcctactacaaattttctgcaaaacccactcttttgctgtcagctagaagtgaagcaccagtacatctaggggacaaagaagtcagcagaagagaggccctgggtccctgaatcacacaatgaaaggctgtccaccaaacacttgctttgaattgttatataaataagaattataatgttaccgtgttacaatacttaaatttggggataggttgattttagtagtggtcatttctttttaaaaacaaacctgatgaattttctgtgaattttcagtttgacttagtcttattgtcatataaacttttttataaaattgaagtgaaaaataaaattaaaataatctacacttcttggcatacaaaccaggtctttgcttccagattgtgcaagaatacatagttactctaggcacttccttttatatttaaaaatgaaaatacagttttaggatttaatggattatatgtaaggacaagaaacgtggataaagtattatcttctaatccttattttactaaagccaaaataaagtagctgctacagcatatttatttaatttcaagcattgccttagaaagtagagatttctgtagatattattatcctacctccttggatagctatgaaggaaatggttgaaagagaacaaaatcaataattttacagcagtaaggcccaccatggatcaattactacaatcaataacatactaatcaatttgcatgactcacattcctcttctttagtttccttctgttactcttcactatatgaaaagagatatctctccagattcttttatcttgtttgatattagcagaagcaagaaacctctttcctcatctatcaagaacaacaacaggggagtgtttatttgttaaatgtatctgataacataatagactgacagaaatcttcatttctaatgggatgatattatgtagaattaaaatctatcttactggtgggcaaagtttatctcccatgcaaagacacatatatcaaaagctggtagagtaaaaccacaaaggaataatttacaactgggttgtatttaactacattccaaacacttagtatagatggaaggtggtagctatagcatgtagaactcctttctaacaagactattttccactgaatttattttatttgtaaaaaatagcatttgtaggatattgaaaattataattggctactttaaaaaatactaatcacagrccaggtgcagtggcttacacctgtaatccctgcactttgggaggctgaggcaggaggatcacttgaggtcaggagttyaagaccagcctggccaatatggtgaaaccccatctctactaaaaatgcaaaaattagctgggcatggtggtgggtgcctataatcccagctacttgggaggctgaagctggagaatctcttgaacctgggaggcagaggttgcagtgagccaagatcgcgccactgcactccagcctgggcaacagagggagactccgtctaaaaaataataataataataaattaaaaaataaataaataaaattaaattaaaaattaaaaaaatactaatcacattgatggggaagaaatgaagggaaaatgtcactgaagttcagtgtagttctcttccttttgaaatacaacattaattagttaactctatgctgcatggatatagcaaactgttgatggtttacacctggaatataggtatataaacatactacaattttctactaaaatttgaacctcacctgaattcatctgccttttgcaatatttgctttaatcttcagaagatatttgttgtactaagaatgaaaatgctaattataatacttgtaggaattttgttacctgaactttatgaaatagttctaagaatgccaccattgccacaggtttagatgcgttgcaaatatattttttaaaaatagcccccaaaagaataagaggaaaataaaatgatctcagctgtttaaaatggattttgaggaatgatcaccaatggcctccttccctttggttctgccctaccactgaactaatctaacaaaactctgatgctaaattatcccttcaactggccttcttgagttacacattcaggctgttgagcacacaccactgaatgagaaaattcctcagccacacacaagggcacatgtgatcgtgtagaaactctagccatcaatagggcttcccataaaattttcttgttcttggccatagggcttcccataaaattttcttgttcttggccaactccttcttttgcatccttcagtgactgtatcaattagtcaaaactctcttcaaaatccacacagatccccacctcttactatcagcagaaggcatatcacgtttatgccttctgtatcaggaaaactggggcaaagcaatcagctctctcaatttcttgcctctcccatctgttcccctctccacctatagaatgaacacaaccgtgcttctttttctctttcctttcccttggaggaaataaaattttcttccttctgtttaaagccaatcattttactgtggctccttatctgattgtctgaatctgtcaagacttttctgcatcagttatatccttatatcataaagtagctttaacttcctttttattggtatcacttacctcggcttttagctcctctctcccatcctgataaaggaaaaaaaaaaaactcacaaaagtcaaaactcaattgtttcctttaaatttgcagccactttaactaatatcctcttctctatccgaaatgattttgtgctgaatatatttaccctatccagagctactccccacccttccctacctagccctgtgccctgcaatcttagcctgtatgactattttgatgggcttacttattgctttgttttcagttgcgtgtgaccaatgggaagcactagaagaaaatataaggtagaaaggaaagtgaagaccagggtctttattatcccagctcctcctagagatgtctccatgggctaacaatttccttgttaaggatcacagctcctgtcaggcaaccctcttgatacggtcttgatacagtttctctctttctgtctctctctctttctcgttgcctcccctcctctcttctattctctctcatctctctctctccttcttcttgtccccctccttctctctctcttctcatctctttaggataataaatgatagtggtgtgctataattagcccatgcatagtttactattacttacataggaaaaccataaggactgtccatactttgtaagtaagcctgttttttagccaagcccagattacccaagcagaatctgctgcttctttcctgctgggtcccagtctgatacaattatcttgaaataatagtttatataatatagtgatatgaactgaatatgtcctcttccccccaaattcacatgttgaaaccctaatcctcactgtgatggtatttgaagacgaattagtccatgagggtagaacccttatgatggattagtgtcccatcatgaagagacacgagagagattgctttctctctctgccctctaccatataaggatacaatgagatgacagtcatcacaaaccaggaaacaggctctcactagacacctgttctgctggtaccttgatcttagacttctcagcctctagaactgtgagaaatatgtatttgttgtttaagcaacccccagtatatggcaatttagtacagcagcccaaacgaagacatataggtactacttttactcatgctgtttgggcagcaacccacataacttagcttttgtgccactattcccacatataactgttttctttctctctggtcactataattcattcccacatagacaaatccagtggacactctgtggcccacagtccataacttagtggagatcaccccgctgcatttgacactattggccactttactcttccagtaaatctcttggcaaccatgatatcttcttgtgcttcctttattggcattcatgggctctctatcatcccttcaaacactggtgctccccatagttcagtccttgacccaatgctcttttaacattacgttcttttcccaagtgaggttctccactctcaggacatttaacatacccaacatggtgcagatctcactatccaaatctgttagacacaaccatctatatattctactggcacttcaaagtcagcatatccaagataattatgtgccaaaatcattatcctaactaatgattatcctcatactgtgtgctctgacttccatttccctcttggccaatggctcaatatattcaatctgaagtctaagctatcctatacgcctctctcttccccaccccccaacatatctgcttccagtgatgattcatcgaaaatcacccgtcatcattccaccagagagaaatttccaaaatgaaaatctgcctattctatccactgcttaaaccccttcaatggctctagtttgagctgtttcaaggcacacgggatgctytactgctgctctgacccttacctctatcctcagttttagcagctggaactctcatgcctatggtttctgtgctattrataacaaaccacttacagtttctagttaaagtcataatattttatgcctccatgccttttgaggtctgcatctctccctaagatacctttgaccatgctgtttgactttggccaagtgtttcasggaaagcaccatcatttctttccaggaagcccctcctcttgcccctatttacccaatccccacatacactagcattatgccttctccactagcctcctgctcataagtgtccacaaatgggctcctagaacaccatataatctctcaaagaatttaaaattttatattgaaattacctattagcatctctctcctcctcaccaaactttaagtgctctaaggcagggaacgtgacttggtccttttttcacaactgcatagcacagtaacttgaatcatagccaaaacttaacatcaatttttataattaaaagtaattattattaataataaacccttgttatgctttaacctcaatgtcatcatttagaaatatatacgttgaaacatttcaaaaatccatgaaaaaattcgtattctgatatattataggacagtgccagtaaagtcttgcactatgtactcatttgaagtcaagacaagtgcagacaagtccttggagcaggcaagcctagatatatatgccttaaaatggaggaagatgtcatatctgtctccatgtgttagagctgatgtacaatccttatacctgacaccctatcagagttcttgcaggaaataaagcttaatgatattcagtttgaaagtgggaggaggattttgtagcacaagagtcaaaaggaagagtagatataatcaaaccaatgttgatgatataagggggtgacaagaatgctgaagctgtagctgtcatcaggaagggactcacttgggctcaagagtgatagtagccctggttatagggcaaagcaggcagtggggaacagcaaggcaaggctattcaggaacatgtgagataccctagaaaccccttgaactgaacatatggattagatgcctgagattcttcaatttcactgttactgtcttcttcacacaatacctaagcaaacatgggcttgttatcattcagataagtactgctactactgggatcaggataataattttaacaacaaaaataatcatatctagtacttattggaatttataataggcggtactccaccttcaaaatacatccacaatccatccacttctcaccgataccactctggccaatgccactgttatgaatcctccataacagtgtcctccaaattgtgtcctccaacaaagatacgttgaagtcctgatacccagcatcttcaatgtcacttcatttggaggtaaggtctttacagggttaattgagtttacaaaaaaatggttattaggatggaccctaatccaatatgactgatgtcctttataaaaagagacagataggaacagtgggaagatgacatgaagacacatagtggggaaatagccaggtggctggagtgawccctctaccagcccaggaactcaaaagattgccaacaaacaacagaagctaaaagagacaaggaaggattcttctctagagctgtcagagagactatggccctgctgaagtcttgatttcaggctttaaggctctagatttgtgagtcgataaattgctgtttgttttggtgctttgttatggcagccctagctaactcatgcaattcccaatgcttgggttgttgcaagacttttcactggtctcttctcctattctacacttctgcatcatctccacccccacctctgtaatctattcttgacatgtaagatgaaaacaagagcaaacctcttaaactgtaagttagatcatattactcttctattcaaaatcctccactggcttcctatcacattcagagcagaaatgaaagtccttactgacagaggaggagcattgctatcttagacaagcccctcattctaaagttcaccttaataaaaaaaaaaagctgtctaaatccaaagggcatcagcctgatggctaaggtcagcatgaccataaaccacaaataacatctccagacagaaacattccaaactccacccagacaaaagacatgccggccccaagataacctccctccagccaggaagatgccagccttgagataatgccccgcaggccggaaagatgtctgcccaaagataaacttgcctcctcccagagacattccaaccccaccgtaaaacttcttcctcacacagaaacattccaagcttctgttaagccccctcaccctaaaaccaatatatactcttagtctgtaagagaaagcactcctgaccaaaaytggccagaagtccgtctcaggttttatctaaagtaaacctgtctttactgccgagccacagttcatgtttcttttctctttctttaactcttacgcttacagtgaattccaagactacaccttttgaccttatatcccactgtttactcctttctcaccacagtacaggctaactggcttccattctgtccttcaaacatgccaagaaaacttttttctctcaggtcctttatagtcattatttcctctgctcatatcccttggatatccataagccttgctccttatcttctttaagtctttgttcaagcaacagttttttaatgaggtctaattatcctacatacaattgcaaccctccacaaatgcttgaaccttctttcctgattcattttcctccattgctctcattatcttcaaatagattatacattttacttatttgtttttctcccaaacacaaatttaatctcaacaaggacttcattttttgttggctttgtttactgatgcaccctaaatacctagaacatatagcatttgkcacatgaaagtgcacaaggcatatctattgcatgaataggttatatcttgcaccttagagggagcacaaaatagtagcagaatgaatactgactaccactggagtcataattcctgggttctatacccattgcctcacttacctggcataagtggccttaggtaagtagagtctcagtctgtttattcgtctgttaaaatgagaagaaatccagcctacctcacagcattctcctgaggatcaccttggatgatgcatataaaagtgcatctgaatctctacagtgttatataaatatgagctattttaaaaataaatctactcagagttttatagaatgaaagtgattctgtatattaagaggtaagtaataaaacatgatattcttaattattgagaagtcaggcttcctgaaaataggctctaaaaaagaaaaagtaaaagaaatcccagtcgagtaccactttaaaatgtctaaaaacagaagctatgaaatgcaacattcattattaacagctattacttgctaagacttactaaaaatacttttatatataacaaaatagagtagtctctccttatccactggggacaattccaaggcccccagtggatgcccaaaactgcagacagtctgaaccatatacatttttcctatacccgcctacctatgataaagtttaattcataaattggacacagtaagagattaaaaacaattaatcataacataaaacaattataataacactccggcatcaccactcttgcactttggggccattattaaataaaataaagatcatttgaacacaagcactgtgataccatgacagtcaatctgatgactgagacggctactaaatggctaatgtgcagacagtgtacacagtaggtatatgccagatgaagagatgattcctatcctcagtgggatggagctggactgcttcagatttcatcacttctcagaacaacccacaatttaaaacatacaaaatgttttttttctagaattttacatttaacattttcagattgcagttgactgtgggtagctgaaaccacagaaagggaaactgcagataagggaggacaaccgaattcgaaagaactcagtgcagttaagctttctgggtgcctcaaagagctcattatgagtgaatgagactcaatattactggctgaaagtgtatcatctcatataaataataacaaaacattttaaaatgtcatacaatgatttctttaatttaccttgaccattatgatttacatatgctaataaactgccaagtaaggattccatggataatatgtagtttgtgtttatatcgctatcagatcctacaatcatacttagggcatctgatatcaactcgatattcatcaaacagttaaacaagaagcatttccttaagtaccatcaggcactgtgcctaatggagggtgcagtgattaataaaacatgtctcttgtttatagcagttcgcaatccagttagaaatatacagtcatatgcctcaatacaaattagactttaaaagggcccttaataaaaggaatgcacatagaaagagcattatggagaagcaaaagatgaattctgaatgaggaaatctggaagtctttagagatggtgttactttagctgggtcttaaaggacttcaacaggcagagaaagggrgaggatgtaagggcattccagacagagggaataaattggacaggagaagtaaagggttcaagaagaacttagatttgtggtaactttacctataattagattttaaggtacaatatgaatatttaaggatcatcccaaatatgtgaacattaaaaatgtcaacagttaacattcactccaatacaaatcatgctgccatgccatattcaaagacagtggtatttggcacttcttatgaattaaatcaaaatcagtgttaaatcacttctagagtcacacacttttttggaatctgataaaactttcaaagcctctcttaaaaggacccattgtccaatatgtgaaaatatttagatcttatttaaaaagttcagtagatttatttgaagcctacagttggctaaggctctgtaggctaacaacctacagtcaaaatgactacgctatttatgcgagaaatttttttttctttttttgtgtgttagagtatgtaggcatttttagagaagaaattttgagggcaatgctacagtaacatttgagtcatttgaaaaacaagagattattggtcaacatactggagaatatctaagttgtctacagaacatcaacaaatacttttgatatggagttcagtgacccatcgaaactataaatctcaaaggcctcccagcttcaatcatggtactgttgtacagaccaaaacacttgtacaagaaagccctacacaaacattacatgcgggcaaaaatttatgttcccagagctatggcagggatttggagtgttactctttgtcatataaacctgcagggtgcttgaagaactgaagggaaagtttgctgcatatctcaaggatgccagtagaacattatctttgatttacagtcgccttttaatggtattttatagctaggcaatcaacataaaacacaatgaaatgtaaacctttcagcaaagtaagatgatgattttggagggtagggaaatgttttaacatctgaagcagcactgttaagaatctttcctctcgacagacaaacatagaccatataaatagttaagctgcttttccttcccagaattcacacatttaaacaggtcaggtctggttaaaccaacagaagaaaaacaaaggtcaagtaggagtccctctgtgatagactcattataggaaggaataagatatcaatgaatgtttgttaaacaatcatgtgaacacaatatacggatgatgtgtatgtgggtatttgtgagggtatatttgattatagaaagatactcttcttgtcattatatgtcatcttttcggtgtccatctttgttgagtgtgtgtgcacacgcacacttgtctaatctcaggagctaaacaagtgacaatcacttctctggcctaggttgtcagacagaggtggcctcattctagctataatttagccactattgccctcctcctgctgtccagcccctgccccattttgctctcctgctgattttctaacattacacctaagcttgccctttcttttcacggcactccgaaaaacttcctgagccatgaagctagttcagagaaaaacatgatatttaagagacataagcccaaaaggataacatccctatatttcaacctcattctgattttttcctttatttttattaagcttatctttccattcatatattttgatgagctacacataaaagatatttaacatggaggtagaaatgcaggttagtgaactctgcattgcacagctgattattcagtgtcaagaaatcacttttggatagtacttagtaagaacagaattaataaccactaacatgcaaagtcttctccctgtctctttagagcaatacaaactgattagcttcgagcagcaatttaaaataaagaactcattggaagcttctaacagtttcatttccagcttccattatttagttaactaaacttactttgctaattttcagaaatgtcttatttttaagtagaagtcacaaacatgtgccttgatttattctgagtatgaaacaaaagcaaaaatgcttattaatgtaaaagatatccctctcacatttctaagggcagcattacaatttcaaactatawtgactgctatgtaaagaagactcataatggagttttcccagaaaaacaaacaagcatactgataaattaagcggcttgcacgtattccttaagaactttgcaaggtgtttgatgtttctaatgaaggagattaaaaagacgatactatattttcagataaggggataattggcaatacaagggtctacttaatcaataggctggtttagactggaagaagtcatgttaagggaaatctcgtgatattgcaggtagagtaacttctaactctgtgatacagactgcctgtggttgcaacctacctgcacacctagtagcacacttttaataaaccgaatataccaaaccaactgtgaatcaaaatcaataaattatccagattttagattgtaaaaggtgttgcatctttactgggatcttgcagtggctgacgtttggtcccctcccccaacccaatgataacataaagcatggaaaggagaatcaacccttatgagtgatatttgcagcttacttaggatgaactttttaaagtttattgccacagagagagaaagagtgaggaagaaattttggctagtaaaagttgatattattttctataaatttcctacctatgtaatcattctttcctgaaaatacacagtaatggttttgtttcctgcttttattttacggtagcctctacatttgtgttttaaaataaatctctgcaaagaaagaatagcattagtgttttaaatgaaaagcattataaattgttagttctgccaaaattgcccatgagttttctgtatctaaagacaatgtaatataagaaaagattactggtatcaaagtaaaaccctgtggtttaaattctgtttctgctgcttatcagggttacaatcttgatgatccacttagcctctgtgaatctcaggtttttggctataaaattgaacagtaatatcttcctcaaaggcctggaaggaggaaatgaaatatcatctggaaactggtggcatgaggagagtacaacatattttagaagcttcggataactaacgtcctaagtagcaaaaaagaatagagtgctctatgcagcatatggttccacttattttagattttttacagatcttagtttctcttaggttttattattagacttctttaataaaaacaaattaacataattaaattttaataggtaaaaatcctaaataaggcatgaataaaaataattcagttaaactttcataacaaccaaaagcaaaacaaaaccaaaagatttcatagattgattctatgtcgatacccccaggtgattcttgtgtacagctttggaatcactgacctagaacagaggttttcaatcctggcgcacattagaattacccagagaacttagaaaaagagatatctatataccctgtcccaaactaatttaaattagaatctctagggctgaggcccattgtattttattcaaagttccccaggtgagtctaaactacagccttagtggaaaaccatcgctttaaacacgtctttaacatcatatacatttatttacacttctaaagattatacaatctccagtgataaaattccaggcaaagtgattatgacatgaaggactgcaggcaacatggaggagatgccatggcgccattaatttggcagaaggcccttagatcaaactatagagaaaagttaggatcatggactacctacatcagaatcccttggaaagcttattcaagttgcaggtttctgggcctcacttcagagatactgaatcgtagtgacctggtaccggggcttaggattcactctgcatgattcatgtacacagcagttggaaagccactgccccaaaagcaactgccttcccttaaaatagtacagaagatgatgaccagttttggtccctctctattccccatggagaagagacagagaaaatggctcaactacaagtgagttttcccgtcattttgcctggcattttacccctggagattgtgtaatatttagaagtgcaaataaatgtgtgtgatattaaagatacatgtataaagcgatggttttccgctaagactctagtttagactcacctggggagctgtgaataaaagtataatgggcctcacccctagagattctaatttaaattagwttgggacagggtatatagatatctctttttctaagttccctgggtaattctaatgtgcagccagggttgaaaaccactgttctaggtcagtgattccaaagctgtgcacaagaatcacctgggggtatcgacgtagaataaatctatgaaatcttttggttttgttttgcttttggttgttatgaaagtttaactgaattatttttattcwtgccttatttaggatttttacctattaaaatttaattatgttaacttgtttttattaaagaagtctaacaacagaactgaaaagaaattaagatctttaaaaaatctaatacgggaaagcatttcctgcctcatttgtgtaggtaaaggtyagaaatctgcatcaaaacataaactctcttttatatacaaaccccctgctgggcctcacagctgaggccagcaaggtcctttaycaccatattcactgtgttgcctatatccacaaagtgtcatatctctggatctgttctacccgactccacccccaatctgggcagtttcattctctagggactgtggaagtcccagaaatttgctgaatgacaagaaagctctcttagcaaggaaatgaaaaagaaagctctcttagcaaggaagagaaagctggttccttaaataaaggaacaagaaataaacagccaagtttttgaaactaccattcaaagatttacctctattttaattgctttatcatctatcagctttgaactcttacaacttcagggaactaaagagaaaagtaagagtattgaaaggctttattagtaaagacaatcctgcttattaacttcagatttgtatgactactgatattttaaaaatacctttgctatcacctcacctacttcacccaataattccttgagctctacgggatgtattatatataagagaaaaattaataaacttttcaaagactttagttccaggactaytactttgtcacttaatattgagggattatagcacattatctaactcctcaggttcttggatttttcatttataaaatggagacaatgttatattctctgaaggacatgtaagatactgcattttaaacagatttctaaactgtaagagcttcagaagtgtcagatattataattattctcatttaaaaacgaccaaattgaagcacaagagattaaggtgggcactcaaattaagagttacttccatcatatcagttatttccataccatcatagtctcaaaatactgctcaatggactttctgacaacaaatcaaatgtaaaaacattgagcacctattatgatttgggatactaaataaagacaaaaagaactgttcatatcttgagcatgaattaygaagagaagtataaccacataagtttgcatattatagattcgtaagtagataaactaaatgaaaatggagtgtctcagcacctgacaccacatttcacactacggtcagaaaccatgattgttcattcaccaaaccgatcattcagagggttctgggaaaacctcttctgacttgaaatagctaaaacagcaggaatttttttacacaccacatgcctctttctaagggtttgaaaaatcagaatccttgggaaaaaatcaagttaaatatcatagttttcagaataccttccaatctgaaggactgtctggcatgaggaggagtgaagggagaaagaaggaagttgggagaaataaccagggagattataaagggtacatccagactgcaattcagacggtgccctctacattttgctttgacctggagtctagcagaggatgctcttgaccacctcatttcctgcaggatcctgacactgcacaaattgccagcaagagtgaaggtcaactctccaggcttttaacgcacaaaagttatcttgtgcagcaaataaattcatggctggttactcagtttgcttgtgtagatcagaagctcatgaagcagaaaatctctgaaagtcattagacccctatggtcaggcctgtgttatcctaaacatagtggcagccatgtcaattccatacactagcacactgtcctctaacaatgagaggttatcatcctagaaaagaaaaccttaaactaaatcagtattaagtggagtctaactttcaacaaaaactggaatttgtcagaataacatggtatgaaatgttcaaaaacactaaatttatcaactctgtcaacaagtataatatagacagaaactttcacagagccaatcacatatattttattcaattttctttaaacaatccctggaataaggactttggtcagaagccagggccagagagactccaaacatcatgtctgtaaggggttgggaaaggagtgacctctctggttggtgaggttggaagaataaacagcctagccacttcctctccccttttgaagccatcctgcctggagggatgatgcattccattgcaactgtctaatgaggagttattcagccatacctgtgcctgcatggtaagtttgcctaattcagggctaaaatatcaggaggaccacttgatacagccctgaaaccatctccactaatcagctttctcagtaataacagtcacattttgatatttcgattggttcctgtgacatggacataaggattctgtatcttggacccttcaagccctacagcttcctaaaggatgtcaggcagagtcaacagaagagcgggtttctgagcaccacaaagctgtgtggagaacaaaatgggggaagtggcgacagaggcaagactagaagtttctaggaagtgggagaaaagaagtgtgaattcatcaaatggaaattttacaattttctcacgacctggctctgccacacactttcatggcattcacttctcttcaacaaattaaacaattctagcctctttcaccttttcctagaaatattatttatgttagaggaatataaatccatgtaatatctgtatttggtcctcttgcaaatacaaggcatgcaaatgttgattcaccaacctgccaaatatattcaaaacattacagtacaaaatactactctagatgctatgattacattattcacatgctttgccctcaagttgcacaccaaaaataaaaagaacaatgcacaaaaaagaattataataaaacatttaattaacaagctcaagaaactacttctctaagtttgctgaagctttgaggcaaaaatacctcgtgcccagatggcacaggtgccaatcagggggcactttagggctgtttccattagcaggccagccatctatcctggaaagaatatcactgagctctgttttcggctggtgactttctctaattcatgagctgctcttttaaaatgacagttctctcttcctgtgtttcttttaattaataaccctgtggagtatttttcattaaaaatgaattttacctttactatgaaatgtcaaacatgaataaaatgagcaacttttcttgaacggaatattattttaaaaaggtatcagttcaccttttccttgacaagtctgactagtggaatgagcttgttcaagcaatatttctctttcttcccctatcagtggcctctctttattatgttctttcacaaacagataaattgaagcaaatagtgtttttagaaaaattaaacttcaaacacgctatcatgttaagatcaaaattttatgaaatcaaaatgtagttgccttctacttctaaaagtgcaattcaaatttagtttgaggctgtaaataaaaaagcaaactcaggccggacgcggcggctcatgcctgtaatcccagcacttcgggaacccgaggcgggtggatcacctgaggtcaggagttcaagaccagcctggccaacatggtgaagacccatctctactaaaaatacaaaaaatcagctgggcgtggtggtgcccacctgtaatcccagctactcaggaggccaaggcagaagaatcgcttgaattcggtaggtagagattgcagtgagctgagattgtgccattgcactccagcctgggcaacaagagtgaaactttgtctcaaaagaaaaaaaaaaaagcaaactcagctcttaatttacaaaattactgggttaatactaagcacagattggcaaagctctttgccatttttcccaatgcttcccctgagtgtctcccattaactggaacatatttgtataataactctatttctatagccacaaaggcatggttataaggacagtatctcagcagatagcagggttctcagccaaatgatagatataattcaggatgagcttagaacctgtagttaaagtgcaagctttaggtcaagttaaatcaactaatgctaatctcagcacatgcagcaaaacagtacagaagtctgttcgttaacctaaattagagaaacgcaattcatgaactaaaagtgccaagaccctgacttaacatcacaacccctacctgttcacttaagatgtatcattagccaaataatttaacaaatgttagggaacacagttaagatactactcataacagaggttatgctgactgtgtggagtttttagaaaattggaattagatactgttttgtgttaataggagaaaaaaaggcatttcctttgggaagactcagtattatcttaggcaagtgtagaagtgtttatttctgcaatttcaagcacaytgcattgctgtatatgaaattccttgccactaaacgttatacttagcttataagagggtgattctggttacaggaaaggggtcccgatccagaccccaagagagggttctttgatcttgcaccagaaagaattcagggtgagtccacagtgctaagcaaaagcaagtttattaagaagtaaagtggtgaaaggacagctactccatagacagagtaggacgttcctgaaagtaaaaggaggcacgcatccaccctaggtacaatgctggtatatatggggagatatagtctgctacaagggtttgtgatagaggattaattttcctaattactatattttgcaagaatcgatattattatcttcaaagcaaaattaggaatgtctttcttcttcagatatcgggatatctggacactcccaagtcggggtctgtttagtaaacattattaatttgttcccttaactgtgaacatctagaggctcggaatgcctacctttctgaagatgcagcccagcaagtcatggccccattttcccagcccttattcaagatggagtcgctctggttcgaatgcccctgacatatctccctgcttcctttacaagaggaccttaatcctaagggttgcagagggatgaagatccgtcttctgtaacttcttcaggctgaataggggtgatgatattcctgcctaactatggtgtcttgcatttagggtagagaggagctcagtcagagagcgttggtatggcgaaggtcgttcataactgcgagttccgacaaaaaaaatcttccaatatctggaagattaataagtgtccaatttaagaaagtgttgaatgaacttgtcttgtattcctgcacaaagagtacaactgcaatatatcccacaaaagcaaagtaaaataagtaaaatcattcccaagtaaactaaacagaaaggctttccaagaactgggcagctgttggaaccaagccgatatagggtcaaccaagccgatagcgtatcaatggcagaaatatgagtgtctaaagctttcatagcttgggtgatattatttgaatagtctggaacatacacacagcactcggctttgatcaaagcacaagttctccctcaagctgctgttaaaatgtccacatacccaacagtttggttatgtagagaggctaaagtctgtgcccactcagtaaataagttactctctgcctgattccaacttatattccaaagtagaatgccaatccatatctttaggttacccatccctttcatttcttctgaacaggagtcgaaggtcactgattggctcacaggaataaacaagatcagtctcttgtgttccattggcctgtgggacttcataagaaatgagtttaattccagataagcagacccacctgtttattcccagaagtttaatggcaattggggtactaaggagaacttgatagggtcacctccattttgaggaaagttgacctgctggggatccttccttccaagtttttaataggacccagtctcccagctgtgttgtaacaagattctcttccttaggaggggaagggagtctttgayttccatattcaagaagtgtgttttgcacttgtcccaagttgatcacataactctgtagcttgaaagtatctatgtctattaggaggtctgtagttaagaaaggactttcatccattatttcaaaagggctgagctgcagatttcccttaggggccactcgaacccttaataaggctacaggtaataaagacagccaggtttctgatgtctcttggcaccgtttagcaagagtcctctttagagtttgattggctctttccactttccccaagactgtgacctccatgccaagggaaggcggtcctgaattcctaaggctgaagatatgttttgggtaattgtcgctgtgaaagatgggccattattgttctgtaagcgcttaggcagcccaaatttaggaattatttcctttagtagcttagaaacctcaattgccttttcagaccaggtaggaaaagccttgatccaaccccaactggtaaaggtgtcaatgaacactaataaatatktaaatattttacatgggggcatctgggtatagtctgtttgccaatcttcaccagggtatgctcccctgtgctgaacaggccttactagaggaggaggtgaagactggttatttgggttattccaggcacatagttcacaggccctagttaccggctttactgttttaagtaagcctttacgtataaaaagcttttttcctataaaaagacattaagtgaaacagggaagctcttcccaaatgagtagagtcatgcaactacttaactgttttccactgattagcacctgatattaacagtttgctgtcattgacaagccagccagaaagctcttgaattaagccctgacctttagcccattcttgttcctcttcagtatatctagggtctgtcattgccgtggctgagggtacaaacctgccgacaagtccaactggctcctttaatgctgctgccttagcagctgtatctgcaaaggagtctcccttagccacattagagtctcctttttgacgtcytctgcaatggattacagctacttccttgggcagcaaaacagcatctaatagatttagaatttctaagtgatgttttacaggagaacccttagcagctcagagtccctgttccttctagatagcagcaagagcatgaagtaccagaaaggcatacttagaatcagtgtaaatgttaactcttaaatcttytcttaattgcagggctctaataagagctattaattctgccttttgagctgaggtagaagctggtaaggcctgagattcaattacctcatgttaactgacaacagcatacccagctttcctgtttccctggtgcacaaagctacttctatctgtaaaccattctacctcaggattatctagaggctcatcctttaaatccagacggctggagtaaacttgctccataacttgtatataagaatgatctagggtgcctgtgggtttaggcaaataggtagctggattcaaagtttggcatactttaagtgttatataaggagcatctagcaacaaagcctgatatttattcacagaaaaagagaaggagcaatttctgtctgttgagatttccaaaagatactactgtctgcagctaacaaatcccttcctaacraggggtgggccattcaagagaaaaccaaagtccttgaagagcagcttaaaggataggtaaaatgacatctatgggcttttccatctattcccctgaccatacagttttggggtaagagaggcccattataatgggtcaaaacagaataagcactccagaaggaggttaatattcttacctgccatgtcattggttacccaaggctcctctagagatatgcctagttgtccaatgggagctgtggtggaagatctcaggccccatcactcttggacttgcctggctatttcggccatcattggttcagatgccagtagctcccttctaagcactgggcaatccctcttccatggccagttttctaacagtgtgcccaaggcatgaatttcttataattcatgcccaaggcatggtgactcagacacccagatttggctttcccacctttcagcttcccttgttcaggccaagagccaggagggcagccccatgtgggggatgagcttaaggatagagccaagagctgcaccttgtgggaagtccttcttgttctttctgcctcctctgctttgtccctgttattaaaaactaaaatgccatatacaagagctgttccatagaagtatggggacccatagctgctttttatagcttcctatggatatcaggggaagactgggttataaaatgtactcccaaaagggtctgtccttctcttgaggtaggatcagtgttagtatatttcctgatggcctcaactaaacgcccttgaaayaaagctggattcacatctttgccctgagaaactttcttaaccttctcatagttaacaggcttttgcatacattccttcatcccttccaaccaacaagtgaccacataatctctcctccccaagtcctgattgcccctttgatagttccactttgggtcttgatctggaactgcaatacctcttgcctgatagtgtatattatggtttgggttgtgagccaatacctcatctgcatgggtcctagctgtccccaaaatgtgttgtttctcttccactgtacaacacagagacaacaaaacatgcagatcctgccaaggaaagaccccttctgcttgagaagaggagagaaaagaatgagtgagactttattttgcagcttatgtaccagcttgaacgcagtggggaagagcatcaagtgggctcttggggtcccagattgcaggctttggttattggatgacatttctgaacctatcctgacccagagggaatcctabtgtcctgaaggatgagttctgggcctagcagcattcaccacaagctgaatgaagaaaccttgggccttaagaaaacattggaggtaccctggtagtacttccataagcattaagaccatccaagaaaacaagactaatatggtttggctctgtgtccccacccaaatcttatctcaaattgtaaaccccaagtgtcaatggagggacctggtgggaggtgattggattatgggggcagtttcccccatgctgttctcatgatggtgagtgacttcccacaagatctgatggtttaaaagtgtctggcagttccccctccctctctctcctgccaccttgtgaagaaggtgcttgttttccctttgccttccaccatgattgtaagtttcctgaggccttcccagtcatgcagaactatgagtcaaataaacctcttttgtttataaattacccagtctcagatagtatctttatagcagtgtgaaaacagactaatacaatgacttcaccaaacaaactgarcaagaaaccaggcaccaatcccagagagacagagatatgtcacctttcagaagcagaattcaaaatagctgctttgaggaaactcaaagaaattcaagataacacatagaaagaattcagaattctatcagataaatttaacagagaaatttaaaaaattaaaaagaatcaaacagaaattctggtgttgaaaaatgcaaatgacatactgatgaatgcatcacagtctcttaatagcagaattgatcaagcatgagaaacaactagtgagcttaaagacaggctatttgaaaatagacagaagagaaaaaagaagaaaaaagaagaaaayatgactaaagttctggaaaatagcctcaaaacggcaaatctaagagttactggtcttaaagagaaggtagagagacagaggaatagaaaatttaaagggataataacagagaacttccaaacatagacaaagataccaatattcaagtacaagaaggttatagaacacaaagcagatttaacccaaagaaaactacctcaatgcatttaataatcaaactcccacaggccaagggtaaagaaaggttcctaaaagcaggaggagaaaagaaacaaataacatacagtggagctccaatacatatggcagcagacttttcagtgtaaatcttacaggccaggagagagtggcataatatattcaaagtactaaagaaaaaaacccttttaccctagaatagttatctggcaaagatatccttcaaacatacaggaaagataaagactttcctagacaagrgaagctgagggttttcataaataccatatctgtcctacaagaaatgctaaaggtagttcttcaatctgaaagaataggacattaatgagcaataagaaatcatctgaaggtacaaaacttactagtaatagtaagtacacagaaaaatatagaatataataacattgcaattgtgctgtgtaaactactcatatcttaaatagaaagatgaaagcatgaaacattctaaaaagctacaacaacttttcaagacatagacagtacaataatatataaaatagaaacaacaaaaagttaaaaagcacagagatgcagttaaaatatagagtttttattagttctctttggcttatctgtttgtttgcaatcagtattaatttgtcatcagcttaaaataattggttataatatattattcgcaagcttcatggtaacctcaaatctaaaaacattcagcagatacaaaacaaataaaaagcaagaaattaaaacataacatcagaaaaaaatcacctatactaaaagaaagacaggaaggaagtaaagaaggaagacaaaccagaaaacacataacaaaawggcagaagtaagtccttacttatcaatacaacattaaatgtacatggaataaactcatcagtcagaagacgtagagtggctgaagggatgattaaaaaaaaaaacaagatccaatgatctgttgcctataagaaacatatttcacctataaagcacacacagactaaaaataagggatagaaaatggtatttcatacaaatggaaaataaaaaaaatagagccaggaatgctggctcatgcctataatcctagcactttgggaggctgaggtgggcagatcacttatggtcaggagttcacgaccagcccagtcaacatgcaaaatcccatctctactaaaaatacaaaaaaaaatagtcaagcatgggggtgtgtggctttagtaccagctgcttgggaggccaaggtgggaaaattgcttgaacccaggagacagaggttgcagtgagctgaaattgctccactgcgctccagcctgggtgacaaagcaagtctctgtctaaaaataaaataaagtaaaataaaataaaataaaataaaatagaaatagctatacttacacaaaatagacttcaagacaaaaactatataaagagacaaagaaggtttataagtgcctacatcaaaaaagaaggcaagcttcccataaacaacctaatgatgcatactgaagaactagaaaagcaagagaaaacaaaaccaaaatttagtggatgaaaagaataataaacatcacagcagaaataaataaaattgaaacaaaacaattcaacaaatcaatgaaataaaaagttggctatttatgatgataaacaaaattgacaaatataaaaaagagagaacacccaaataaataaaatcagagatgaaaaaggataaagtataaccaatacagcagaaattcaaagaatcattagaggctactgagaacaactacataycaatagattggaaaacctagaagaaatagataaatgtctagacacatacgacctgcaaatacattaaaccataaagaaatccaraacttgatagaccaacaagaagtaattagaagcagtaactaaaaagtctcccagcaaaaaacagctgggacacaatggcttcacagttgaattttattaaacatttaaagaactaataccaatcctatttaaactattcttaaaaatagaggcagaaggaatccttccaaactcattctatgagcacaatattattactctgataccaaaaccaaacaaagatgcatcgaaaaaagaaaaaggaaggaaggaagcaagcgagcaaactacaggacagtatctctgatgaacactgatgtaaaaaccttcaacaaaatactagcaagaataattcaacaacacatttaaaagtccattcatcatgaccaagtgggatttatcccagggatctgaggatggttcaacatttgcaaatcaatcagtgtgataaatcataccaacacaatgaaggaaaaaaaattacatgatcatttcaattgatgctgaaaatgcattggataaaattcaacatcccttcatgacaacaaccctcaaaaaattgggcatagaaggaatacatgtcaacataataaaaaccatatattatagacccacagctagtactataccaaatggggaaaaactgaaagcctttcctctaaggaaaaaaaaaacaaaacctagactccaccaaaaaactattagaactgaaaaacacattcagtaaagttctaagatacaaaatcaacatgtaaaaatcagtagcatttttatatgccaacggcaaacaatctgaaaaagaaattaagaaagtaatcctatttatgataactacaaataaaataaaatacctaagaattaagtagagaataataagatcactatgatgaagactataatacatcagtgaaagaaactacagaggacagagaaaagtggaaagatattccatgttcatagattggaagaatcaatattgttaaaatgtccatactactgaaagccatctatggattcaacacaatgcctaacaaaataccaataacattcttcaaagaaatagaaaaaaaaatcctaaaattcatatggaaccacaaaagacccagaaaagccacagctgtcctaagcaaaaggaagaaaactgtagaaatcatattaactgacttcaaattatacaacagagctactataactaaaacagcatggtactgggataaaagcaaacacagaaaccaatggaacagaatagagaattcagtaacacatccatacatctacagtgagctcatttgttacaaagatgccaagaacatacaatgaggaaaagacagtctcttcaataaattgtgctgggaaaactggatatccatatccaaaagaatgaaactagacccctatctttcaccatatctaaaaattaaawcaaaatggattaaagacttaaatctatgtccttaacttatgaatgtactgaaagaaaacattgtggaaattctccagaaccttggactgggcagatttcttcagtaatactccataagcacaggcaaccaaagcaaaactggacaaatagatcacgttaaaaagcttcttcacagcaaaggaaacaataaacaaagtgaagagaaaacccacagaattggagaaaatatttgcaaattacacatctaacaagggattaataaccagaatatataaggagctcaaataaccccataggaaaaagtctaataatttgatttaaaaaaatgggcaaaagatctgagtagacatttctcaaaagaagacacacaaatggcaaataggtgtattaaaagctgatcaaccagagaaatgcaatgctacaatgcaaagctacaatgcaatatcctatcaccccatttaaaatggcttttatccaaaacacaggcaataacaaacactggtgagggtgtggagagaagggaacccttgtatactgttggtcggaatgtaaattagtacagcactayggagaacagtttggaggctcctcaaaaaactaaaaatagaactaccatatgatctagcacccccactgctgggtatatacccaaaagaaaagaaatcagtatatcgaagagatatctgcactcccatgtttgttgcagcactgttcacaatagccaagttttggaagcaacctaagtgtccatcaacagctgaatatagataaagaaaatgtggcatatacacacaatgtagtactattcagccaaaaaaaaaaaaaccaaaagaatgagatccagacatttgcaacaacatggatagaagaggaactcattatgttacgtgaaataagccagtcatagaaagacaagatgttctcacttatttgtgggagctgaaagttaaaacaactgaactcatggagatagagagtagaatgatgttaccagaggctggaatgggtagtgggtggatgggaggaaaagtgaagatggttaatggttacaaaaaaatagttacagccgagggtggtggctcacatctgtaatcccagcacttcggaaggctacggtgggtggatcacctgaggtcaggagttcgagaccagcctggccaacatggcaaaaccccctttctactaaaaatacaaaattagctgggtgtggtggcatgcacctgtaatcccagctactcaggaggctgaggcagtagaattgcttgaacctgggagacagaggttgcagtaagccaagattgggccactgcactccagcttggtgacagagcgagactccatctcaaaaaaaaaaaaaaaaagttacaaatagttaatatgacctagtatttgatggcacaacagggtgactatagtcartagtaatttaattgtacattttaaaatatctaaaagtatgattggattgcttataatataaaggataaatgcttgaggagatagataccccacttaccctgatgtgattattatacattgtatgcctgtaccaaaatatcccagaaaccccataatacatatacctactatatacccactgaagttaaaaataaaattcttttaaaaaaagaaccatccaaaattaccccggtgatttgtagaattttaaaaaataaatcaaattcctcttttccctcttttctgctactcttctctcagtacttacttcccatgggtatcaatttctaccaccagaaagggaagcagcacacattgctttaaattaagaactctgtaatatcattatgcatttaatcagaaaaagtcactgaagtgctggcgtagaaagagcagytggatatatggggtaatagatgtctctttaagaaggtaactgtcagtgcatggggatatgtcatctgttcagcacaacatgaccctacaaagcaacatacagtaaataccaaccaaatgttacagcaattggttgtaggttagtatggaaaaaggagagtcatgtggagctggaacacatgaggaggataacagagggtgtagggtggaagacactgcttgaggagggagctagacataggataagatgttcagtttattttatatgctagcaatccaagggacacagatgtttttctttataataaatgcttttcccaagttctcttccatttgtttaaatcttgattttattgtcctgtatttcaaagacatgatctcaaatttttagttctgagaacaaaagtctttataactcaatagaggaatacctttgctcttgatcctcatttaaaacaatgacttttgttactatatggatggctatgttttgtctttattatagtcctggtcacttgtattagtttgacttattttggtaagatattaaatctatctctggtcttctttcatcaaaattagtcagctgtttttgacaagctgaagcacacctgaggattgaatagtcccactgtytgaaatccagactaaagtagcagttttctaaattaggcatattttttctgaagagcctttaagaaaatgagagaatgcttagataatttgaaatcctgtggcatcaattatgaatttatttctggggcatggctatttgattatggaaaatactgaggtgcctgtgcttacagaaggatattggcacatttgttttataacatttgctcaaaagctgaaaattcaaatcctttatattccatttgatatcataaagctggtttaccctccaggcgtagggtatattttttttttttttttttttttttgagacggagtcttgctctgtcacccagcctggagggcagtggcgcgatctccgctcactgcaagctccgcttcctgggttcacgccattctcctgcctcagcctcccgagtagctgggactacaggcgcccgccaccacgcccggctaatttttttttttgtatttttagtagagacggggtttcaccatattagccaggatggtcttgatctcctgaccttgtgatccgcccgcctcggcctcccaaagtgctgggattacaggcgtgagccaccgcgcccggccagggtatattttttaataattacatttgtttaagtcttttctgctgacaaacttgtcctgattgaatttttgaatttttacagtcctttctttctctctctctttcaatattatctgatcatcaccactgttaccaacctccataaaattgctggttcaaaatttaaaagagccctttaagggagcaagctgagtagaatgactcaggaacccaacaacagagatttttcagctttgcaaaattaccaaatccaaatctactttcatagttttttcaccagagcaaacatccattttgtgactttttttacaaacactttgaagaagccagcttcacctgaacggcggggataggcccatgtcaggcacttttcttttctccccacctgcatccccactcccaacagcctacagggagtcttcccagagtgtgatttcaataacaagccacttggtgactctcaggtacaaacatgttgctatttaaaagctgccagtcagtctcattttgtggagttgcaaatccaggaggctggatctgatttctcctgctcacctttgctggcacaggagactctctgctgtgtactatcacactctacaatggccaactaggtcatttgacatcctagtttctgaattctgagcactaggaaacactcttttttcacacgagaatgagtacataacttcctatcatgggaaactaactttcaaaggacccgtgttacatattacccatgtaatgctctaagttataatacagtccataatcatacctaacacggtcaccgaggtaccagttaaaaaaggaagcaaattcctgatcagggtccagttctctgtattacctctgtgtgctatcattaggggaaatcggcctcttcttatgtgcagaattagcaattttagcttttacttgcagcttccgttccagattgcgagtttcctaaaggactgtgtctctgaacttctacagatgacattactctctagaggacaaaagtgtgaacacagaacatacccgagtgaaatcaaatgtcaacttctaaaagtgttggatgaatcaagtacaacctgattcagagagaagagacagaaaatgaatgactttttccaagagaaattactatagccttgctgggtcatctgagtgtctctggctactcagtagaattgcttcatttgattcctttagaaaaagatcacctgactggaaggcaaaatctgtgaaatgcacctcccagctggggaataaaaaagacattgcagcaaggcagatgttattttggtgagaacagttaagtattaagaattcagtctaaccacagagtagctattttctcatttgcaaaatgtatataatgctttaaagtcctttctatcatatagacagtcatatgtattattacaacatttattttatttttttcacagcctgaattcaccataaacaccttgaaatccctcctttgaataaccaaatgctcctcaaaagattacggtcggccgggcagggtggctcacacctgtaatcccagccctttgggaggccaaggccggcagatcacctgaggtcaggagttcaagaccagcctggccaatgtggagaaaccccgtctctactaaaaatacaaaaattagctgggtgtggtggcgggygcttgtaatcccagctactctggaggctgaggcaggagaatcacttgaacctgggaggcggaggttgcaatgagccaagatcacgccactgcacttcaacctgggtgacagaatgagactcactctctcaaaaaaaaaaaaaaaggattatggtccattgtaatgtgctacaaagctacagatcagaatcagcatggaagcttttcaaatacatgtctgttgagcttctatattttttcagtcacctcagaaaacagaaaaagctgagacaatagattcaattcaaaaagtgaagggaagaaatccctaaaatgacaaactgtatgatcaaatttagatgttgccttgggggttggggagggaagaactctcaaaagaactctggctaaaaatacattgtaatacaagtctataaaaaattcaaacttaatatcgcacatcattatattatatattcaactgcagagaaaaattatttacttttattctagaagacagaagaaaaaacgagccataaaatgtggtataggaagagccaaaatggtagactagatgcagccaagaaaagcatctctcaccaacatactagagcatcaagaagactggcacactgtgaggggacctttcgaaggatggcattgagaatggatggagggaggatgcagaccctggggtgaagggagagcaagctggaaatcttgcatgggactgccaagcaccagtactcattcttggcccccagcagctcctggggaagaggtgagttaaacaggtgtggagtggaccattcttgccatggacctccagaatcctagcttcagaagactgcacaacccatggatattcagctgacagagattgctgcttggagaggtggcagggacagaacactagcctgagcagagcccagagagtttggcttgggaaagtcagagaatggctggggacacccgttccccaaggctctccatactcttcttggtggctttggtctttgctgactgtcacacctggacagagcaagtctgtcttgcccatggaacaagggcagtctgatctgagtgaaccctgtcttctagcctcccgtgtggtccctgcaagcccatgcccacttgcagcacagccttgaatgcccagatgggccatttcccagcaactgctgccagagctccttcaccagtagaccctgcttaaccaatggagagtttcagcagacaagccctcaccaacaggcacccagcagcagcctctccacacagctttgccaatgtacactccaccacaacgtcaccccaccactttgttggtgcatgcatgtgcaaacctcaccaccatgctatcaatggcatgcatatgcacaaaccttcccatcgtcaccccacccacagtatgctgtcttcaagagacccatttcacatgcaatgacatccacaggctcaaagtaaagggatggagaaaaatctaacaagcaaatggaaaacaaacaaacaaacaaacacagaggtggctattctaatttcaaaaaaaaaaacagactttaaatcaaaaataatgaaaaagaaaaagaagggcattacataattataaaagcttcaaatcaacaagaagacataactatcctaaatatacacatacccaacactaaagcactcaaattcatagaacaagttcttacagcagtgcaaagagacttagataaccaccctataataatgggagacttcaacaccccactgatggtattagacagataattgaggtggaaaactaacacagatatttaggacctaaattcaacacttgatccaatggacctaaaaggcatctgcagaacactctacccaacaacaatagaatatacaattctcctcatctgcacataacacatactctaaaactgaccacacacttggccatgaaacaattctcaacaaattcaaaaaaactgaaaacatatcaaccacacttccagaccacagcacaataaaaatagaaattaatactaagatgctttctaaaaatcatacaattacatggaaattaaacaacctgctcctgaataacttctgggtaaacaatgaaattaaggcaaaaatcaagaaattctttgaaagtaacaaaaaaaaagagacaatatacccgaatctcacgcctaaggcagtgttaaaagaaaagaccatagtgctagatgcccacatcagaaggtagaaagatctcaaattaacaatgtaatatcacacctagaggaactagaaaaacaagaacaaaccaactgcaaatctagcagaagaaaagaaataaccamaatcagagctgaactgaacaaaattgaaacgtgaaaaagcatgaaagatcaacaaaccaaaagtttttcctttgaaagaataaataaaactaacagatctctagctatcctaacaaaaaaaagtgaggggaagctccaaataaacacatcagaaataacaaaggagacattaccattgaccccacagtaatataaaaaaccctcataggctattacaaacactttcatgcatacaaactagaaaatttagaagaaattgataaattcctagaaacatgcaacctcccaaaattaaaccaggaataaattgaaacactgaacagaccaataacaagtttcaaaattgaataagtaataaaaagcccaccaaccagaaccagcactggacaagacagattcatacccaaattctaccagacatataaagaaaagctggtaccaatactattccaaaaaaatgagggggaggaactcctccctaactcattctatgaggctagcatcattctgataccaaaacctggcagaaacagtacaaataatgaaaactgcaggccaacattcctgatgaacagagatgcaataatcctcaacaaaatactagcaaaccaaaaccagcagcacatcaaaaagctaatccatcacaatcaagccttcattcctgggatgcaagactggttaaacacatgcaaatcaataaatgtgattcattacataagcagaactaaaaataaaaactacatgaccatctcaatagatacagaaaaggcttttggtaaaattaaacatattttcatgttaaaaaccctcaacaaactagacattaaaggaaaataccccaaaataataagagccacttatgacaaacccacagccaaagtcatactgactaggcaaaatggggaagcatttggcttgagaaccagaacaagacaaggatgcctactctcaccactcctattcaccacagcactggaagtgctagccagggcaatcaggcaagagaaagaagtaaaaggcatccaaacagggagaggaagtcaaactatctcttcctagattatatgattttatacttagaaaccgtacagtatctgcccaaagtctcctaaaactgatcaaccacttcagcaaagttttgggatacagaatcgatataaaaaaatcagtagcatttctatataccaacaatgtccaacctgacagccaaatcaagaatgcaatcccactgacaataggcacacacacaaaaataaagtacccaaaaacacagctaaccagggaggtgaaagacctcaacagcaagtattacaaaacactgttgaaagaaatcagaaatgatacaaacaaatggaaaaacattctacactcacggataggaaaaatcaatattgttaaaataactataatgtccaatggtatttatagattcaaygctatttccatcaaacttccaatgatatttttcacagaattagaaaaaactattctaaaatttatatggaaccaaaaaaagaggctaaatagccaaaataattctaagcaaaaagaacaaggctggaggaatcgcactacctgacttcaaactatactacaaggctacagtaatcaaagcagcattgtactggtacaaaaatggacacatagaccaatggaacaagttagataacccagttataaatccacacacctacaaccatctgaactttgagaaagctgacaaaaacaagcartaggaaaaggactccctattccataaatagtgctaagataactcgctagccatatgcagaagactaaaacttgaccctcgccttttatcatgtgcaaaaatcaactcaggcagattaaagaatgaaatgtaaaccctaaaactataaatccctagatgaaaacttaggaaacaccattctggacataggtcctggcaaagatttcatgatgaagactctgaaagcaattgcaataaaaacaaaaattgacaaatgggacctaattaaactaaagagtctcagcacaacaagaaactatcaacagagtaaacagacaacgtacataatgagagaaaagttttaaaacctgtgaacctgatgaaagactaatatccagaatctaaaaggaacttacacaaattaacaagcaaaaaacaaacaaccccattaaaaagtgggcaaagaaaatttaagacctcaaactatgaaaatactacaagaaaatactgagtaaaatctccagggcattggtctgggcaaaaatttcttgagcaataccccacaagcacagacaacaaaagcaaaaatgaacaaacgggatcacatcaagtcaaaaagcttctgcacagcaaaggatacaatcgacaaagtgaagagataactcacagaatgggagaaaatatttgcaaactacccatctgtcatggaattaataaccagaatatataaggagctcaaacaactctataggaaatatctaataatccaatcaaaaatgggcaaaagatttgaaaagacatttttcaaaataagacagacgaatggaaatcaggcatatgaaaatgtgctcaacatcactttgagcaaataaaaactataatgagttatcacctcagttaaaatggcttatatccaaaagacaagcaatagcaaatgctgacaaggatgtggaaaaacgggacatcttgtgcactgtgggtgagaatgtaaattagtacaaccactatgtataacaagtttgtaggttcctcaaaaaactaaaaacagagctaccatatcatccagcaatcccactgctgggtatatacccaaaaggaaggaaatcagtatatcaaagagatgtttgcactcctatgttttttgcagcactgtttacaatagctaagaattggaagcaccctaagcgttcatcagtagatgaakgcataaagaaaacgtggtatgtatgcacacctgagaactattcatccatgataaagaatgagatcctgtcatttgcaaaaccatggttggaattggagatcattatgttaaatgaagcaagccaggcacagaaagacaaacttcacatattctcacttatttgtggggtctaaaaaaatcaaaataattgaactcataattatagggagtagaaggatggtgaacagaaactgggatgggtggtggggcctgggtcggggtacttggggatggttaatgggtacaaaaaagtagaaagaaataagacctagtatttgatagcacaaggtgactatagtcaataataacttaattgtccactttaaaataactaaaagagtgtaactggattgtttgcaacacaaaggatgaatacttgaggggatggataccccattctccatgatatgattatttcacattgcatgcctatatcaaaacatctcatgtaccccataaatacatacatctactatgtacccacaaaaaattaaaaacataaaaatattttttaaatgagcaaaggacatgaacagatacttttcaaaagaagacatacatgcagccaacaagcatatggaaamattctcaacatcaatagtcattagagaaatgcacatcaaaactacaatgagataccatctcacaccagttggaatggctattcttaaaaagtcaaaaaacaacagattctgttgaggatgcagagaaaagggagcacatagatgttgctggtgggaatttaaattagttcacctactgtggaaagcagcttggagatctgtcaaaaaacttaaaacagaactaccatttgacccagcaatcccattactaactatatatccaaaggaatagaaatcattctaccataaagacacacacatgcatattttcactgcaacactactcacaatagtaaagacatgaaatcaacctaaatgcttatcaatggtagactagataaggaaaatggggtatatatacacactggaatactacacagccataaaaagaacaaaatcatgttctttgcagtaatgcagatacagcaggaggctattgccctaagtgaattaacgcagaaacagaaaatcaaatactgtatgttttcacttataagtaggaactaaacactgagtacacgcggacaataagaagggaacaatagacaccagaacctactggagggtggaggatgaggtttgtaaaactagctgtcatttactatgcttattacctgggtgacaaaataacctgtataccaaagccccattgcatgcaattttcccatgtagcaaacctgtacatgtacccccgaacctaaaataaaagtcaataagataaacaaaatgtgatatgtatacacacaatggaataccattcagccattataaacaataaaataatgtcttttgctgcaacatagatggaactggaggccattatcttaagtgaaacaacgcagaaacagaaagtcaaataccacaagttctcacttataactcgtagctaagtaatgtgtgtacatgaacctagagtgtggcatgatagacattagagacttgggagggtgccagggtgggagaggggtgagggatgagaaattacttaacgatcacaatgtatattactcaggtcatggttacactaaaaacccagactttaccactaagccatatactcatataacaaaactgcactcgaaccccttaaatttatacaaattataaaaaaattaaaaacaaagaaaaagtaaaacaaggcctaagtagttaggataagaaaatttgcatgtatcctaagtttaaatcaatgccaaaaggcattaaggaagaaaataatacacacatttaagtcttaacattaatacaaacccttgytttctaattcaaaaggagtattttcctttaaatgaaaatgatgtgatagagcacatcatttattaatcatatcaaatattaatggctgagaattcataagtagtagacattttagaaacaaacagtctagcgtccagctaagatgcctctagagatgcattatggtgaggcaggactcagacctaaaataaaaacaaatgtctcaaatagattgttgaatagacatttgcaagaaaaataatttgtaaaatgtctatctttttacattatgttggttaaatacttttctatctattaaaggcttatttattttcttcttgtttactattaaaacatgtattttcttgcaataaaaataaactctggttttaaaaagaagagctggcaaagaacagacagtattacctatggttcaaaatgttggtaaattactgaatccagccccaactttgaaacttgtgaaactgtccttgaataactgctttggaggcatattcaggagcaaggtatctgtgaacctctgtcctggtgactaaatgtggaaaagtttttattccgtctggaagcagaccaacagagagccctaaatagaagcagcttaagggcttaaaagactccataattaggcctctgcttcatctaaatgcacatgacaaacttcaggaattgttgaaggtctgcctctttctacccccatcagtggaattggagccagcttggagttgaaaaactgaggctgcaggctcagaacaattatcacctgtatggccatgagcgaagcaccttacctcccttaactcacttgtcttacagtgttgatttcaagctcaaacgccatcacgcctgtggcgtgtaaactgtgaagtgatgagtagcatcactttggaagtgaaatttctacaaaccataacatgtaagcagagctactgccagcagggccagtaggttggagtgaatttgcagtcctgatgatcaattgaggtaatgagagttatatctacactctgctcagattcaaatgtggcatgcagggttttcagagcaatcgttttctcttcaaagtccttcacaatgggaataaggcactactctgacaatcacagccactggcatcgggtgatctcaattcactccacagtgatatcaaaattgctgtactactctgaatgcactagacaagctggtgctgcaggactgtgcagaatttgcaggcacaaatggttagaaacagcagctgggagttaactctaatcgtgatttaacaccaattaataatggtaattttcataatcctattacatagggcttattgccaaagttatcaaagatattgtgtgtttttagataacagtgattattctggtcagtgatgataaaaactgctgggcagcgtgacagattcacgtttcattcattcatttaattatatagcagactctattctggccattgacaataaagtattacagaaaatacctactgtatggagctcattgtttagttgaaaaatagaaatgtaaataagaaaccaaagtaccataatcagtgttatgagagaagtaaacatagatactacgtactatttgagggttttgtggaaactatattatcttttgttgcaagtgtggacaatgttttagtaatgtcttttccacagcatcaagaattgatggattcgtggaacaaacgggctctactattttgtttagctaatataccattgtggggagggtgggtgaagaaaagaaaaaaaagtagttggaacacccattgtcactcctagaccatttcttcgaagatgctcgtattgctactgaaatagatgcaatctgygacacatgtacaccaagcaaatactttatgcctgtttgatatccaattccagtatgtttttcatttacaaaagatcattgctactgagaagcttcattgatcacagaaaaaaatgacattttgtgctgctggattcaccataatatgaacgttttctggaaagaaaagcattattgagttctgagcctgtgctaatgccagagtgaacccaaaccactatttcttaccactggaacatcaaaatacaggattgctactacgcttctccataacattgccagctggcttcagttgatctctactcaagaacagtgccatctgtagaaaaggacagtggctttttagggttaaatggaatctacatgtacctctatgttctgtttttccattttacaattcggattgatcatgcctggggacttttttctaagtttacatagcaatccttcttaaatcactgtagrgcagcaagaaaaccttgctggtattgataattatacattgcccagaagttataaaaatcagcactgaatgttgttgctgctgctgctgctgcacatccatccccagtaatgttayactccagctgtaagttttgattttaacatattttcaaagtcatttcttcacatttaacttaaaatataaaacttggttgttatagactgaatgtttatgtctcccacccgcaaattcatatggggaagccttaacctctagtatggctgtatttggagacaaggcttctgagaaagtaatcaaggttacgtgaggtcataatgatgaggctctgatccaataggacttgtgtctttataacaagagactcgagagctctctcactctctcacacacaggcactgcagggatgccatgtgagcacacagtgagaaggtggccagtggcaacccaaggagagaaacgtccccagacaacatccctactgcaccttgattttggacttctaacctccagaactgtgagaaaataaatttccgttgttgaaactactcagtctatggtattttgtgatagtaagccaagcagactaatacaagggttaaagaaatattggcaaggggtacmagactaacctgtgcattgaactaagtggtatagagatgtttaataaaaatgagtctaggccaggcgcggtggctcacacctgtaatcccagcactttgggaggccgaggcgggcagatcacaaggtcaggagatcaagactatcctggctaacatggtgaaaccccgtctctattacaaaacaaaaaattagccgggcatggtggcaggcgcctgtagtcccagctactcgggaggctgaggcaggagaatggcgtgaacccgggaggcagagcttgcagtgagccgagatcgtgccactgcactccagcctgggtgacagagcragactctgcctcaaaaacaaacaaaaagactctaaactagaaactatggagctaaaggaagataagcctctgaagccacaatggaagcaattctttgagaccactactaaaggatgtcagtttgacatcatttttatcaacatccaatgggccccactccatgacaatagtaaaggtattagaactctagagccatttgcttagaaactttaattacaccagtgacaaaataagcagagtcatggagtgaaaagacaacacttctctggccatgatcactcaatctggaaccacaagagggtttatacccaccgatataacatagacatggtatttaaaagggaaacccgcttgattatataattttagcctgtattaacatggttcaatcttagttatttttttctttttcaaaattcagtttacattcttcttttgcatttttggaattggctgcatagtaatcttctgttagttttcagccctaacaacaacaacaaaaaaaacacattctctacctgctaccaaacaagtctcagatttttccagttctatatgaaaatattcaattttgtattttctttttctccttcccttcctttttttttgattaactaatatttttagtatacataatttagtacacatttggtggtaagcttgtcaatattttttgtaacttctaatataaaagtattaatatctttttaaaaataacttaagatacaaaagtgaaaaagtagcaggcgggccctgtggctcatgcctgtaatcccagtacttcaagaagctgagatgggcagatcacctgaggtcgagtttgggaccagcctggccaacatggtgaaaccctgtctctactaaaaatacaaaaattagccaggcgtggtgtcgtgcacctgtaatcccagctactcaggaggctgaggcaggagaattgcttgaacctgggaggtggaggttgcagtgagccaagatcgtgccactgcactccagcctgggacacagagtgagactttgtctgaaaaaaaaaaaaaaaaaaaagtagcagtttttttaatgtgagaatttttatctttctatgtatttatactaaccagtacagcagtattgacatgttaacagagagtatatcagaatgcagtattatcagcaagacaatattactaaattcagtaacacttcttaaacaatactcatatgaaagttaaatgctttcactaaaatgagatattttacaatgcaggtgacagatatgctgtggccacactagacgtattggttcatgcccagattgagagtcctgtccactgactctgaacactgcttattgcttgttttgttttggcttcactattagttttatcctgaaccacagtatgaaaaactaaaatcaatctatgaatcacatgcaaattgatgccacatattatccttccctattaaaaatgaacacaatcaagtattggattttactgacaatcttcttcgaaatgcttttattctaggttaaatagtagaaacactgccagcatgagcttccaaggactagattccagtctcagctctaccactaactagctaagtgaacttaggcaatcacttaatttcttaggtctgaatttttctcatctctaaagaaaataaaatgaaattggtgatatacaagacgcatccttgttctagattatttctctatttgaaatgaaatcctaactcctgtgtccttgtcacctcctggaatccttccctgtttcctccccttgracaaactgaattcatctcctttatgccgcctgtgtactgagaataaccctctcgtagcacttatctgactcatgatctctcactagactggagcctcctggaaagcaggcacctggtcttttatgtccacaaccccatgttatgtgttatgggctggatggatgcatggctatatggtgagccagccaatactttctgtgccacacttcaacaaagtgtctcatgagaagacgtatagaaacagcaaataaaattcctctcttatcctatttaaatagtcaatctggagaaaaatatgttcttgctatcttgaaagtgaagaaaatattcagaaataatttaaaatctcaggcatgcttattgtagccagcagtattcaygtaacatatattttaagtttcaaggaaatgaaattcgcttgactgccttatggacaaatataacacttatttttaaatggttcattctcttttactcataaaacatactgtctgtaggtttcagtatcttttatggaaaaaaaggttacaatgaaattaccaatatatctgctgatttgaggacctttgaggatacagatttcctaccaacctttatatatggagcactggttaccctcaagtccataccaaggtcagacaatccactargcagattcacagaattctgcatatcatcatattcatggttatgactattgcagcataagatacaaagaaaatttagcaaagggaaaaggggcatgggcaaagtctgggggaagccaggcacaaacaagagtatgacaacacacgagaaatgctgtcaaccagggaagttcatgaaggacttggtgcttctggttttgtactggagatggtcacaaaggcatcttttcctgacatatgccaaaattccacacttcgggaaggaaagttgatattcagcatcaacccaccttgttagaacagacaattaaggcacagagagctactcatcagttagtggtgagagtcccccgaaatcaagttcacaagagccagctttataagcaagtctttcaaaggacaatagtcatacctgccaggttaactcttttttacacaaatggtaaaaatcattgtgcaacaaataggtaaaatgggaggaactgtaatattaactttaaaagtctaataagaagtttttaaaatgtaggtgtcacctgtgttacctttttatgtgtgtgtcaaagaaggtgtgttgcttactttctttgatgtatacctaagagctggtcatcaatttaatgaataccattttgtcattccaggaaatagcatcttgaattggttaaataaatacatacataaagtaagcaaatgagtcaactttcctctgcttctctctcatcccttttctgaatatgtttaaacttattggaaactacrgaattgtgttcttattattgaaaaaaaaaccccagcaggtccttctgctcaattcagtttagcttctgactctcacacatgggatcttaatctccagtagtctggcagagcctgtggacctctccttaaaagaattgctctaaatgcacaaaataaaatatgtaggattgcaaaggaaacatatattgaaatcctatcaaaatattttcaaataatttacagtaatctatgtacttctgtctagcagcaagtctaataactatcataattgttaaatagtaatgagcataaatggcatttcaagatatctttggcacatatgatatatgaaaatatccattaatataattgcttttggtacttctaataacactgtagttgtctagcaacctttccaattaaaggaaaagctaaatgtcagttagaaaatagataaaataaaatttgttttcatcaaaatgtccaggccccaggtaaaaatctcaggtttctagcaccatgagaccaggagttcattaactgattccatttagatcatgagctgttgaaccaatagcaagcaaacttattttgtttgaccacagaattttaaaaacaaatcaaatcaattaccaaacaaatgtgttttcccataaaaatgtgcttctggcctcttggagaaaaaaaaatatgaggactaagcaacactagcccagcatccccacaaggcaatgtcctaccagagtgagtaacagctgtctcgttcacagatgaaatgaactctccatttccacagtaactataaatcctgccttactctttcatgctatctgcctgctttgtgtagctacttcttattaatatttatggcattttccatctcataaccctctgaataggcagcaagtagaatagatttgctttctaataaaggtggggcgattctattcatatgcccactgttgtccccatttaacttcttccagtcctcttttttcaacaattaacacacttaaggcccctgggcagtcacctgattgtaagtaaagtaattgaaatacaatcttcctcatttctttatgtattatctacagctttgctattgactaagttttaccccctcaaaatccatctgttgaagctcttatccccaatgtgatggtatttggagatggagcctttggaggtaattaggtttagaagaggtaataaagttggggccagcgcggtggctcacacctgtaatcccagcactttgggaggctgaggtgggtagatcacgaggtcacgagttcgagaccagcctgaccaacatggtgaaaccctgtctctactgaaaatacaaaaattagctgggcgtggtggcatgcacctgtaattcctgctactctgtaggctaaggcaggagaatcacttgaacccaggaggcggaggttgcagtgagtcgagatcgcaccactgcactccagcctgggtgacagagcaaggttccatctcaaaaaaaaaaaagttggggccctcatgagtgacttggtgcccttataagacaccaatgagctagctggcttccttcccacctcccatctctctacctccccttcttgtctctcttatgtgggaacacagtgagaagctggatatttgcaagccaggaaaagaaccctcaccagggaaccaaactggccagtaatttgatcatacacttccyagcctccagaactgtgagaaataaattcctgctgcttaagacacccaatgtatcatattttgttatggcagtccaagctgactaagacagctgctttcatactacagtggaaaagttgagtagttgagattggcccacaaatccaaaattgtttactatctggtccttgacagaaaaattttccattccatgccgtagttgtttcatggaattctagttattcgtcaattcgtagaatttgatggaattctagttatagctctagaatttttacatagaggggcttaaggatgggtaggaagagctatattcgcacagtaagcatcttatttttccttaatggagatgaaggcaagcagctaaagaaggctcactttcctccttattgcagccatggaaagccacacactattcaaacctctccactgagccactggatacacatgtgtggccagaactgtaccatgccatggctgacaacttggattcaaaacctgctcccttacttagtaggaacacacccttaaccaatggctatgatagctatgagatatcaatagcatactaaagacatagttttggttatagaattcacaatgaatgttcattgcaataatttttacaataatagcaataagaacaaaatgttttcattaatagatcaattggaataaagtgaataagtgaatgagaaactataaattgttgacagtgtttctgtggaatattatggaaaagaaaatgtcagtggctttgacaagctaaaacaacatggtagtctaaaaaatacaggttttagaatcatagagatgaattcaaatgcaggccctgactcctaggttattagggaactagctgttccagtcttagaaacttaacgtcttcatgggtgaaatggagactatactgctctgtttgtgggtcgttgacatttaataagatattatatgtaaactatgttgaagtgcctggctatatacaacatgttctcagatggtagctagtattactacccattagataatattttctcaccacttatctttttcatgagtatattgtttctctgaaaataaagtgaaactgaatgacacccttttcctactatttgccaagttactgagacaatgcatcaagagcagagaggctagaattataaaaattgacaccagttataacaggaaacaggttgtgagggaagaaagccgcttggtgttactcagcaaattggcacccatggagacaggcayagcgtttctgggtcctgttgaaaaaccaacaacagttttctgtctctagcttgtcttcttatcagaagactgagtccacaccagtgtgcactcagctgtcacaaccaatgaatgcatgtgtgtatgtgtatttgtgtgtgtgtgtgtgtgtgtaagagaaaaagtggtgacagatgttctactggtgatctgtttccattgtccctccttggccccttgcattgcaaatgtgtcacttggttgtttgatattaatccctctgggcctgagtattctcatgtgatttgaaggaaaaataactgcccattttctttcacaggaatattataaacatcaagtcctgaggaatgtacggatgttggataggagttttcagtaatcttgcagtatgggggaagattttaaaatgcacattttagattgaagggaacttaaaactacagtcttccctcggtatacgagggggactggttccaggatcccctcacacasccagatccttacataccgaagtcctgctgtctgccctgtggaacccacatacaggaaaagtgggctcttggtatacacaagtttcaaataacacaaatactgtatttttcatctgcatttgggcaaaaaaaaattggcrtgtaagtggaccctcgtggttcaaacctgtgttattcaagggccaaccacactacaagagtcaactaccaaacaggttgccttgttgaagggaaatttgtcattgcagaaggcagagcacagaccaaaggagacattcctgcttaatactgaaagggactctgagctccctaacacataagtgagaaacttccacatttagttaatatttagcttccctttcccacattcatcattgccttcactttccactatttgtgtttgacataatattcacatctaactataggtctattgagcatacgtactctgtgcttaagtctgtgtgttctctacagctattcattctttctcacagattctggatgctccatctatttgataacaaamgtatgaactgaaaatgatgttcaagtatagatcaaataaatgtgatacagccagtacaaacactactcctgctagtctcatcctttcttggaaccctaagtaggaattacattgatttaattatgttcatttctatgttgctacagtatagacattaatttatctctttgctcaatttcttccctccctgttaactacagagaaggtttcatttaagcaggttatagaaaggaatgactgttatttcaaaatacttcaccacagacaggcgatcattttagataaaatcacttaagtgcagttatccaaacatgtatttcattcttggcaataaaaaagccttacccaatgcccaatgacctagaaaccagaactaggagatttcttcatgcaaattaaatttgtgtcacactcatcggctacaaaatggcagtgaaggttaaatgtgcggcagcagtgtaaaataaaggattcttatccatatttgtaggatgtgtcaatgcggctaattaatttttgagatagcgttctttgaaagagtaaactttgtgaattgattacgaaatgagaagtgcctaaagagagctgagaatgtaaaacaggcacccaggttgattaactttaccagctttaaaaaaatccatataaaaaggtaaaagacactggagttgattttatggcagtattataaactccaagaactaactacatcataatagagttcacagcttgtttctcttcaagtctgtttttcattttgtatcttaaatggtaaagattcaaatctttactcatagaaatagggtttttttccttaaaaagtaaacaaaatataaataaagagaaggaaaattatgccactttacattgatgggaatttagtgctgcaaaacaaaatatcttctctactcttcagctaatagagctgaattaattaatactctggacactaataagaaaaagcagacccagagaacatacccgtttcctcagattgcaagtaagagtgagattccttgagaaggagtttgcaaaagctgtataaaagtccaggactttgagcaaggcttcccgcttgatgatgtgtaggtcacagtacgtcagtgcccggacgttcgcacatgcatgggcaagggtggtttccttccagaagatgtctccaaatacatcacccttccctagaaaacagtataagatacatattcaagtatctaacactgttcttatttaatcactcttgttattcagtttcatatacagtattgaccttctagcataatttagagctgagggtataaccacatctataaacacataacaatacacaatgctttcatataatatgtaaagtaacatcaccctgaattcagttattgatgaaaatctggagtggcatgaataaatggatccaacagagaagccaaacacctcattttaacaaataatttcattatcttctgccaccttaacttttcctattttgaccagaaggagcaaaggtgacttcttagtttcatccttgcctctggtccttctggtaaagataacaaaatgcaatacagaaggatctgctgtaacagcctttataaatctagggctgatccaacatatattaaatacacattattcagtaactatgtattgtgccccaagccaattaaaacttgccacaacttagttccccaagaatgcccttccctctctacctagycaaccttatacaggttctcggagtccagcccaagagctccccatccacaattacaaagctgaaggacccaggttgagtaaaacatggagactcaaatgtattatcccatgaacagttctataaaaagtgctatactatcatcaaatgtagacgtcttttaaaaattctagaaatcacacaaaaatcacctattcacttcagagcactacccactggtggcctgaactcaaccatttatcatttgaaatcaagtacttagttgcccaaataaaaagaacgagaaagagtctaaggttaaaggtcccaaaaggccattctgccgaggcagttccataaaagcccctggtttctgaagtgtagtcaactgcattctttgttcaacttccacgtgaaaggaaaagttttaaagtgaaaaagacagggggaatatatccaggagggaaacatcttcctagaggcactctgttaatgatttattctttctgcactcaaaccacagaggtgagcaactatctgctgtcatcatgcagattaaaatcagaactaacaggaaaaaaaaaagaagaagacctttatcggggaatctgccccgatattcacataggttcttttctattttccccaagcatcagctggcttgagaaataaagggacagagtacaaaagaaattttaaagctgggcgtccaggggagacatcacatgttggtaggttccatgatgcccacaagccacaaaaaccagcaagtttttattagggattttcaaaaggggagggagtgtgcgaataggtgtgggtcacagacatcaagtactttacaaggtaatagaatatcacaaggcaagtggaggcagggcgagatcacaggaccacaggactgaggtgaaattaaaattgctaatgaagtttcagacaccattgtcattgataacatcttatcaggagacagcgttttgagatcaaccggtctgaccaaaatttactaggcgggaatttcctcttcctaataagcctgggagcgctatgggagactggagtctatttcacctctgcagtctcgaccgtaagagacggccacgcccggcggggggtggggggcagtttagagacctaccgccaggtgcrcattctctttctcagggatgttccatgctgagaaaaagaattcagtgatatttctcccatttgcttttgaaagaagagaactatggctctgttccgccgggctcaccggaggtcagagtttaaggttatctttcttattccctgaacaattgctgttatcctgttcttttttcaaggtgcccacatttcatattgctcaaacacatatgctgtacaatttgtgcagttaatgcaattatttcagggtcctaaggcaatatacatcctcctcagctgacaggattaagagattaaagacaggcataggaaatcacaagggtattgaatggggaagtgataagtgtccatgaaatctttacaacttatgcttagagattgcagtaaagacaggaataagaaattataaaagtattaatttggggaactaataaatgtccatgaaatcttcacaatccacgttcttctgccatggcttcagccggtccctccgtttggggtccctgacttcccgcaacagaccttgtmtcacccttcaggccaggcagacaaccasagagaaaagaaaatgtgtaaccacagaaatgagagagagacaaagacagtgacaagacagaaatagagaggttgagtgagtgagattacacattctttgctcacttaggtagttgggaagctctgagagaaacatagggcttgatttcaagcttaagaggcacttcagggtacaaagagaaaacatgcacatgactgaagaggtgattaaaaccaccacatgatcatgtgatcagcatgaaacaacaatcatgaatagttaattaatcttaagcaattcatttgtttctggaccctccaaaaattccttttagttcatgacactgatgagcaaattaacaacctaataaccatttatttggccaaggaagggagatcagagacttggtagccaaagaaagcctctagggttatacagcatcataataaccaaagggaggccaaggcaggcggatcacgaggtcagaagatcgagaccatcctggctaacacggtgaaacaccgtctctactaaaaatacaaaaaaattagccgggcgtggtggtgggtgcctgtagtcctagctactcgggaggctgaggcaggagaatggcgtgaacccgggaggcagagcttgcagtgagctgagattgtgccactgcactccagcctggatgacagagtgagactccatctcaaaaaataaaataaaataaaatgaaataaaaaaaataaccaaaggaacactttagctatagaaactctacctccttttatacagatgaatttcagaaatctgtacacggtattctcttcaaactagtaatcccaattataggcatttattctaattgcctaagtgccaaatttatttataaaaatgctcactgaagtgaaatttataattgccaaaaattagaaataaatgtcaataaataatgaaatattatgcagccacaaggtatcataaattttacaaagtgacatggaggttatataaggttatataaaatagtaaaagcaggatatcaaactatacatacagcataatctcattttatgtaccccatctccccacccccaaacatacacacatacatgcacacaaagcacagaagtaaatgcatcaaaatggtaggtcctctctgcgttatggaacaatgtatggtttttattttgtcttataatttgtgtaatactttgtaaacagaagagatcaacaactgttatattaccacagttcttgatggtaccaaaaaaagccaagcttttaaagggctgctttgatctacctcttatttcttttcctttttatcctctttccatactggatttttccttcaagagatagaaaaaaggttacatttctctatgattcatttctgtatcattttctcaaattgtcaattataatcctttacccatttatgagtgctcattacttttcagctattttgttttcatatatggtacacttaagaataatcaatgcttttgactcagtattttcacttctgagaatcaaaagattagaactactgcatgtaatattcactatagtgttaytaatgataaccctagatttttttaaaaccctatatgtccaatagctatggcaattgtaaaaatatgtgtaaaatattaatgtcyaaagaattaaaacagcttttgaggtaacatgcaaaaaattcctaacttataatgttaattaagaaataaatgaagaataatatgaatatggttacaactataacaaaatatataaaaatgaaactgaggtgccaagactaaaagaattgtcaattaagaaatctactttatcttcttttcttaagaaaattctcttgatagaaccaaagtataatgtattttataattatatgttattatatataatttattagtctattctcacactgctaataaagaatgaagacatacccaagactgggtaatttataaagaaaagaggtttaattgactcacagttctacatggctggggaggcctcacaatcatggccgaaggcacatgaggagcaaagtcacgtcttacacggtggcaggcaagagcgcttgtacaggggaactcccatttataaagccatcagatctcatgagatttatacactaccatgagaacagtatgggggaaactgctcccattattcaattatttccacctggctctgcccttgacatgtagggattattacaattcaaggtgasatttgggtggagagacagccaaaccatatcattatactatgttatataaatttatcaattgatataaattgagctaaaagtctaaaggaatacaagactaaaagaaaatgcatttaaataataatagcaactggatttaagtggtgtgtttatgggtctttttcttcctactgtatgttttccaaatttttctacattaaaaaacagcaaaccattttcaccgatgtctttcattatacttcttaataaaactgaattcataaaatacatacatagacttgtagattgtgaataaatattcattgattattaagtgcattgtcaacaggtaaaaggtactcaaaatataaaggtaatttcttcttaccaatatgggccatttttaattacagaagcattcaaatatctgttacatattttatttaacttaactgatgaaattaaaaattcttacactatttctacctaaaattttgaaatttaaattattacattaaattactatgtttttcgtatcatggggaaataaaaagtctatgatatagtaagaatagcaataaactagagtatgaactcatgataaactttatttcctkctcctctcccaaaaaagtttagaaaagcatagcaaaattaacaaaagtagataattctgcccccaacatcagaattcactttgtgtaataagcaatactaattgtttcattatatagaattttcattgggatatgcaatatgtaaactggatattaagctaatcaaccatttcaaagtgtgtttactttgttggctttctatgtcacctatgaggcaatcaattcacaacaaacttttaccgtgtttctgggactatggtcatcttttaaaaaaattaattaatttaccagccaaagtaaagttggttaatgtctttcttcaagcatattatgcacatttacagtaagtcatcccagaaatcataggctgtgaaaatgtggtgttaggcatagaatatctaacgtgcatgcatccaatatgcatggaatagctaatgaagaaacacttttctttactgtacaaaagattttgcacactttcagggctgggaactccggttcatctacttgactacagaacatttgatgctggtttttaggtcagctcccgctgggtacaagtagtctctgctataaacattttagagctagagataactaacctcccctcaaagtactaaaattagtagaaagcttgtgctaaacatgaaagttgttgtttggtctatttatattttctcagttcttttcatcaagtcttatgaagtatttcgctgttaaactacaggaaaaaggattgtaaaacagaaataattgttaaagactcatatagtaggaaactggaacatttaagacaaaacagagacagagttacaacataattaaaggagtaatacagactatggtatgcttagggattatggtccccaaaggggctgattttatagccagatttattttttcaaatgtgagacacattatttggtgagttaatgacatgaataaaataaatgcataaaaatttccacagttaggcagggcacggtggctcatgcctgtaatcccagcactttgagaggccaaggtgggcagatcacaaggtcaggagtttgagaccagcctggccaacatggtgaaatcccatttctactaaaaatacaaaaattagctgggcacagtggcgggcgcctgtaatcccygctactcaggaggctgaggaaggagaatggcttgaacccaggaggcggaggttgcagtgagccgagatcacgccactgctctccagcctgggtgacagagcaagactcagtctcagaaaaataaataaataaataaataaaaattaccacaggtattcatcagtgagaactgctaactaatatccaacaggttccaaacaaaatatcttttgaattttacttaggtagttttgtgtgagtttaggggtgtgatagtggctctatttgaagatttttctatataatgaacttaatccatgscttcacttctttttttagtaagttttattgtatatacttgagatttaacatgtaacattatggaacacataaagatagtaaaatcactatagtgaatcactatagtgaagcaaattaacatgtctatcatctcacatatttttgattgtgtgtgagatgaaagcagctaaaatctacctatttaacaaaaatttgtattacaatacaggcataatcctcattttattgtgctttaccttactgtgcttggcaggtattatgttttttacaaattgaaggtttgtggcaactcagtgtcgaacaagtctatcggtgtcatatttctaacagcatgtgatcatttgatgtctcattttggtaattctcacagtatttctaattttttcattattattatatctgttatggaaatctgtgatcagtaatctttcatgttattgttgtaattgtttggggccactacaaaccacacccatataagatggcaaacttaatcaataaatattgtgtgtgttttaactactccactgatctatcattccccaactccctcttcctctcctggggccttcctgttttctgagacacaataatatcgaaattaggccaaccagcaaccttaaaatggcttccaagtgttcaagcaaaaggaagagtcacaaatctctcatttcaagtcaaaaggtagacataattaagcttagtgaggaagccatgtcaaaagctaaaataggctaaaagctaggcctcttgcaccaaacagctagccaagttgtgaatgcacagtaaaagttcttaaaggaagttacaagtgctactccagcgaacacatgaatgacaagaaaatgaaacagacctactgctgataaggagaaagttttagtggcctggatagaagatcaaaccagacacaacattcccttacgccaaagccaaatccagagcaaggccctaactatctccaattctgtaaaggctaagagaggggaggaagctgcagaagaaaagtttgaagctagcagagattggtttataaagtttaggaaaaggaaccatctccacaacataaaaatgcaagctgaaacacaagtactgatgtagaagctgcagcaagttatccagaagatctgctaaaataactgatgaaggtgactagacyagacaacagatttttaatgcagatgaaacagccttctattaaaagaagatgccatctgggactttcatagatagagagaagtcaaaaactggcttcaaaactttaaaggataggctaacttgttagggcctaatgcagctggtgactttaagttgaagccagtactccttgattattcccaaagtcctagaatcttaagaattatgctaaatctactctgcctttgctctataaatggaaggacaaagcctggatgacagtgcatctgtttatagcatgctttactgaatattttaagcctactgttgagaccaactgctcagaaaaaaagattcatttgaaaatatgactgctcattgacaatgcatctggtcacccaagagctctaatgaagatctacaagacgaatgctgttttcatgccggctaacacaacatccattctgcagcccatggatcaaggagcaattttgactttcaagtcttattattcaagaaatatactggtaaggctatagctgtcatagatactgatccatctaaaggatctagagaaagtaaatgggaaatcttctggagaacattcagaattctagatgccattcagaacacttgtgattcatgtgagatgtgagaaagccaaaatattactattaacaggagtttggaagaagttgattccaaccctcatggatgactttgagagctacagacttcagtggaggaagtaactgcagatgtagaaacggcaagacaattagaattagaagtggagcctgaaaatgtggatgacttgctgcaatcgcactataaaaccaacaggtgagaagttgctacttacggatgagcaaagaaagtggtttcttgagacagaatctactcttagtgaagatgccatgaacattgttgaaatgacaacaaagtacttatactagttcataaactcagttgatcagacagagtggcaagggtttcagaggactgactccaattttgaaagaagttctactgtgactaaaatgctatcagtcagcatcacatgctataggagaaatattttatgaaaggaagagtcaattgatgcagtaaatttcattgtcatcttagtttaagaaattgccccctctattccacccttcagcaaccaccaatctgatcagtctgtatctgtcaacatcaaggcaggactgtccaccagcaaaaagattacaacttgctgaaggctcagatgatcattagcatattttaacaataaaatatttttaaattaaggtatatgcattgtttttctagacataatgttattgcacacataatagactaagtataatgtgaacataacttttatgttccctgggaaaccaaaaaattggtgactctattacaacattggctctattatggtggtctggtaccaaaccaacaaaatctctgagatatgtcagtacaatattattagctatagtcttcatctatacattagatctctaaaaatattcatcctacatgtgtgctattttctatcctttgacctacatgtactcatttcctcccaccctactccacatccccaccactgttttattctctatctttgtatatttgactttttaaaaagattctacatataagtgagatcatgcaatatattatttatgtgtctggtttatttcacttagcataatgtctttaaggttcatccatgctgtggcaaatggcaggctgtctttcttttttaaggttgaataatattccattgcatatacatactacattttctttatcaattcatccatcaatggatacttaggtcgtttccatatcttgcctattgtgaacaatactgcaataaacatgggggtgcagatatctctaggaggtgataaattcatcacctttgggtatttacccagtagagggatattgagtcacacagtagkactattgttaattttttaataaacctccatattgttttccataatggctgctccaaactacactcccaccaacggtattccaggattctcttttctccacaccctcatcaacatttattatatctagtctttttgataatagtcttcctaacaggtgtgaggtgatatctcataatgactttaatttgcactcccctgatgattagtgatttgagcaccttttcatayacctgatggttatttttatgttttatttggagaaatttctgctcaggtttcttgctcactttttaatagggttatttattttctgctattgagttgtaagagttcttacatatatgtggtttgcaaatatatttcccagtctacaggctgccttttcattttgttgattgtttcccttgctgtacagaaacgttttagtgtgatgtaaccctatttatttatttttgsttttatggctcaagcttttggtgttatatccaaaaagtcattgccaaggccaatatcaaggtgttttttcctgtatgttctcatcaacgtgttttatggtttcaggtctcacaggcattttatccattttgagttgacttttttttttgtatgggtggaaaataaggtcctaattttatccttttgcatgtggaaatccagttttctcagcaccatatattgaaaaactattaatttcccattgtggcctttggcacccttgttgaaaattagttgaccgtatatgtttggatttatttctgggctctctgttctgttctactgctccgtgtttcttttttatgccagtaccataccgttttaattactagacatttgtaatataattttaaatcaggaagtgtgatgcctccaactttgttctttctcagtattgctttttgtctatttgggttttttctacagcttcataaaaatttgaggattgtgttctctatttctttaaaaatgtcactggaattttgatagcaattgctttgactatgtatattgctttggctagtatgtacattttaacaatattaattcttataacccatgaacataggacatatttccatttatttgtgtcttcttcaattctttccttctttttttttttttcactgttccttgtggagcagggctaacttattggtggtatacccagagtcagccaatttctttcatcagtgctttatagttttctgtgtacagatattttacctttttggttaaattcattactatgtattttttgtaacaattgtaagtgagatttttttcttgatttctttttcagctaagtcattatttgcatatagaaatgctgctaatttttgtatgttgattttgcaacctgcaactttattaaatttatttattagttctaatgaggtttttgtagaatctttggctttttctacatatagaatcatgtcatctacaaacagagataattttacttttttctttctgttttaaatgcctttcatttatttttcttgtctgattgcctttgctagtaattccagcgctatattgaatagaagtggtaacagcaggcatccctgccttgtgctggatcttagtggagaagtctttagttgttccccattgatcatggtgtcatcattactagaccatcatataggaaatgcttaatggagttcttcaactggaaatgaaaggataataactaccaaaatgaaaatatatgaaagtataaaactcactggtggaagtaaatacacagtcaaaagcagaatattccattactatagtagcagtatgtaaatcttccaaatctctagtatgaaggttaaaagtcaaaatggtcaaaaataaccatagctacagtaagtaacttacagtaagtaagtcacaagaaggaaaaaaaagrrcctacaaaataaccaagcaacaatgacaaaagggcaagaataagtctttacctatcaatacccttaaaygtaaatggattaaattatccaatcaaaagacagggtggctgaatggatattaaaamagaaacaagatctaactmtattctacctataagaactattttagatttaaggacacacatgggctgaaagttaaagaatggaagatattccatgcaaacagtagccaaaagagagcaggagtggctatatttacatcagataaaatagatttcaagtcaaaaactgtcacaagagacaaataagctcattatttaatgttaaaggcatcaatttatcaagtatataacaactgtwwatatatatgtacccaacattggagcatcaaaatatataaagcaagtgttaatggacttgatggaaaaaatgcatagagatgcaataacagcacaggacttcaataacccactttcaacaatggatagatcaaccagacaagaaattaataaagaaatactcgacttgaactgtattcatttttatttattagttggcccttcactataagttatcattgcaattggctcataaacttcattataattacataggcccaaaaatattcatttatagatgaataagactatatgatttttaattacattattttaaatggacttcaactatgtacaaactgcaagggtcataaagtaatattttaaaaaggaagaacagaaagaacaaaatgagtattaaaattaagaaattacatagttttattagaataaaatcttttaaaacatttagaaatgatgtctgccagtcttcaatgattgatgtccaaagtcattatgttaaaaattatcataaatacwagcttgaagacattttcagagaagcaaataataattcttatctattaaaaaaataagtgatttagctcgtagattttttttacacacataaagaatgagccaaatagctcttattaagcagaagtaaagagaaggtatcctgacatcagtaagaagctacctttaaggaggtagaagaaatgataataaacatgctgattatcctgagtttggcactattagtgttaagaacaaattgattgcatataaaaatccaaatatatgcctaaatcaagaaagagaatggcatattataaaaaagaaatccatgcaaaagactaatttggaaatcaattacatcttgaaactctcctgttttctttttctaagaaaacatttagagttgaagcctacgatatcgttcatattataactaagtcttasaacttttgcaactgtgaagtgtgagaaataatggctgtcttttctacctcattcaattaacgaatctgacatcctgactcaaccctaactctaacctatgatgcaataatctgacttctgagtatgtatccaaaagtattgaaatcaaaatctcaaagagatatctgtactctcatgcccattgtagctttattcaaaataggtagacatggaaacaaccccagtatttatcagcagatgaattgataaagaaaacgtggcgtatgcatacaatggaatattattcagcctttgaaaagaagaaaattctgtcatttgcaataatataggtgaacctggagagcactatgccaaacaaaataagtcagttgcagaagtacaaatatttcatgattccactcatatgaagtgtctataatagttacattcatagaagcagagaatataatagtggctgtcagggcttggaagatgggggaarggatagtttttgttcaatgggtatacagtttcagttatgctagatgaattaagttttagatatctgctgtacacatagagcctatacttcacaacacagtactgtgaacttcaaaatttgttaagagggtakatctcatattaagtgttcttaccatgaaaaaaggacagaagaaagctatgggagttttaggatgtgtctattaccttgattatggtaatggtattaagagtgtttgcatatacacagactcatcacattgtgtgcattcaatatgtgtagatatttgtgtatcaattatacctcaataaaggtgtgttgctgtgatagaaatgtgtatgagtatgggcagtgatcacagaagcgtatagagaaacaaaaagcaatcacaaggayaaaggagtgagattcaaagcacaggttttctttttttctttcttgtattattgttacttgtcttctgtttttcctttaccttatgctatattatttatttataaaataaaatgctaccacttaaaaaatttttytaagttttttgaacttttgttcaaaagttgaaacatttgctttatgctgtgaggggataggcagattcaggaaatagaaatctggctctcaagaagtctttaattttgtgagtaagagagacagaccaaaaaaattacaaaatagaagaaaatgaagtaagtgtatacagatcaggataagcagagcacagaagaaaaatattgtttttaatttaaagaaattaggaaagacctcacaaagaaagaaagcttcatttccactttaacatttaccaactaagtagactctgaactcttccataacccagatgaaagaggagagtggaatgtaacatccctatcttgtgttctaagaactcatgacattcacactctgggctcagttctcctcagtcctaaacaccttcctcatggtaaaccagtcacttggagaaggacagtatttatagatacttagtagctgatttagccaattcatacttaactaagtaccttaggtaatatttggtgaagggtttttgtaacgtatactgttatggtgcctaattcttggcagtggtgttagagaaatcttttttaaaaaataaaaataaataaattggtaaaggtaatataggtactcttattttccattaagattaaaccaaacagttgtactataatttcaaaattctatttcaaaattcctgttaaccagagcatcattttttttttttgtaatttgatgggtaaaagcatgcacataatgtcagacaggtctgaattaaaatcctgtacccaccaattacttactagctgtgacccagggagaaccacttgatattacagagtttcagtttcttcctctgtaagatgactacaataattactttcttcacagggttattaaacgacttggtataataatgtatacaaaataatgagcactccattaataattattggtattttaatcagacttccaaagacgcccaagtgtatttttcaaaaatacactttaaaagtttgttaaggaatattaaaatcaaaaggtatctgttggctttacattttacttaagtgggtgggggctcatttgctaatggaaaatatgattttcctttctttaaatcccttttaattcttaaatgtttatgtattaatgaaattaattcagatttattgaatcattcattctagttgatgacaaaagcaatgtcactttaggaattaaagctaaatttccttcaatgaatgtaatttaaagttttcttattatggtcaacaagcaggtataagttagttcctttcctggcactggggatccgtgatggagaacaagaaaggagcaacttatcagagagccgtgtgtggtctgagatacttaacacagtttccccctcaattatctttgttcaaattgcctagttaacagtaggaaaatgtttcttctgcctataacagatctaaactaaagttaygggcttttgagaaatgcattttactataaacctctatcaacaaaggaggaacagagggcatagaggaaattggcaagtgagtcaacagaacacaacatatttttctgggtacccagaactgaaacaattatgaaaacagtttgttggcaaaatatagcagagttggccctccayacctgtgggtttctcatcaatggattcaatgaaccacaaatagaaaatatttggggtaaaaaatggatggctgcgtctgtactaaatgtgtacagatattttttcttgtcattattccctaaccaataaaacaactatgtacatagcattcacattgtgttgggaattataagtaacctagagatgattttaaatacacaggatgatgtgcataggttgtatgcaaatactacaccattttacgtaagggacttcagcatcctcagagtagggtctctgtgagggtgttctgaaaccaatcccttgtggataccaagtaacagctgtactagctaatctgtctcactcacaatagcctttactgagaacctattgaagagatcctatcatagatgacagagagacaaaaaggaacaagaaatttcaagtggtcactgtgcagtgggaggataaacaggggaaggataaaaataggaggtactaagaaccctgtataggcatccaagtggaagcacagaacagaggcatctaatccagactagggcaataagggaaaaataaaatagaacaaggaagcaagagacaaatcactaaaaaggagagaaaaagtattctaaataaaggagcagtatatgcaacaacctgccaggaagagggaactttgttaaactcaggaaacttcctgcaattcagtacggtgagaatagggtagggatagacaatgacacaaatcaggccagaaagaagagcaaaagccagacccaaatggccccataagccatgctcgtagttacattttatcctcaagatactggaaatactaatgaggagattgacacaattataccttaggaagattattgtggtggcagcgaaacattgaaatggaggttgaagctsatgatagatttattaactcctgacctcaagtgatttgcccacctcggcctcccaaagtgctaggattacaggcatgagccaccatgctgggcctacagtggattttaaataactgattctacttaaaatagaatcttaattcaagtgctaaagactctctttcgtattaagttgatttaattatgttattcctgtcctcatttatgctctttttcccaaccccataacaatttcaatccctccttccaaaccatacataaacaagcatagctctcttgagaatttgaagttacaattgaaagacttagatagagattgtcttagtttaataactctaaccctatgattctatgatagatttatgagcaggtaagtctaatgactaagatggtagtcatggcccatgtgaacctggaaaatctgagacaggtcttggttaatttagaaagtttattttgccaaggttgaggatgcacccgtgacacatcctcaggaagtcctgacgacatgtgcccaacatgatcgggacacagcttggttttatacattttaaggtgatatgagacrtcaatcaatatatgtaagaagtacattggttccagtctggaaaggtgggacaacttgaagcaaaggcaggaagactggaagcagagagggagctttcaggtcacagataggtgatacacaaatggttgcattcttttgagtttctgattagcctttccaaaggaggcaaatcagatatgcatctatcttagtaactttgaatagaatgggaggcagatttgccctaagcagtttccaacatgaattttccttagtgatcttgggggcccaagatgttttcctttcacacccaggaccaaaattttaagaacactgactgtggtaagggatattaagaataggattaawagatatcaaggggataggataaattagttttgaaggatgatggagggagggtttgaagtttaatctaaactaccaagattgttaaaactcctattttattccaaaacctgcaggctgaggaactctaaaagtgtatattttgaaccatagataaacaatgttataattgctgcttaaaatgtttaaaacaagacaagtatgcatgtttttaaaagcaaacaactgatttgccctttataaaaatatctgaattaagtaatttcatcatcatgatctatagaacaaatctacatgtttcacagttccgcatctacaacacagaagtatgggtgcaaaagaaaatgattttctggaacttgggaaaaacccttttaaggatttaaactgtgaagcatttgacttctaacagcaagtgcacaggaagaaatataactacagcataaaaatcacattctcacagattctcaaaataacaaaatattattcattcacatctcattttttctttttgtaataaaaataaggagatttttaattttgagcagtataagttataaattttctttgataatgcacacgtttataattttttttttttttgagacaaagtctcactctgtcgcccaggctggagtacagtggcgtgatctcagctcactgcaacctcagcctcctgggttcaagcaattctcatgcctcagcctcccaaatacctcccaaatacagatatatgccagcaaacccaggtaatttttgtatttttagtagagatggggtttcaccatgttggccagactggtctccaagtcctgacctcaagtgattagcccacctcagcctcccaaagtgctaggattacaggcatgagccaccatgcccagcctacaatggattttaaataactgattctacttaaaatagaatcttaattcgagtgctaaagactctctttcgtattaagttgatttaattatgttattcctggcctcgtttatgctttttcccaattccataacaattttcaacccctccatccaaaccatacataaacaaacatagctctcttgagaatttgaagttacaactaaaagacttagatagagattgtcttagtttaataattctaaccctatgattctaataatcaatgaacacaaagacaaaatgaaaatacaacaaaacaaatgtcttaggagcacggtctattgttagcagggaaatgtcatttttataacctcagaaaggcacaatatacttgtcaagacattgagaagtaacctggctatttcagccataccaacaaatctgttcacattaagtaattataggataggaactaaaaaggaataagacattaaagaatataaaatattatgtatgcatcacgaacttaatttggaattctttgtgttttataaaaagtgggaaggtcagaaaaaggtggaggtgtaggaactgaaagaactttgaaagaacttcaaattgaaaaaagacatgaactgcaattatatttcatatgccctatttagaaaaacatcttgaagccatcctccagtgttaaaggaggttatttgttgactaaattttttatctttccattaattagttatgcttcagaacttattcattaaactccttagcacttttgacacactaaagaattacgtgcctatcgagagactgtttagtggcaagaatccaaaaacatgaaactgcacctgtttttggattcagagattctaattaattttaaaataacctcccttctctaccttttaactggcaaatgtatcagtgtaagagatagcaaggccttcttgtttctcctatcagactaatttaggcaagttcccatttttgtgaggtgtcctcagatgtgagggatgtagggattttgttcctctctgacccttgcaagattaaaagcaaagagcattaaacatgatggcttttggcatatttaaatgccaaaggccacagttgacaactaagacataacaatcataaataatctgtacaccaaataacacagcagtaaatgttatakagcataaaccacaagagatgcaaggagacatagataaaacgcatgaatgataagatatgttaacccaccactctcagtaccagggcaaatcaaaaggatttaaaaaatacataaagttgggcgcggtggctgacacctgtaatcccagcactttgggaggccgaggcgggtggatcacctgaggtcaggagttcgagaccagcctcaacatggagaaaccctgtctctgctaaaaatacaaaattagccgggcgtggtggtgcatgcctgtaatcccagctacttgggagtctgaggcaggagaattgcttgaacctgggaggcggaggttgcggtgagctgagatcacaccattgcactccagcctgggcaacaagagtgaaactccgtctcaaaaaaaaaaaaaaaaaaagccaaaaagaaaaaaatacataaagttataaagactgagtcaacttaataaagcagaacttaaaaatatacatatatatcttttctatgtatatacctttatatatatatatatatatatatatatatatatatayacacacacacacacacatatcagggtgtgaagggattatatatttaatattttatatatttaatatattatatatttaatatttaatatataattaaatattaaataatatattatatatatttaatatttaatatatatataatcccttcacaccctgataatttttgtaacttttcattaagcatgcaattatttcaaaattaaactatcaaaaatgagaagaagaagaggaggagraagraaaggaggaggaggaggagaagaagaggaagaagaggagaatcaggaaaacaggtgctggtaagttactattttcctcctcctttcttaaaacatcattaaagcattttgtatgttaaacaaacaaacaaaaaatcctgatctgatgggcttttgaatgaactagtctttttcagagcctatagaaaaaaaagaaaggtcaccagagagttgtccgtataatttgactcattaagcacaagwtgtgaaaagtctctgaatcccaagacttttgaggagagaaaacaaaaagcacaaactcaaaataataaaatgtgacagatatatgatgagatgggtgcaatacccaggggtcctgtgttcatttttactgtgtcattgggcaaaacaagttaccattttattttaaaatgaaaggaaaatgcattttgtctgtctcactgagcaaattgtctcatttgagcagacccaggctagaggcactgtacccaggactttctccaaccttcttttagaaaaggagttacccaaatgaagttgtaatgaagaaaacgggacaaagcaaataataatgagtctacagctgaggtaatttatcatgagggttatcatgatattacattttcatgtaatacatttgatatttttttcctacccacgtttgatgtggacattcaggaaaataaaatacatttgttttggccttgtattttatcctcttctttaagcaaacaagaatagtttgcttagtgtgtatgtatcctcttctttaagcaaacaagaatggtttacagagtgtaaatatgcttcattttaccacaaaggattgctctggtgaaatgtacaactttttatgaagggttatatttatctcctttatactccagtaaacaaagcagaacaagcactaacgagcattaaacatacccagaatgttgactctaaaatgtcgtattttcttcttgaaaaaaaaaaacagttcctagaagaaatctaactgtaattctaatattatttatatgcagttaaggaaaggcttacaaaccttggtattcagtcatttgcaaccctgaaccattttctagaactcacaatttttacagaacctgtttccctatgaagggtcatttcttttccattctcaattctatatttttcaagtaatggtgctttttgaagtcaatttttcattatattgtggtggattttgcttttgtagtttttaaaatctatcagttaatcttttacttttgagaataagtggcattcaagctatggtaggttgacctcagtagctgaaaatccaatagtttaaaaattgagctcatttttcatgagacacaagccatgaacaatgtgatcaaaatgaagtcgacatcctgcaattctaacttattttacctggtaaaaaaaaaaaaaaaagaaatgattctcctctgacctcattattacttccttttatatctgtggatttcaggaaactgctgcagatatttgagcagaaaatgatctaaaaggtcatttggcaatttttttttttttttttttttttgccaagcgtatatcctacactgtccccaaacatgcaacattttttattttatcacttatatatactgttactgcccttttattgttgtggttgtggttagtacaactatctactgaattctaaattctaaaatgctctaaattttaaaatgaatttattattagccaaataatttttatggcctattaatatagaggacagaaccagctttataaacctaaatttaatttacttatactgcgatcactctgctataaagagtcagactcattaacctcctccacactttcagctcactacttaggttgaccgtgatgagggagaaagttctggggtaaaatgatctattttcaagcctccattcatttactaatkgggaaagtcactaagcttctctggacctcacttggctcctctctaaagaaaagggttgaactagacaggttctgttgcccttctgagactaacacccttcatcactaccacgtcaatcattccacaagccattttcacacttactaacatggagctacaaggcacgttaggctgcgaccacctttagtctaaaaggtactgtcctactgttgccaaagaaagtttaatcaaactcagcccattaggttgtgactgatactaatgttctctgctgaaatagcattattagttttcattaagattcacgtctcattagtgacccaatttccaaagttaccaaacaaaggaaatttctctttaaaaatgcgaaaagcaaaatatctaaaactgttactacgcatttgctactacattaggaaagttcacagtacctaaaatagccaccacctcatcatcctggatgacttccaaggatcctgacaccacaaagcagagggcatccacactttctccagcatggtaaatgaggtccccgggagcacagtgaatggtttggaactctaccgccaaggcgcgcagacacccatcgctggccaatcgaaaagcaggatgttcattaaaaaccttccggtttagatgaacacagatatcagctctcatgtccttgggacagatggagaggacctaaagaaggtgagagaygaataagtgaaaaggaaagaggaaggggccacttcagaaaaacaatcatccaacaaatatttattgactatgactatgtctgctacactgctacacaccttgctgggtactgggaaggcaaagggaacaagacacagctccgctctcaaggaggtaataatccactgagatgggctgatgagcatatggaccatgacaatgcagaactatgtagtaaatgctttgagaagagtatggatctcccctcagaaagaacacagccttggctgggcatggtggcttctgtaattccagcactttgggaggccaaggcgggtagatcacttgagctcagtagctcgagaccagcctgggcaacatggtgaaaccctgtctctrctaaaaagacaaaaaaaacaaaaattagctggccgtggtggtgcatgcctgtagttctagctacttgggaggctgaagtgggagaatcaccttatcccaggagacagagattgcagtgagccaaggtcgtgccactgcactccagcctgagtgacagagcaagaccttatctcaaaacaaaaacaaaacagttttgaggtggtcaagaagagtctcataaaaaagttaatgtcatttcatcaaagagtcaagtaaaatagggcatgaacattcattttaatctagcagatgtttcagaattttttttataactaaatcaaaattccacattggaggtggattcagaaaacaaaatcaacaaaagcaccctggcaacttgacatactggcactggcagactaactccactcttgatatatttttttmactctgaagattttccttttacaaataaattcatgtccaggaagggacaagggtattgaccagccttctgtaaggcttgggtggttggaaatgtcagtgctggcagggtgggtatgttattttgtatggcagtccttgttcattctggtctctgacttctgaagactactgcaggcagtagcagaattcacgctgtaggcatcctttaaaagaggaagcaaatggcagaagtatgcttatacagcaaggggtagagagcttttattggctacagctttctgacagggtgattaaagacccacattaaaatggacattatcatcatatttaatcagaacatcgtggagcaagatgtgattgcggaagttaataccacccattttaaagatgcaagtgcaaactcatttagaatcctcctcaaaccccctttgtaaactattctttatagccagaaatgattttctttgatcggatttcaatccctcaaagctgaagctaaattgatttaccccattaagttatactgcataatattttaataaatataaaatagttttctttcctctactaattgcattttaagctttaaaaaatttcctaaggcttgaaaatgtcccctgactattccttttatttgggggtcactatcaatgaaaactgggttgcttccctgtagagaagacaagcccatcataaatgcaaaaaccattaattaaattatgctttcagtatcccttctcttatcctttcttaatgctctacatacatttcacattatttaatcatctctgggtttttttcatactccctcaaatttctataggcagcagcaatctgctcacccacctttctgaaaaatctgatctttgaggaaaggaatgcctaacacagctttaaaagtaattgacgctgttttcacatcagttattttctataaggcaatgttttatttaatatataaacctttactgactttggacaatatattagtcattctataggcacttactgagcttccacaatgggtcacatcactgtgctaaatcctcagaactagaaggataagacactgtgtttgcctcaggttagctaaccagaaagtgtgggaggtgggcgtgtaaagggacaattgcaatacaatgaaaaaagtggtatgatgggagcatggccagagtgacataaaagcatgtgctgcctgtgagtctttacttagaggcagcaaaaaaggtcaggctcaagaggacgtaagtctgggttcaaaactatcacaacctttgtaacctggagcaccttatttaattcctctaaacctcatctgtgaaatggggataatgatagtgcttatatcttaggcttattgcagaaattaaatgaaagggcatgagttgagcctagtttagcctggcacatagcaagggcagaggaaatactagctcttatyatcactacggaacatctgtcttcctacagagtttattgttgcttaaactctctacaaaagcaattttcttttttcactttccactctgtctgcagtcttcatctggacagtttgactggtttccagacagaattaagaaaatatttcagcacaaacctgaagatattttaagcactgattaaggttaatatttttttcccagttgaaaatgaaattagctctagaagaacgaaaaaatttaaatacatacacacatacacaaacattacactgaataccttaatggaaaaatagactgctctattttgatccatttaccacataggactttcattgttttctattcattttggtaatagtcatgttatttccttttaataatgtttttcaggattcatgttgcaaatgaaatagtccagtatttgcaatattctctgtttattggcatgtcaaaagaggattttattacattatgagtacacctttccttttttgtttcacttaacatatgacactaattgatttattattttgattgatggtatctacttatatccagatatcaaaaagtgacaaggtaaaactaaatgctaaaaagatcaaccaaagtcacacccactggcaagcaccttccttctccaaccttagacagagcatgtgtgttacatgatgtttttgtcatcaaaatataagtatcttgttatttactctggaaatgaaatgttaatcacagtcttagccaaggcaaaacttggttttaagggatggagtaaaattatcattcaagacctggcccactggtctcactttccatgtattctgccttgaatatcagatccaatttattgtaggtaggtttcctaatgaggatttcatagttacaaacaaataaaattatatttcagaagaaaatacttaggttaaaagtgacttttgtttgttttcagagttgtttgtcccctctttgcaacagaatattaataaattagactcgttaagatgagcaataaattttcttgtaagagctatggtgtcagaggcatgtgaaccagaacaactccatcttgaataggtgctgggtaaaatgaggctgaaagctactgggctgcatttccagacagttaaggcattctaagtcacaggatgagataggaggttggcacaagatacacctcgtaaagaccttgctgataaaacaggttgcagtaaagaagctggtctaccaaaaccaagatggccacggagtgacctctgattgtcctcactactacactcccatcagcrccatgacagtttacgaatgtcatggcaacgtcagaaagttatccaatatggtctaaaaaggggaggcatgaataacccaccccctgtttagcatatcatcaagaaataaccataaaaatgggcaactagcagcccttggggctgctctatggagtagccattcatttattcctttactttcttaataaacttgctttcactttgtactgtggacttgacctgaattctctcctgtgtgagatccaagaaccctctcttggggtctggatcgggacctctttcctgtaacatatttctggcaaccacagaagagactatagtgcagaaaccctgacccaacagctacctttgggtaagtgttggggtcctgtaacatatttctggtgaactacagaagggacgatactgaagaaaccaccctccctacaaaggaagcagaccgcagcactgactggataactttgggtaagtggtgggcwacccagataaagaatgggattgggttagaggctcaacttaggggagttagagtctctcccaagacagagtgggttagaggcacctcttaataaaaggcaaggatgcctgactgacattgggttmgaggcccaacttaggagggttagagtcccttctaagatttagggggttagaggcccctcttggtaaagtccctctcagctaagaacaggtttggcactatgggatgttaactgctattctctttggattaatctgccttgctctctttgctgatggctgtgggtgacagggttaggcatgtacaggattgtgggatatggggaggtttttcctccctgaaaggggaaacttgagagctgacaggattgctggaaaagatccctttgctaccaagaagcagctgcctgaacttttcagtgtcactgcaatgggaaggtctttctctggcctccctgatcattttgccttccccacactgcacaggcaatgcttttctctctctcctttccctttcttatcatttctattactcagggtgaccatcttgcccagagaccacttgttgaaactccaagtcagaggttggattagactctgtcaaagaaaacaaaaaataaaaaacatgaacctaaacacagtaacccaaataataactcagaaacttgcatatgaaaaatctgacaactactctagtaaccttctgtctttctgtgtagctatatatatgttgtatgtaatgtttatataaaagagctctaattaattggctgaaacaaaaataagcacttcaatattctgaaagcaaaataaaaaactataatgccttttagttcatgtaactttagtaatayttgcaaaataaaaacagctttaaaaattattaataaaataaaaacatttagtctaaattatgcaggtcagatattaagtttgctaaatgctttaaggtcataaactgcttcttgaacttttaaaaattgttaaatttacctaccttaaagccattagattatagataagacctggggacatgtggaattcgccatgccccctagctatacaaagattataaagaaagagattttatataaaaaaggatcttgtaccgtaaattcttgtcctaaagtaaaatgactggttgtttaaaaggagggatgtttagagcaagtcagaaagtccaagaatgtctcagatggtctgtgtaagctgcgaaaggatttgttaaagggaatttatgcaaaaaatgttgtacaatttaaaggttgttaggcctcctaaatgcttcataaaatgacactataactcttactgtacaacttgccttcttaagtaaggtaaggcctagggacgtgtggagttagtcatgccccctagctatgctggagagttggttcttatctgyacttctgcctggtatatctcaggctaggctccacacctagtacatgattaaaattgcttaccaaccagggttttcaccaaargtaaaagtcactaaaagttaataacataacatgtaattgagactactgaagatacagttttacatgtaaggtgtgtaaggaaagtggaatggacttttggtaaaagattctaagaaggcctgggaatgtggatttttttgtgtgtaaagggtgttttaagttagatagaataaagctaaagatttaaacaggttgtggaaggtttataaaaattaactgtaaaagattctgtgtgtaaacatattggctaaagttaaagaggtattattcagtttttctgtaaattaaacattggaatagaagcacaacaggtttttcttagagcactgatctgctctttcacaaaaaaatgtaaagggttataaaaggtttataagaatctaaccttatggttaaacattaaaattgagttaatatgtctataaagttttatgaaaaattcagtttaacattaatagtacattattataaaggtgaagtttggcttatttggtataaaaatcatacaggaagcattatcaaatgtgaaatggtgttttgctttctttggactgtatttgcataaatatgttactggtatatgttccaaagttatgggaaactcctgtaattctaatatgacttagtgtatgttattaataattataattgttatgtaaaactgtgtatgccacagaagtaaccaaagttccttatcaattgtggctttaattgtggctgtcctaaaactttttatcaaccacagtcaactgttgccttgttttaatcctctttagaaggtggtttgtaataaactatagaactctagcaggtgttcttaaacacaggtttctaatacctttggaaattgtaacattagaatagagaaaataactttcagaactctcatgaagagctggaacgttcatgaatatcaaacagaacaggagttaattgaattaacttaaccaatagaaaactttttaactttgcttaaaacgttgctgagcctttgttttgtttttcagagtcaaagaatcttttcttttgagctatttacagcttgtagcaattgagcaaagtatactgctgtgaacaaaatttagaacatatttgtttctctctaactgatttctccagaatttggaaactagttatgagtattcttaacttatggcaatatagttatttgcttaagtgcaataagaatctgttttattttgtaacaggacacaactggagaaattggttattttaccaagactttgactggaatggtttgctttcctttaaggaatcaaacttgacttgtagagccaataaaagccctttggggaactagcctcataccttgcctacacagtccctttacagggtttctgacctatggtaagtaaagaatgtcactttctcacaggtccaggagccacaggttatcgtggaacctcaaaaggagaggaatttactcaactcataggtatttgagggtacaaacccatggcagggcttggctttaaaaaagtcttatatgagattccttatgaaacagagttctatcaaagccaattaagaagcttatgtgaaatataattattcttgctgaactttatacaaattatcacgccaagtctaataaagcaaatcagtcttaccggaatttgtctttagtaaaaatgagaaactggagagagaaatattatttttcaagaactatggtacacgtattactaaattctagtctcagtagttgtttttaagtttgtttctgcaatttaggctaaccctgctcattcctgtgaaccaaccaatgatctctgactgctgtttagaagaaacaagagggatgggtaatataaaaacctggatcagtattctaattctgggcatattacaatcagctaacaagcccatatcagcttagttccaacagttgcctagttcatgaaaagtcttctaatttagtttacctggaataactttattcattttgctttgcccttgtggaatatattactgttatactctttgtgtaggaatacagaacaagcttactgaatgattccttaaactaaacacttatcaatcttccagatatcacctcttgtcgaaactcaagagttataaatggccctcgccatactgatgttttctgactaagctcctctttacctgaacacaagagaccctaatagttaggcaggaatatcatcacccctattaagcctgaagacattacagaaggtggatcttcatccctctgcaacccttatgattaagggttctcttataaaggggagggggaaatgtcagagggatgcgaactagaacaagtccatcttgaataggagctgggtaaaatgaggctgagacgtactgggctacacttccagagagttaagccattctaagccacaggataagataagaggttggcacaagatacaggtcataaagacctttctgataaaawagcttgcagtaaagaaactggctaaatcctaccaaaaccatgatggccacaagagtgacctctgatcatcctcactactacactcccatcagtgccatgacagtttacaaatgcgatgtcaatgtcaggaagttactctatatggtctaaaaaggggaagcatgaataatccaccccttgtttagaatatcatcaagaaataaccataaaaatgggcaatcagcagccctcagggctgctttgtgtatggagtagccattctttcactcctttactttcttaataaacttgcttaataagtcacagtttgtaatgtggactcgccctgaattctttcttgcakgagatccaagaaccctctcttggggtctgaatcaggaccgctttcctgtaacatatttctrgtgaccacagaagggactgtagtgcagaaaccctgacccaacggctatctttgggtaagtgttggggtcctgtaacaatgacagtatgtaagaaaccatttttcagaattctgcaaaacaaccctggggaaaaaaaaatgaatgtcatggtctgaaaaagaaaacctttttcaaattctttatgatattcactaaacccaaagtcaagaggtatcttagcaaakattctcaagctccaaagatgtaacctccacattttgactacagaactcttagtgaaacacatatattatcatgtcatctctgttttcttaaaatatctgatggcttgcttccccaccaactacagccaaagtcctaaccaagcatacagggctctttatggtggaatcctgctccaatcttactaccgtcctccaaccatgccttccaataacatcacctttctcaccacctaagcttgccatgttctcccattactctttgccttcacacatgcttttcctttttactggcatgtcccatcttccctttctctgtctagtcatcactgatttatctgtcaaagcacagattatcyttctttctaccatgaatacagtatagacacagctttctcatagaatttagtaatacatagaagaaaatgagagtaagaggtgttgtaatttgttgttgttgtttttaaataataaccagaaatagtaacacagaattatcaatagatatttcagacttggtttcaaccataaaatcattctttactttttttaatgaacaccttcctttatgctcaacatataaattagawataagcagaattatgctgacagaagcttcgctggaaaggcagactcccaggcaggattgcttagagcacattcagtcattcatttagctgatgattattaagcactggttacgtgttagttatgtgcctggtactatacaggccctccagatccatcagcaaaaactcttattgagcctgctcccctgaagcatccaattaggcatggtttgaaaagtcactgttcctagttcactgccattttacagataaagtgaatgtgtctcataaaggttatgtgacttgctcaagtcctctcaacaaattactagcaaaaccccaaactcttgagttccagctattaagctacgctccttcgtgaagctcaaccaggaaaaaaatataatatctggtaccttctcatgttttctggttctctgtactaaaaaaattaaaatgctgatttttgaaaattatttaaggtccaattgatcaaatctatagtttatttattaggaaaccataaatgccccgccactgccatagaacagcctaaatttcattgccaatttatttccatctttaagcactttttaatttcagctccaacaaatgtatcacatacttcaatatgttgataaagacataggattcactgttaagttgttatatcacattactactcacccagaggaagacatcttatttgaaacacaagttttattgtatacatgaaaaggacctgagccagaggttagcatttgataaatgttactttccttgggtcccttccctctatcactttcatgcactatggtatcaataatgtcacaaaaccttagaagataagggagtctaaatatgataattaacagagaaggcaataaattaaaccaaaatcctctaaagaaatggttgactagagagagtcaaagaaagaaggctttatcttctcactcgttctttgaatatacttaaaatgctttttaatatttattatataaaatatggaaaataaaaatcatagaggaaaaaactcttccattatttacacttatctatgtgtagataccatcgttacaaaacttcaaactctactattttatttcttgctataatgactcattatcacattataatcaattcctatgctatgaaatacatattttaaaaccaaatttcaatccttgtacaatatcccatcaaatatttatggcacaattaatttaaccaktacattataattggatatcaagatttccagtattccctttcataaatcaagttacaacaaataaccttgtacctatatcagattgtctaagcacaaatttttagaagwaaaattagtaggtaaaatgccaaaacatctttaaggctgtygccaaactgcatcctagaaaaggtaaaccaaattacactctaaccaactgtgtatgagagtatgttgcatgttcttaataatatctctctttaatcttccaaatgcatttgaaagaggaatggcaatttcacctgaaacaaaagtagaattgtatagtgtaatgaggcagaatctgggagatctttagtcttagtgaagttattctactaccactaccctctagctcagtgttcacagactgaacactattaatgaagctataacaaatttctaatgtgcaaatggggataatgaggataatttcactttaagtgcctgaaggtagtaaactaaacaaggcttcttcttgaggtcttttactgctctaagttattgtattgattatctataaaatccttcttcaggaataattcagtatcagctatttctaataataatgaataagttaaatgatccctctatttttaggacaaaggaataaatgcattaatgacattttgatagacattggagctaccaccaaatctctccttcttttgacacaattaagttatgcactgttaattaatctctcttcatgaatctaatggagctggtattattaagtcagtgaaagccagtggagagagtcaggcaagtgacatttgcacataaaatatttttacaatccttcctgggaatgaggagcttaagtagctctttacaggaatttaattctcattcatttcttgggaagaaaagaaagctcacctttatatttaaaggaaataaaaagtataaccaggcagtcatgcagtcatgccaagcaaaaggaagttgctctctggatgtcactctgacaatctctaggggtgtcaaaacctccaaggaaataacccaggaacaatgtagtgaataaaaccaaaccaaattaacttccattatttaaaaataaaaggtcatatttagcaataaaaggctgccgcaaccagtgaagtattataggttaaacctcattggtttcactttagagataaagttcctgtgactagacttcatatataaaaatgagacctaaagtttttgcttcaraatcatcgtgaaccaattctamcaggtttttmacaatattagttttgcagtaamaacaaacagcaattgttaccattttttaacttgttaggcagcaaatgtcttgggccactggctttccaaaggcagggctttgatgaaatttagagcttctamtgtgctttgctcttaatctcgtgtctttactgtcttacaggcagatatttgactaaawaacagtgcttttacatacctgtgaaagtattttctaaaattagaaatatacttttaagtgtatttactgcccagaaaaatacaaacaatattgttttctactggccatgatctttttagtccccatgacaagtgatgttcccatccttaaaagaatgagccagtcaggagcttgagaccagcctggccaacatggcaaaacgctatctmtactaaaaatacaaaaattagcygggtgtggtggcaggcacctgtagtcctagctacccgggaggctgaagcaggataatcatttgaacctggraggtggaggttgcagtgaaccaagttcacmccactgcactccagcctgggmgacaaagcgagactccatctcaaaaaaaaaaaaaaaaaaaaaaaaaaaaagaatgagtcryttcatacsaagtgggagtgaggtgctttggaaaatcatctggctatattgtaacagttgaacatgcatatattcaaagacccaagaatttcacttgcagatatatatgcaasagaaatgtctgtatatatgcagcgaatcttgtgaactacagtgggtatagcatatatacagtgggtatagctccaaactgaaaattactcaaagattcattaatgttgaaatagataaatattaatacattgtggcacagtcacataatgaaccgctattcagcaatgagaatgaaagaagtaacaactatatataggataaatccatggatctcaacaacataatgttgactgaaaaagagcttgatacaaaagagtatactctatatccatttatataaagttcataaatgcaaaactcatttctggtgctgaaggtcaaggtttacattactcttgagggccagagttggttaattcctgaagaagacatgggatatagacttctggggttctgataataaggttttaatatcctggctacacatgtgtccactttgtgaaattttatcaaactatttatttataatataatttgttcacttatcagtattgtgtaatatctcaattttttaaatttacttttaaaagtttagtttaaaaaggaatatttaaatattctcaccacacacacaaaaaatggataactgtatgaagtaatacaggttagtttgactgtagtgattatttcattttacatatatatacacaaaacatcacactgtataccttaaatatatgcaatttttgtttgtaaattatacctcaatggtgaaaaaaagtttacattataaacaaagttacctattaaacaaacaggtagtatttaaagagaaaaaataaatacatgaaacagaaattagagatgccaaataaattatttcttggaatgactgtgattttgaaagttgatgtttaaatctaccagtcttccaatagagagagcaaagtaaagtaagctgtctttccaaattatttatacaatttaagacatatacacacacacacaaaacaccaactgtagaaagtaaaggtagtcaaaataggtcacagagtagtaaatgaagtaaagaatatattgattgattatattttttatattacttctaaatccaaaaagaatttgagagttgatgrtataaaagaatatatatatattcagatacatacatacatattctcatatgccatatgtgtgtatattcatgtgtctgtgtgcatatagattttttaaatcaagtatatataaaataacagctacaaagttatcttgaaaagattgggaaattattaagtgtaagaaaagctaaacaagataaaacaaaatatagttcagcaattgaaatcatattcaaacattttttcacaacactaacacttacataggttatagatttatataagtatatcagtgtgtatatgtatacatgtacatatatcagcgtgtatgtgtgaaaaaatatatatatatcagtgtatgtatgtgtaaactgactatgtaaaataaaatcagaaatctttcaaagagtacaagctcttcctttcactctcccactatgctgacacttaacaaagcagaccctgatcgatatgttttcatttagtaaagcctgttacattattagttatagttgaaataggatagcaatatttgactgagctttctggtaaattaaactcttcattataagtaaagtttgcctcaggaatttagtcctctggaaccactgaaatagacaaaaaagtatagttatttaaatatttatatgcacaagtatgcttcctagaattttccatggcagtaatgcatgcataaataatatataagaaacaacatatgcaccataataaatataattgacatatagtagatatagcaaatacatatttgacatgtagctgataggatgctggctattcccatcaagtgaaccatttccataagctctcttcactctttttcattcttttttcttctcaaaccgaatattttcaaatgacccatcttcaagttcacagattctctcttcttcctgaccaaatatgcagttgaattctctattgcatttttcactgtgttcattgtattcttaagctccagaattcctgtttggttcttttttgtgactttatttattraacttcttattttgttcacgtattacttttctgatgtctctgagttctgtgtgtgtgtatctatatatatattatatattatatataattatatatgacataatatatttattataatatataatatatatatacacacatatacataatatataatatataatatactatatattatatatcatatatcatatattatatattatatataatataatacatatattatagtatatcatatatatataatatatatatatacacacacacacaactcggagacatcagaaaagtaatacgtgaacaaaataagaagttcaataaataaagtcacaaaaaagaaccaaacaggaattctggagcttaagaatacaatgaacacagtgaaaaatgcaatagagaattcaactgcatatttgctcaggaagaagagagaatctgtgaacttgaagatgggtcatttgaaaatattcggtttgaggagaaaaaagaatgaaaaagagtgaagagagcttatggaaatggttcacttgatgggaatagccagcaggctatcagctacatgtcaaatatgtatttgctatatctactatatgtcgattatatttattatggtgcatatgttgtttcttacacattatttatgcatgcattactgccatggaaaattctaggaatatattctatataataatatatattctaggaatatattctatatrataatatattctaggaatatatwatattcctatatattctaggaatatatatatatattctatatatattctaggaatatattatatatattatatatatataatggacatatatatacacatacatacatatacatataatagccataaatataaatataaatatatatatatatggctattactcaaactggaaaagcatggaatcttgccatttgtgaaaacgtagaatgaaccttgaggacattgagctaagtgaaataagccagatgaataaagactaatactgcttgatctcacctatatgtggaatctataaaactcaaacccatagaaacagggtaaagggtggctaccaggagctgggggcggggggggggtggaagaaatggggagatgtttgtcaaaagatacacacttgcagttataaaatgaataagttctagagacctaatgtgcaccttgttgactgtaattaataataactgtcacgacacacacagagaacaaaggtaactgtgtgaratgatagatatgttaattagcttgcttttggtagtcattcacatatatatcaaattctcacattgcacactttgaatacatataatttttgtcaattatacctcaataaagcagaaaaataaaaaataattttctaacataaaaatttcgaaaggttctaaaaccattaagtatgaaaaagataaattaaaatcataataaaataccaatacacacatcacagtggctaatatgtaaaaggatgacaatgtatcaagtcttgaagaacatgtagaacatccaaaaccctcgggtatcccagtagaaatgtcaaatagcataccactactcaaaactctttggtaattttcaataaaactaaacatcaaccaacactataacccatcaaaccacgtcttaggtatatacactaaagaagtgtgtagatatgttattaaaaagatatatacaagaatttcacaacatttttgttaataacagccaaaaattagaagcaaccctaatgtctatcagtcatataatgaacatataaccccattatatttacaaattaaatgctatacacaccgtatgattccacttatatgaagatccatgtcaaaataatggttacaggaaacaacctaaatgcttaccaaataatgaatcggtaaataagatacaggaaatccatacaaaagaatattctttatttatttattttatctatttattttttttgagacggagtctcrctcagtcacccaggctggagtgcagtggcacaatctcagctcactgaaagctccgccttccgggttcacgccattctcctgcctcagcctcccgagtagctgggactacaggtgcccgccaccacgcccagctaattttttgtatttttcgtagagacagggtttcaccttgtttagccaggatggtctcgatctcctgatctcgtgatccgcccacctcagcctcccaaagtgctgggattacaggcrtgagccaccgtgcctggccaagaatattctttagatataaaaatataaagtactgattcatgccacaatatggatgaactttggaaacaggtcaagtgaaggaatccagtaacaaaagaccacatattatatgattccacttatatgaaatgagaagaataaacaaatccatagacacagaaaatagaacagtggttgtcaggggtgcaggggaggttgaaatagaaagtaactgcttatgggaatgggaattctttgggggatgatgaaaatgttctggaattagatagtggtgattgttgcataaccttgtggaaatactaaaaactactaaattgtacatttttaaataatgaattttataatatgtgaattatatctcaatttttaaaatactggctacttcagggaaaagagaagtaattgcctgaacaaggcatggaggaggcttcagaggacataaaaatactttttaaaatcttgatcctagtagcagttacatggtatatacatatgcaaaaatttattaatctgcatacttatgacttgaacactttacatgtgtgcacgtgtatatacctttctatgataaaatacatgaaaaattattactgttactttctccaaccactaaaaatattgactttaggcaaatttgatcaaaattaatttgcactatctgtagagaagaacatctcatgagccataagtacttcgtttcatttaacaactacatgggcctggtatagagtgtctactatatgggggacatgtataggaggttgcatttaaaaatggctccaaaaagtttccacatgcaggttacttgcttatctcactaggaagacaagacaaatcattggcattttgcaacaggaagccagcttcaggggaaaatataggcagcagctctgaggggggtatataaaaggaatgcttggggaacaatgagttggtttacataggccaaagcaaagtgaaactaatcaattatgcaattatttaattaactttatgaattgtgaaacctctatcttcatgtggttaattcagcttttctttatttttttgtcattccattaagtaatttattttgttatatactttttttttttttgagatggagtctcactctgtcacccaggctggagtgcagtgggggtttgttgtacagattatttcatcagccaggtattaagcctaatacccattagttatttttcctgatcctctcccttcacccaccctccatcttccactaggcctcagtgtgtggtgttcacctctatgtgtccatgtgtgctcatcatttagctctcccttataagtgagaacatgcagtatttggttttctgtttctgccttagtttgctcaggataatggccttgagctccatctatgtccttgaaaacgacatgatctcattcttttttatggttgcatagtatttcatggtgcatatgtaccacattttctttattcaatctatcattgatggctatttacattgattccatgtctttgctattgtgaatagtgacaatgaacatatacatgcatgtgtcttcctaatagaatgatttatattctttggggtgtatacccagtaataggattactgggtcaaatttatattctttggggcatatatgcagtaatgggattactgggtcaaatggtatttctgtttttaggtctttgaggaatcaccacactgtcttccatgatggttgaactaatttacactcccaccaacagtgtataagagttcctttctctccacaacctcaccagcatctattactttttgactttttaataatagccattctgactgctgtgagatggtatcttgttaaatttgcaagaaaaaaaaaacccttaaaaaagcgggcaaaggacatgaaaagacacttttcaaaagatgacatatgtgcagccaacaatcatatgggaaaaaaaaaagcttttcttaaataacaggtacatgataatgatttctataattaaatatagggtacattatcttaactaaytttgtatcaatgctattgataagacttgaaaacagaacagtaaacactgctagttgtttacttagtaatatatgtgctatcatagtaattaaaatgctaggaaccaaaaattagcaaacttttcttatttgcatgagcccattttgtaaacacaggggaaatatatttttttaactttaagaaatgcctttaaagctcatcagtattctacatgttagacatcaaactatcatctttttgaaagagcatattatgctcacattatttaaaggggctttagggcaataagccctaacttgaattttagtttatgtattatttacattgctgtctgtcaccaatgtcttcagagctgaaaaccttgacatgtcagtaatattatttattcagacataattttcattatccataaaaatagccatgaatatcagaataagtaaaaatatccatgagtagcaaaaaagctgtcacagagtatacagatttcatatgtaaaagagaccctcaagcatctcttaaagcctcgaataattctatccgtctcaaatcctgcaaacatgatctactttgtgcccatggcagatcgaagrcagcaaattgataaaaatgttcctggaggtgaatgtactgatggtaaggaaaaaccatagaccacagcctaatgccaaagaaatattcaaaaagctaaagcataataatgaacatgtggaaaccaaagttaaaaacacaataacattttcaatgtgtccacagaaaatgaaatacttaggtataaatgtaataaaatatggacaagagctgtatcctaaaaattacatttgatgaaattgatgaaagaaatcaaggaatttgtggagagatataccatgtkaataaattggaaggcctaaaacagtaaatatgtgaattgtccctaaattaacctttacatttatgcaactcttataaaaatcccagaaaattttctttgtagatattgataagcttattctaaaattcatacattaaggcactacacctagaagacctaagaccactgaaaaacgattaaggaggagaaatcactctatccaatgttaggcataccttatagctatagtaattaagacagcgtgatgttggcagagggacagacacatagatcgatggaacaggatagaaaacccagaaatatacsaacacagatatgctcaactaagtttttaccaaggagcaaaagcattttaacagaggaaagatagtatttcaaccaactgtgctggagaaattagacatcatctagcaaaaagcaaacaatcaaaaaagcttaacctcaacctaaccctcaaaccttacatacacattttcaaaaatgtatcaggacttaagtgtactacgtaaaatgaaaaaaaaaaaagctttttagaaaaagagaagaaaatatttaggaccagggccagttagagtcctaaaccttgacaccaaatgtacaatccataaaatgaattttatcgatcattttcatagatagagtaggtacacacattaaaagaaataaaaaagaacaccaaaaatttaatcctttaaaaaaccatacagtgcaaatactattatctctatttcacaaaggttaataacacatccatggtstgggtgaatttaaagtcctctttctctttctataacagcattccttctggataccraaataataaacagaaatytattctaggyccagttgtaatggttggaggtgtacctgactgtagaatcctggtctaattcagcatgctctccagtatggttctcacaactccacctggctcttttggaaacatttcctgaaacaccctcaaattgtgaccctggactcctctgtggagtccaccctatcctacaacacttctatcaatttatagcaacatgtccacctgtcccttgttccaacttttctaaccttttgatattatttctgttccttgaattgaccattgatcttatcctactcacttccataataagtataatcattttctgcacttagattatcccttttcaaaagtcaaaatttttctgtttcagagtaattgaatcagaaagctcatacgttgccctgatatgaggtacagattgtcatgctacaccttattagaacactgagagattgggggtatgagtaatggagtcatggtgaaattaatacctctaaacacccagcagtcaaattcatgcacagtctctgttagcagcagttcattaacttaattatgatccccaaaccactggccatcctcaacacttccacactatccatttaacccctcctgtcttcactttttgaaaggccagcagaaattcctattggtcattattataaacacttcakattattctttctccatcatgtcatctctgatttactcctttctggctagataacatcacataattctgctgaatggttttgctttaaaatgatgagtataatcttaaaattggcattcatcattatctagaattactattatatttctctgacatttatgcatccctgcttgtcaatatgactatttcatacgttttcccctttcttcaatcgtcccctaaatctactcattatttcctcttatttgttatttaaaaacaatagaagctggctttctttcagcttaatgatctgccttgcagcaaacgaatctttctatgcagagcaactataaaccttgataaaacacaaaaagcaaagaaaaaaacttaaaaaaaatctgaaaacatcaaacatacagaaaaacatccaggatttaaccaatcccagagagaaaaaaaaattcaccaagatgagccccaaattctgtttcattgtttccctatagactatatttactaatttataagtgatgcagacatagtttcagatgctgagcaaaaatttcagcagttcagggctaccaagacaaccaatgcttgagattccaagattttcaagaaaaagaaaccacagagacatgagcaagagtctgaatacttttcccctaaaggcgttcactcattcttaagcaccacaggtcaaaacgtggtaaaactaagcagtttatggaaatcttactgtgctgaaaatacaaagtttggagttcagggcctacaaggtaagaggagcattagtaaacaaagttttagctgggattcctgaaatattacatgcaaaatagaatacttcagtacttcaaaaaacgctttttttttactttagcaataaaagttttatatattgaaacatttttcaccttaaaaagaacatgcttaatttaaaagtccacaattgtgaagatttattttttatgattattactttattcttttctacttttattttacattcaggggtacacatgctgttttattacttgggtatattgtgtgatgctgaagttcagtaaacgaatgatcttgtcacccaggtactgagcacactatccaatagttagtttttcaaccattgtccttctccctccctgtctcctctagtagtccccagtctattgttgccatctttacgtccatgagtacccaatcttttgtttccacttataagtggaaacacctctggttttctgtgttaattcacctaggataatggcctccagctgcatccatgttactgcaaaggacacgatttcattgttttttttatggctgtatrgtttcccatggtgtatatgtatcacattttctttaatccaccattgatgggcacttaggttgatcccatgtctttgctattgtgaacagcactgcaatgaacatatgggtgtaygtgtcttttcagtagaacgatttgttttcttttgcatatatacctagtaattgaaattgctggatggaatggtagttctgttttaagtcctttgagaaatctccaaactcctttctacagtggttgaactaatttacgttcccaccaacagtatggaaatcttactgtgcatatatgtatatatgtgtttcctgttctacgaagccttgccagcatctgttgtttttgactttttaattatagccattctgactgatgtgaaatggtatatcattgtggttttgatttgcatttctctgatgataagggatgtggagtatttttttcatatttttttttgaccacttgtatgccttcttttgagaaatctcttactacattaaactaaccgacacctagtctaatttccttccagaagacaaagaaaaatctctctggagaaaggtgacttcatcaagagtcacatcactttttcatattcagcatctaataaaaatttaacaggcaaactaagacaggaccaagagaaaaaataggcaatacaaacacatccataggtgattaacatattgaacttgtcagattattgctttttaaaatatagtctatatatttccagatggaaaggtttctctttctttcttcattcattcattcttcctttcttttttctttctgtctctttgttcctttctttctttctctcttactttgtctctcttgcttttatccttcrttctcttgctccttcccttacttcctccctcctgccttcctgtttcccttttttctactataatgagagaacaygctttcatttgttctgcctaattgaaatttttgaggttctcgttgtgatcaaatatacagtttaaaatttccatatttatttgaaaggaactttatattctatattatcagagtgcaaatttaggtatctatcaataagctgtagcttactgactttaatgtttaagttacctacatccattcttatttttgtgtacctgactgaaagtgatgtcttaaagtattatattatatggacttaaagtggactgaaaatgctgtgttaaagtgtcgtattatttttgtgctatttaaactcttctttcatctatattttctattttatgaaattacagctatgttatttgtcacatatatattaactcctatagcttcattgtgaatcatgttctttatgcagccaaatgcattttgccaaatttccttatttatttcatttgcctggtatacctttacccatctctttatgtttggcttttattattgttgagattttgtgtgtgtgtgtgtgcgtgcrtgcatgkgtgtgtgtgtgtgtgtgtgtgtgtgtgtgtgtgtcagcattttcaaggattttcctttgtaagccaatctaaaaatatttttcttctaataggtgagttaagcataactggtaggttagggctaagctctatcttatatttactatgttagcatataaatatgtatctttataatatagttktttgttctgttttttactttaaaagatgtatattgtaatgtatttmttttgatatttaaaacttttgtattaaaacttacctacatataacccttaatcttttttccttactaatgatatctgtaagatcaagttgattttccttctagtattcatgtggttatctcttttctctccctattttggtaattttgttgcatctattttatcagagcatttatagttactttcatcatatgtattttactttactattttttctgtattttataaaaatttttcatgtttaaggaatttaaacatgaaacgacttcatgaatcagaagttttaaaaaatcagtgtagaaatagaaatatagggggtgatcaagatcaaaagatacatgaaaggagaaaagaaaaataatcttataaatgaagactaacttacaaggtgcccacactatatcttctattatgtaaggagcacaagaataaatatagaagagtaaatgaaaagattcaaaaaacttaatgcaactaaaacataaaaagttgtataaaaggaacaaaaatgtaataaagaagacaggtgtaaaggcatttaaagacaggtgtttatatttgcaaacaaatatattcagtgcttaccaacagtctctagcaatgtttccccaataatatcttggctgtttcattcttttactttgctacccaaagtacggtttgtgagccaggagcattggcatcaccttgccttggtgcttgttagaaacacagattcttcactcacatctctagactaataatctccatttttaacaaagtctgcttgcaattcccatgtgtattaacatttgaaagcactgtcataacagaatcatcgaagtaagtctctgaatacaatattccctgagatcattaatatttttctattttctgtaaactttattcataaaggacagcttgctgaaatataaaattcttaactcacacatttttcttgaggatctaaaaaatgttgctctattgttgttttgttgtatatattactatcaagaagtctgttgtcaactttgtcattttactctgtaagtgaccaggttttttgtctgattttatgatactttaaaatcaaattgttcttgtagaatatactttgaagttgattacaacaggtcaattttcccaggtatacaatgggccagatatgtagctttgggtttttgtttgtttgtttcagtgatgctttcctgaattatagtttagaagttagttctgttttatttcatgttttgatgggcaccaactatacacatattggatctttacacatgtcttctctattacatgtttgcacccttcatacctctttttatgttttagttccattaatttttttgaattgcttcatttactcctctatatttgttcttatgtcccttacataatatgagacaaaatgtgggcaccttataaatgaagtcagtcttcatttataagattatttttcttcttttgttcatttatcttctgaccttgatcagcccctatatttctatttctatactgatttttttggatttctgactcatgaagtattttaatattttaaattccttgtttttctatatttaatttaatctgtgtattatattagtgttttgcattatagctctttgtgggagataggctttcaggttgaaaagtctgatttttattacctgatttcttttctagaatcattatgtgaattatttctatttatgcttacatttttcttaactagcaatagttgctgtattaatccattttcacactgctataaagaactacctgagactgggtaatttatgtagagatgaggtttaattgattcacagttgcacatgactgggaaggcttaaggaaacttgcaatcatggcagaaagggaaggggaaggaaggaccttcttcacatggtggcaggcaagtaagcaagcaaggagggaactgccaaacacttttaaaccatcagatcttgtgagaactcactcactgtcatgagagaacagcatggaggaaacttcccccatgatcaaatcacctcctacaggtccctctataacatgtggggattacaatttaagatgagatttgggtggggacacagacccaaagcatatcattccatccctggcccctcccaaacctcatgtccttctcacatttcaaaacacaatcacaccttcccaacagtcccccaaagtctwaagtcattccagcattaacccaaaaacccaagtccaaagtctcatcttagacaaggcaagttccttctgcctatgagcctgtaaaatcaaaaacaagttactgccaagayacaataaggatacaggcattgggtaaatgctcccactccaaaaagggagaaatgggtcaaaacaaaggagttccaggactttgtyttgaagtctgaagttcagtagggcagccattaaaccttaaagctcaaaaatawtctcctttgatcccatgtctaacatccaaggcatactgatgaaaagtgtgggctcccaaggccttgggtagctgtgcacctgacgttttgcaggatacagcccccatagctgctttcatgggctggtgttgagtgcctgtggcctttccaggggcacagtgcaagctctccatggatctaccattctggggtcgggaggacagtggccctcttctcacagcttcactaggaagtaccccagtgaagtccctctgggggctccaaccccatatttcacctctgcactgccctagcagaggttctccctaagggctccacccctgcagcaggcttctgcctagacatccaggcatttccatacatcctctgaaatctaggggaaggctcccaaagtttgagtcttgtcttatgtgcacccacaggccctataccacacagaagtcaccaacgcttggggcttgcaccctctgaagcaatggctcaggctgcactttggccccttttagccatggctggagttggagtatctgggatgcagggcaccatgtcctgaggctgcacagagcagcagagctctgggcctggaccactaaaccagttttccctcctaggccttcgggtctgtcatggggggatctgccctgaagatctccgaaattccctgaagacattttccccattgtcttggctattaacattcggtttctctttacttatgcaaatgtatgcacctgaaggcttgaatttcctccagaaaatgggtttttcttttctaccacatggtcaggctgcaaattttctaaacttttatgctctgcttcacttttaaacataagtttcaatgtcagattatctcttcatgaacggatattactgtatactttcagaaaaagtcaggtcacgtcttgaatgctttgctgcttagaaatttcttctgccaggtaccctaaatcatctctctcaagttcaaagttccatacatctctagggcaggggcaaaatgccaccagtctctttgctaaatcatagcaaaagtgacctttactccagttcccaataatttcctcatcttcatctaagaccacctcagcctggatttcattgtcgatatcactgttagcattttggtcaaaaccatttaacaagtctctaggaagttctaaactttcccatatcttcctgtcttcttctgagccctccaactattccaacctctgcccattacccacttccaaagccacttctatagttgcaagttatctttatagtagtacctcactcttctggtatcagtttcctgtattagttttcacactgttatagagagctacctaagactggataatttatgaagaaaaaggtttaatttactcacagttctgcatgctgaggaggcctcaggaaacatacagtcatggcaaaggggaaggtgaagcaacgaccttattcacatggtggcaggagagtaagcgagcaagaggggaactgccacacacttttaaaccatcggatcttgtgagaactcactcactatcatgagagaacagcatggaggaaaccaccccccgatccaggatccagtcacctcccagcagatccctccctaagatgtgagtattaaaattcgagatgagatttgggtggggacatggagccaaaccatatcaattggtgatcctctgtgtggcagaaaaggaagagttaggtcaagggaggatgcaagggaagatattttttctgtatattaccagattttttttcaagagcatcctcttacgtcactaaacaatgctatttggatctgacttctgatatcctgttcattaggttccttatctaaaacatttccttacttccttcccttcctcgctaagcttccaaggaaagcattgcttttccaaggctttccttatccccagaagtgtggccttcccaaaactgtttcctcttacccatgcattttctaagccatctgactgcacagtagcacgtcccttgatccaccggcctcagtcctgttcttagtattttccatttaggacaggattcttttttctgctagtgaaccctggtggctatttgttctcctccataagtaacaaaacatctctcttcctctcttttgtgtaatttcctcatgactctcagctctggtgtgagcctggaagcctactttattggtttggataggtatttcccaagggtcagtttaatgtatcaaatttgcagtattttctgttttcatctgaactgtagctacactatgaaagtgactttatttgttccccctcttaatctgtaaatttagagaaaagatttctgagcacatttaggccaccataattaacctatggaaatccagaggtaagcactgggttttttagttgtatttccctwactactgctgaagttaagcttgtttacatgttcatcgaccatttatatttctgcatttgagaactgtctgtatctcttgtctatgtttctattatgttatccatatatttcttactgattttcaagaatcctttatgtattgtgttgctaatgctttactgattttgtatatttcaatatgttctcccagtttgtagattattttttcacttttcttgtaatgtgttttgatgaacataaattatttatttattttttgagatacaatctcactctgtcatccagggtgaagtacagtggcataatcatggcttcctgcagcctcaacctccctggctcaagaaatcctcccacctgagcctcctgagtagctgaggctacaggcatgtgccaccatgtctggctarttttttttcttattttttgtagagacaaagtctcactatgttacccagggtggtcttaaactccttggctcaaacaatcctcccaccttggcctcccaaagtgttgggattacaggcatgagccaccacacttggcctaaattactaacttcaatagttacatttatcgatatttctttaccatttagcccacttgtgtcatattaaagcaatttaaaacacataatcataaaaatcgtctatatattatttttttaaattacagtaagaatgtttaacatgaaatttaccctactattaaactttttagctatataatacagtagtaataattataagcataatgttgtacagcagttctctagaacttaatcatcttgtgtaactgaaacttgtatgcattgaatagcaactccccattttcctcctctgtttctatgtgtttgactactttagatacctcaaataagtggtatcatgcggtatttgtcctttaatgattggtttatttcacttagcataatgtcctcaaggtttatctttttgatcatctatggcaagatttccttctttctatagatgaattatatatcgttgttcgtatttagcagattttctttttccacttatccattcatgggcatttaagttgtttccacatcttggctacggtgaataatactaaaatgatcatggaaatataaacatctgatattttgagttcgattcttttggataaatacccaggagtgggattgttagatcatatagtggttctatattttaattttttgaagaaactccgtcctgttttccatagcagctatatcatttttacattcccaccaacaatatataagcattccagtttctctatatccttgccaacacttgttatattttcattttttggtaatagccatcctggcagttgacaggtaatatctcactgtggttttggtttaaatttccctgatgattagtgatgttgggcacctttgcatatacttgatgtacctgtcagccatttgtatgttttcttaggagaaatgtttatttaagtcctttgcccatttttaaatttggttatttgtgggtttttgctattgaattgatagtttcttatcaattttgggtattaaccccatatctgatttatagtttatacatattttttcttattatataggttgctttttcattctgttaattgtttcgttggtcctacagaagttttttagtttgatgtagtcccactattctctgttttttttggtcccctcactatctagttttggttttgttgattttgcttttagtgtcacattcaagaatcattgtcaaaaccaatgtaaagaagattttctcatatgttttcttctagtagttttagtttcaggtcttatgtttaagtctttaatccattttgtgttgatttttatgtataatataggggtttaagttcattattttgaatatggatatccagctttcccaataccatttatttaagaggctatcctttccccactatgtactactgaagcttttgtcaacgattagttgaccgtatgtgcatgggtttatttatggtctttctattctgttccatacatctgtctgtatgccaggaccatactgttttaattattctagtttgtaaaatattttgaaatcagtaagtgtaatgcctttagctttgtttttctttctcaagattgctttggttatttggagtcctttggggttccatcgttttttctactcttattttaaaatgccactttttaaatagttaattcttaaagttcagaattgattgatgtggtgtaaaggagagatcaaactaatttttgcccatacaggtaaatattaatcctaataacattcattaaatgtttccttctttccccacagatctaaatttgcctgtctttatcatatataaaatctccacgtatgtatgaggttatttttagaatcattatcttgtgccattatcatatgtcagtttgatggtccctttgaccaagtcccactgtcttaattaccttacattactccttacctcactccagtgttgcatctgtctctactactctaacaaatctgcctgtatcaaatccaccagtaatctccatgttgtaaaatccaaatggaacttttttacgttttactttatttatcttttagaagactgcaaggcagtttttcattttctctcgtggcttttataaaatcaaacaattcagcttttcatctaatatcaccagccactcctgagtatcctttctggccttttctcatctacttaacatctaagtgtacaagtacctcaaagctcgatcttaagctcttttccttttcctagctagaatgtcattttgagtgatcataactacctattcatggccttattaatggctccaaatttatgtgtctttctgaactccagaattacattcacggatataataaatatttattgaacacatcccacttaccaaacactaatctaggcaataattattcagcagtgaacaaaagatacaaaactccctgcccccatggactatttattgtactagagggacaattaacaaagaatatataagtgaacttctgtatcatacttcagattttgatgagcctcatgaagaaaaccaaggcaggcaaggtacataagagttttgagatgatgatactgtaatttttaaataggatagaaatctgacaattggactagagatctaaaaagtctyaagtggaggtcagcaaactctgaaggccaaattggactcatcatcggtatttgtacagccactgagtatataatggtttctatgtttttaaatagttatcaaaaatcaaaagaaaaaataacatttaatggtatgtgagaaaaaatggaattcaaattaatacgtccacaaataatgttttactgggacacaacaatgttcaattatttacatactgtctatggctcctttcatgcttctatggcaaagttgagtagtggaggcaaagaccatataacccataaaagctaaactgtttactatccggccctttagagaaaaaattttctgatccctcatcttaacgaatatactctactgcttgcaaacaaaaagcttcacatgataaaggtctttttgaattcaatataataagaaaataaacaaatctttagacaaatgtgtttatttctttcagtagactaaagaatttcactttttaattcagcttccaaaagactcgaaagctcaatacaaccaagctcagtaacaacgacattccaggtggctggacacctctattgtgtttaaccatttaccaacatgtgtatgtgtaaatgttgatgtacatgggttttactgtcttctttttacattgattttcattttatgagaagcctataattttgtgtgaaagtcattacaaatacaaacataaggaagagttatatttggtgtattattttaagaggtcattcttaaaattgtaatgacccaactgcttttgtctcttataggataaaaaattatgagattaaacaagtacacatctaagttcatgaggaaattcattgctcctccatgatgaaaatattacccaattaatgtaatacataatattcttaggaatactttaagaaaaaatatgtaatatcatagccttttaaaaagattctttaaaagttgtagatggaagtgtaagctttagtcaatttgaaactttacttcaaatattgacggcataactgatgccttgacactaacattcacattttttttatttagtaagtaaaggtcataacattaagatgtgggtttctctgccagctcttctgatctcctataaaataccttaaaaaataaagttacaagaaacaaaaattagactgaaggggtttttgtttgcttgcttgcttgttttggttttttttgttttacttttgctacgtttcaattttttatgattgccctcaaaaaaaacgaaataaatgaaattcttcctctgtacatttgtaggatgatttcattacaagaatttttttaaaaagataaatttaatatcaggaatattctagaattctgccgaatttagattacagaacaggtctttttattgtatatatgtgttctatgtaaataacaagcttgacaccaggcctattattaatatattcacttggtgctttcttacaggagtactgtgtggttcttggcttgactaagatcccatgattctctgcaatctattcattaaagtgataagtttttaagggaacttatatgcttaaggaatttcagaaaataaaatttgtatatatttttgaaatgtacctgtacaaatgaaagcaggttttcctaagaccaataccagaaaagtacaataacattttttaaatattagaaaagcctagtattaatctgatattcatcccaagtcaggcaacataagctcactaaaattccaagtttcattgttcctggttgtcactataccaattcagttcagtaaaattacatatcccttaccaattaataaaaacaaaaacaaaaattacaatcatagctattatttggcttcagagtacttgcaaagtagtaaagatcactctaattataacatattcrtaaggattcagagatttcaatatatcccaaagcacagtatgtttagggatagtgtatttactcactattctcaatgcaggcaagagccatccttctctatgttaagaaagaaaaccaaagttaaaaggataaaagaatctcctctttcacctaaaatactaacaactgcataagcattttaatttttattagggaattgaaaaaatattaattatttatgcaattatttttatctgtctcctctactagattgtaagtttcatgagggcaaggaccatgcctatcttggtcacaggtgcatctccagtgcctgatgtactgcctggaacatacggggcatggagtaggtgagtgatttagggcagagggcataaagtttgaagtcagaatcctaaaaatcagaatcaaactttgactctaccgtttattaggtgtataatcttggataatttatttatttttcagaatctccttattgtttaaatggagactataacgcctgccacataggatgtttgtgatcattacaggaactcaggaatatataacactaagaagtgcttagagatgggcacagtccctaaatgtgtgttcccttaccctctgactcttggtctgcactcttccaggtggcccacacctgaaggccaagtgtctctttgtgtaaccacaaaatagtgccaggaggtcaaagaaagtaaaaatgtacttgttcagtcctactagactgtgagtcctgcgtggcaggaactgcctcatatccaccactgtcattccagagactggaacaatgtcttgaatgtaagcaggggcttaatggacatttactattaaatactgaaatggggaagtatatctttcaagtaaatatcaacacatacatcaatatctacctaaatatttgtgaattcttggttaaacttccggtcaggcctcagctttcagcataaaagaattttacctccttttacaattttccatgttttcctctaagcataaaatattttattacayagtaaataagccatcattaaatcaaaatttctctaacagaaaacttaaatgatgatgaagcattaatccttaatagtaaaaatgatttgaagtttgaggtttggagttttgtttgcttccctgttatayggaaggacagcactcaagtgtattgagaatggctgaataaatgaactacttctgatcatactgtcttctatgatttatcaaattatatgaatcagtaaaaacattgtaaaattatgtgacagttgattttactactttaccaggcactctgaaaccaaataataactaccagattaaacaagtgaagtctctacggatgtactgacatttcaaattgtgttattagacaagagggatcttaattgaaacagktggatgtaacactgggagttgggctgggttgtttctcatttaacagtgactggttttccctaggcaggctgcttcccattaacttctcatttattatcaagatgaagtttgatacaagggttacaatattaaactactgatttaaattatgtcttctgacttcttccttggcaccaaaaatcactaatatttctcactaactctttcgaaacatgcatttaattttcaaccttaaaaatcttggaaaagatcatcaagcatatatattctgagactaagtctgattggtcatccagccggaatacaggaactagcctagaagacatgttaactagaacaggagactccctactgctggtgcagtattttattcatcatattccaactgcactacctctgattcatactcacactgtggaatcctttggttttcatgctggtttctaggagtggaatctctaaccctgcattagataatctaggtccaaggtctctaattgtttctcatragcccatcatgccycatctaagcaacctgaacttgttttcagatggtctctgctgaatggttgaactctgagattaggacaatacaatttcagtcaaaagctaatgggatttatctggggtgcgtagtatgaagatgagtgggaaggataaggaaagtttatttagaagaataaacacattgaaaagagccataattaaggtgtgataaggagacacttgtctaccagatactgatattcaacaagcagcagagtgactaagaacattgcctttacagtgcagacatagtacaaaatccaagtttccctgtgtgtgatmtaagccacgtcatttaacctcttacagcccagtgtctgtatcagtaaatgggaataattatagtatacatgtgttggaaaragtaaacattaaacatgctaagattattggccttctgaattcacaaagattaaaagaaaattaatacctagtactgacaatgttattctgaaaaaagacatatgtaaattaatgttggttgtagctcatttgatactttagaagaaataagctacaaaaataataaaaacaaaaaaatgtacataaccttggacttggcaccccttattctcagtgtttatcttaatgtactcattagacatcttaaatattcaataatatgtggatgatgtaatacagacatagaatagactacaaatgttattatattgtatacttataacataaattgatgtttacaaaatcatacagataaatgtggcacaatatacttctgtaagtcgtagcattatgagtgacatcatattttctttttctagctcttttttctaattttatgtaacagtcatgtattcaactaaacaagcacttttgaaaacaaaatggttatataaatattaacacttattcataataaataatatattctaacatttatttatccttgagagaagtagtagtgggagtaaagctataccctgatctgaatatattctgatatttgccctgcagactcccctgtgccatctgtgctgtcacaatacatatgggttaagtctgtggataatgccctcaaaggcagcagacccacatatttatttagcattattctaaacaaatatgtgatgattagttcaatcatatttgggtaccaatatgttcctggatcaatttacgtgttgttattggtattagagtaatattttaaaccatcatgactattcagtggaaatcattctattatttacatggaacacacagaccatttaatattattaatttatttaatgagttattagtagttaatagattaactaggtatttgaattccctccttacatttgttttccaccttcagaccagttatttgactgttagcacacaggtaatttgaattttattataaaataggtgaaaagtttcagcttctaacaatctttcacrtccaaattctattgtttttttctattactttccttgactctcatcttcacaacttaaatgcagtctctccttttttaaaatctgacatggcttcctgtattgtatttcaagcatcatcacaatataaaatcatatgtttatcagggtaactattgaagatttttctcccccatcagactctgaacaacataagagcagggattatgtttatttctatttatcactctatagcaaggaccacaaaaccctctaataccatagtttccttccatatgaatgcaaattttaaaaatggctatgtccatatttttaaattctcccattatatagatctttcttaaatttatatatgccatctctcagagatgtcccagtataaactagggacataaagacttcctcaaggaagtataaggtatagagaaataaggaaggttgctattatgagaaaagaagaaaatgcctcctgaaggtcttaagaaagaagtcaagaaccataaaaagcaaagctgagaggaagccaacaggttgcatagccatgcagccctctccttgactccagacccatgcccaggaggggacatggagcagcaccccaggcagctggcaatgaaccagatgcatctctttcttttttctttttcttttctgttttttgttttgttttgttttgtttttcttttttcttttttttctttttttttttttttttttttttgagacggagtcttgctctgtagccaggctggartgcagtggcacaattttggctcactgcaaactctgcctcctgggttcaagtgattctcctgtctcagcctccgaagtagctggattacaagtacgcgccaccacatccagctaatttttgtatttttagtagasacagggtttcaccatgttgtccaggatggtctcgctcctgacctcatgatccactcacrttgacctccccasgtgctaggattacaggcatgagctgccacaccctgcagaatctctttcttacataacaatttttccttttatttcaatctattcactatatttttctacaacctgttgctgccttctgctgtgccagacaatgatgcccatggttatttggcactactagtaaaggaactaaaagtggattttcagtactgaatataaattatataaatgaatacaaaatcaaaagcaatcagcctgagccaaaagacaggcatcttttagtcattaycattaaaaaaaaatcaagaaagagatgggagagtgagtggagaggagaaagctacaaaaagcactggatgagaaatgaaaaataacaaacgcagtcaaataataataacaacagaaatcaaagaaattgaaacaytgtttcttaaaagtttagtttataaaattcaaatctgcataattctacttttaccttaaaaactgaaaaagtctcggaagcattatggtctcatttaaaaataagtgtatcaatagccattactgcagatttacggcagtggaagtttgaaaacagatcaatcaaggcagctcagaatacaataataggttggatacaaacacctactcatactataacactgtctgcagcatgtggaagtattcatggtttaatttttccccaaagtctaacgtatatttctgtacaatgtgtatatatatagaaatatgtcattcatccaaattactccacaattgatgttctattttcatctatgcttaaataaaacagtgcccactgaataccaagcaaaaactaagatttaaaatggtgccaggcataacacagtgcctgtagtttataacctgtaaaggatgaaatgtattataaccgcaatagactaaattatctgctacctcttattattgcctaccttgcgcaagcaccatgtgggcatttttcacctcccagccaactaagtaaatgtggctggtggtaactccaatacagatgtgaacacaaaagcgtggaacctgatgcttatggtctagatgaagtagggtactgagcaagttatccatggacctctgtaaacaatcctaccttctcatttctggactgtggctatcaaacgattcctttggtccttcctcagaagctagtatcagagtgatgagaaaatgaaatataaattagcccacactattacgctaaatttcaacgtgatacaagaaaagaatgtgcttaatattatccccaaagataggtttgaatcaaataacacagcctaagatttgacacatgaaaagtttactaataattatattagctgacaataatgtaaagcttgcaatggaaccctcttaaactacgctaaaagccatgaaaactaatatatatgtttgagtgttcgaaattactattataaaaagtattgcttaaagttttcatctgcttgtaatgttttcaataagccactggctgttattttacttaacttgtgatacgtgaaacgaaaaaactgaggtttcaaataaagtctactttctcacataaaatgtgtaggtcagtcagaaaagaaaaatgtcaataataattctgaatgcttactttgtaatatttcagtaggtaacaactgagaaacacatgtagatgtaacaatagttaagttctctgattacgtttaggtactgatggaaaaattatagttttcatatatttgttgcataatgctttcaaataataagctgaagaatagtttcttgcaatgatatgctggtttcttataatagtttcttaatagcgtctcttgctcaacaagcaggtaactcaaagaccacagggaaaactactacagttgtcccatactggcctggcatagcccctctattagacattctgaatcctaattttttaaggtagtatatgttctatcaccttggaaaagccctttcatgtcatatgtaaaactacagtacttagctgtcctaataaaaagttgttggaaaataattagtgaattattacagatttttatactataattctttttatataaaatcccttaaatacatatatgtaaattgtaaatgagatgtaatatataatagtactccaaatcattcagacacaatcatataatcttactgtcaggacctgcaagttcatttagtactatgttctacatatgtgcctaaatcttttactggcagactgtgaatttcctcctgaaacagatcattccatttttaaaaatgccaaatacttcaacttacctgtcatatctctcccaagtcttctctcagctaaactaaatattcatatttattttaactacccatcatataacaaaattccaagaactttgtgccatcatgcttatctcctggtaagtgtgctgctttataggatgacatttcttttaaaatatccagcagaagttgaacacaatatccaaacacaatctatgatctgattaaaatgggctgtactggcatgatcattatctttcttgattcaaaggctagattacttttagtgcatcttaagaccaattcagctttattttattatattcacatggatatatttacatggctttttttttttttttttttttgacagtatctcactctgttgcccaggctggagtacagtggggtgatctcagctcactgcagcctcctcctcccgggttcaagcaattctcctgcctcagcctcctgagtagctgggactacaggcgtgcaccaccacgcccagctaatttttgtatttttagtagagacgggatttcaccatgttggccaggatggtctcgatctcctcacctcgtgatccgcctgcctcagcctcccaaagtgctgggattacaggcgtgagccactgagcccggcccctacatggcttttaaatacagcacatttgtcggtggagttttcttacaagactagtgcctttggtcttggcttcaactatgatatataccatcacgggaacctcttgaagtattttaatatcgaaccaagaaaatgatgacatgtatgaaaatataatccatttttcatatctagtaatacgatgaaatatttaaacatcatttcccaaattaaaaaaatatacaaaattaaactgtcaaaaggaaattaacttgtaaaaaatatatatattgcctactgtatttgaaagcagagtgcttctctgatagattcggttaaaagataataaaaaattttaaaacgttcaaaatttcaatttgtttaaattctaaaggcatactcctacctgatttttttgtgtaattctgctgggacatttcatataatagcatcttcctactgataccttatgtttattataaaacatatgaaacaaaaatgaagactaaagagctttttctgatttttttcaagctacatgttagagaaaaaagtaagatattggaaaatacaaaaggtaaggttttagacctttcattgtatgcaacaagctgaaaaaaatccagtatgatgggaaatatgtggtctacacattgttttacaggtcttacattttttcacatgttccaaaaagctgaaaataaagtccccagccatttacttcatttgaattatttcccagcaaagtcatttcaaactgtggggtcgaatttgttgagcttcaaccatcatcctttctattttttcccataatctcctcttccccttttaaatcctcacttattccacccatttcttcttccttcatgtacacagaatattagcaagcagcaaagcccagatgatggatttggctattaaatttaaaaaaaatctaaagcaaccgtactaatgagcagtcaataacatattttcaactaaataaaattgaactaggcactgttctatattaaaaaatattgcctaaagcaaactttcatgatagaaatgctgcaatctccacatcagtacagattttaatgccacaattatattagagaaagcattattcacataagkcacattaagacagaattaaatcacagtgattaatttgcttgtgggttaaagctgaattcaaaaatctataaaactaaatatgtggaaatgatagaaggaaatctcagtcattggggcgaaggttttttctctaattagcttcaatgaatcattaaatttctttgtacaagcaattgaaaaaatatacagctattttaaaactaaccagagaagagaagcattaaaacaaagacatttggcttcatatattatatttccttttaaagtatatattcatagttaaatttgataacctctatttaaaatatttgaaaaaaattatcaataaaatataaaataagaaacataaagtaataaaatgtatttggcttatggaggaacaggaagtctaacagaggtctcgaacattaaatactgggtgattgttaaaattcagatacygtttattaaagctacatccaaaagtacatacataattctaagatggtgactgcaattaaggaatttatattattactgtcatcaacctttcattttatttttcctacacttgtattttaacaggtttaatcaatttaactcataatcaaaagtctatggcatagatagataattgatgattgatataaacataaatagataggtagatacacacacacatacatagaaagttttgttacaaaagccatatgtgctcactcgctgctcttttgagaacagactatacaggggacaaaggtggaagcaccggccagttagttggtattagaaaaatccagggaagacatgatggtgatgtggaccaggtgatagaaggtgaatgaaggtggtgagaatcggaggtagagccaaaaggattcagcagaggtttaaatgtgggagattttgtcttaagcaactgaaaggtagtgtttccgttaatttcaatgggaaaaaaatgtgtgtaaaacaggtttttaggagatgattggaagtttggttttggacaacttcactggacatgagtaggcagttggaggggagagtctatagttcagggaatcaagttcaagagaagtatgaacactgggtggtgttggtttaaagtaatgagactgcaggatatcatgaaagaatggaatacagacagaaaagggacgaggcacaaggactgaactctaaaataccaccaaatttaaaatattatcttattcaaattgctttcaagaaatgtgctaccaatttacacacctcccagaatcatacaataatgccagtcaccaacctttgctaagattgggcatcatctttgaccatttaccatattaaaaatgtttctatgtctttttgtttgtttgtttttttaagttttaactctttgttccaagggaaaataagccttttttatgcttattagtaatttgcattctgtcttccataaattacttatgtcctcagatcgtttttctccccaagtattctaattcttcttattaattaataaatcactttacatattaaggtaattaacctttcacttgcaaaatttgttgcaaatgctttatgtcattttcattttcatagttttctagtgtgaaagattttacactttttagcaaaatctatttgtcagttaccttgttatatattccattactttaatatgtacaaagataaattaaatatattcacatattttcttctaatagtttacagtttcttgtttttttgcatttaattctcagtttttctgatatttatgttaggtcatgagtgaagacccttataaatattttcttagatttttagttcattttataatgatattaagtagtatgtcaattccatctttacaattcattctttaacttatattcagtccttatttatagtggaatctagttctgagatatctattccctctcttttctttaattactaattcttttgtctatgcttcaagtctttatttattattgtattgtattattgtattgtatcttttttttttttttttttttttttttttggagacagagtctggctctgcggcccaggctggagtgcagtggtgccatctcagctcactgcaagctccgcctcccgggttcacaccattctcctgcctcagcctctcgagtagctgggactacaggcgcccgccagcacgcccggctaattttttttatttttagtagagacagagtttcacagtgttagccaggatggtctcaatctcctgacctcgtgatccgcccacctcggcctcccaaagtgctgggattacaggcgtgagccaccgcgcccggccctgtattgtatctttattattgtattttaaaattaaatatttttatatattttttatatatatatattatatatataatttatttgttaaatagctgaatgcctaacaggcataggagtcttctgctctagttgtcaggttctttacaaaaccagagagctgaatgacagtttttgttttcctcttgtttagtatagcatatggtgtgtaatctaagaatcatttttaaattcagtctctttgatgatgcaatactagaaatccctacaccccctttctaagcccagaatttggcagatgtctttccttccttctctttccttcagtgctgttaacctagaacttatgcatctgggtagggattttcttaatagactgggataaatcaatacaggcatagagtatgtttcatatatgaacaaggaaacttttatatttgtcacagttatttaaatatgcttctcctattrgtcaaaaacaactttaaggattcctcactcaattaaaagctacatccatgattttttcttatccaaatgctaatcaattttgatatcttaaaatatccccttaaaaaatcttttcattgaaattaaatttttatttcacttttaatattagtctccccatattcgttctattactccattttccttggctactttgctaatcagaagtacctttctttaactgcaaatgaacaaggaaacaaaatattatttaaggcagtccatggtaggtacccagaaatttttccctgccacatggcatgcrcactttgagacacactgcatgccagtgcatcagaccctaactccatcttgaatcagacagttaagcatgtcctcaaggggaggcttgaagacaatctactcggctccattcatgaataactcagtattcaagaatatagagagcaaggactcaaaactctgccctgtactagatttgtgccagaggccctggctcagactcttttcaaatacgtaaaaggccattattccatcatttactgatttttattagttaccatgtggctctattgcattttctggaaaggaaagcttcttgctgagatagtgattgacgaggccggtggttgcctcttgatctgtttcatttaatgtggacttcaacagacaccctgcttttgatgacttaaattctgttactctcaccttcactccaaggaagattctgtttcttctttggatactctctctactaaccatatattggctcagatatacattaatgaaattccatagaaatgtagyttgctttctcccttctgttttcatgcgtactacttcaaggggccatttaactggaaaatttatactgtatcttgtaaaatattgaaaagggagtaaatctcaccccctttcacaattcctccacatagctgcccccaagtatctcacctgcactccctctgaaggcttctctccctcaactcctaagttcctcgtccattccctatgcctccactcaacctattcctaacaacacctgccctggcttaaaacaacttacttacatgttgcttcatgaaattctcctaactaaacatctactttgctcatttgctttttccctttgacattgaaagatgctttttgagcaggtcttaaagaaaaaccgtaagtcaacctcacaaggttaaaagaacaaaaaaaaaaattgtgggaaatggccaggaaagtattatgccatctaattatcacgtgtcaaaaatcagtacctaaaaagaatagtctccaatgatgtttataaagtaaaatagctcaagactggtttcctctaaaactctgtgtacaagctttatttttcatcttctgtatttgatgtgaatcagctgggtgtaggaagtgaggattttttaaaatttggttttatttattttaaggaggatcttgagttcttctttgccccaaatatgagatacatgagaaaaattaaaatcagctccatgaaaaggcaaggaagagattagagataccagatgattggagagggagatatctattttatagatgtgtgtaaggtaaagtggaaaataaagacttataagttctttataaaacatatgagacaggagaaatttaggtggargacagcatagaagacacatacattttaaatttataggcaggaagtctctttctaatttttaaatgagcaaaaaaggcaaagggaaaatcaagaataaattctagcaggaaaaatggcagcactctgagttttagaggaatgcaacaaattactgtgagaggtaataagactgttttggggaaatagaataatgagttattttcacgaactgaattttctaaattgaatgtgatgactggtaataattgatgattaatggttcagtgctttgcaccttctaagcacttaataaatatgactgattgactgatatgtcacttacaaatacagaataacagttacgaagcaattatacaagcaatacgtgactggaaaagcttaatgcatctgaagatcctactaaaatagaaactaaataataacaataataacccataccttttctgtatcaatgccttttgacatggaccatgttgagacaatataatccatgactcgctcactaaggccttttgggacctgatagagttttaggaagtcccgtacattattcagcatctcatggtatcggttggtgttggcatacatttgctggaaaattgttgtaacatttccaaaaatagttgcataaagaagagctgaaagagaagaaatgataaaaataaaacaaatatctcatgtgaaaaaaatacaaatatttgctaaatcaatgaataatttgacagagacatccttataaacttgmaggggtaaatacatgttgaactctgagaagactgcctgacacctggtattcactcagaaaacattaccygcagtaggagaaacatgactttatgagcatgcagagctctagtcaacatgacaaaatgtaagagtcatcttttctgaagaatcagatgatccaaagttataattttctgaagaatcagatgatccaaagttataatttagcctaagaaattctatttgttagtagattaaagttatcctccactttgtcctcctgaatgaagcctaatcaatttaaattcttcagggattgatgatccagtttagaaacatatgctctttctcactgcctgctccttccaatttttggaatacctccctggttataaatatttttgacagaacatcagaaatttagggagtggagacaaattaatgtgcttcatgtttagaaggttctgaagataaagaggtttggagtttttagccaaaataaaactttggcaatgccgagaaattccagttattaaattcatgtaattattccagtgattttttttattccatcattttaattaaatgtaaagttagcccactgacaattgtcattcatctacaggggactacaggtggtatagggtatttcaaagccccaactgctccctcctcctcaatccataattcaccaactcttctttctccagacctagtcaggctattaatgctgacaggatcctacaaaagcttatttagggtacagttcagcctaaactgaacaaacttccaatcttcaatagcacactacccgcaacttccctgcccctctggtttcactctcttgttaactggaatcttttttgaaaagggggcagtactttattcaccttaatgttcagtacacaggcatttcataagcatttcacaagtaagtagactcacaggcaacgataatttccatcctacatcctccaagcatttgaaaaatgactgtaaacaaaatatagrctgtttcactttgcagtttcatcagccaaatcccatttgatggaagtggtataaaatcaagctagtgaagcaacttaagatctttaatatactgcttttagaaaattatttgttttcttcaagaagagctgttctcctctgagtataacaaattacaatttcacaacagaaagctattattttaaaaaaatgkagtcagtttttctgctattatttgatgccagtgcaggacaattttttaagacagatttttaagacagattttgttagacctgtgtaggaggaatacagtgttgacatttcccaagtgagtctttatacctttcaatattcatatttaaaaacaaaaaaattatcattttgtcagtctttcaacgtcctgtgtgcatatatttattttaatagttcaaaataaatgtgtttatctttaatgtatcagttttccatgttgaaatgaagaggttactaggattctggttatagtatcctgagatcttgattctataaagaattatgaagtttattaaaagatatagagktctttcctaaaaaaaaaaaaaaaaaaacctaaaggtaatcacagacttaacatctctattccaccattgtwgctattaagaaaaacaaacagaaataaggttaacaaattaatgatagcagaatcatctaacaaatatggaattttacattttcagaaaagagaaataagaaaattttaaatttttaaaataatgagtatttaggggttaatgaaataatgctgcaattacgatttttagtagtgctcagctatcataaattgtcaataaatgtcacagaactatctattattttgacatgtttaacttgtttggctctctaagatgcttgcgatatgctacatttgccaaatgtcttattactgccttctagtttaacaaattacgacacatttcatcttttagggtacattaaatgtacacacaaaatatattctgctcatataaaagtttaagayaaaatatgaagaacctgctaatgtattaaaagtctgcagcactaataagtgaagaattatcaacatcccattaagtttggcctattataaaaatatccattttgttcatttttcactttcattattttatgaacacataatacttatacatatttatgaggtacaatgatatcttgatataagcatataatgtataatgatcaaatcagggtaattggttatcatttctttgtgttaggaacattccagttccactcttccagttctcakgcaatttacaatcaattattattacccatagttgccctattgtgctactgaacctggatcttacttgtatttttgtacccattaaccaactgctctttatccctcactgcttctcattttcatgtgaatgtagggtccctacatcagataagactaaacaagataataatttaaagtcagagattcaattgtatgtttacatttttgtaattttattttgaaataattttagactcaaaagaagttgcagaaatactgcagaaagcttgcattgcccacatgcagcttctcgcaaggatgacatcctacacaattatagtaatatatcaaaaccaggaaactgataatggcacagtacaattaaccaaactagagagctttttttttttggccagtttttctttttttcgtatgcacttgtttcttcggtgtatagttttataaaattttatcacatatatagattcatgtcatttacatatatttttaaaaagagaaatcacttcttccttatgaatatcttcaatcttgagtctggaatacatttcaaaagagataatgtgacagcatgtatgatactccagcaagcaacaacagcactgcctgaacaaatgggcacatctttaatgagagaggccttggagcatgacacacaataatgagggaaactgatctcagtagaagctccctctaaactgctaactctcaaaataatacctccctcccatattacagacatacctatcttcttggatgtctaatcattatttggatctaacacatccgaaaagaaactcagtctatagcaccctctctccaacagccaaatgcacttttcacctctgcaaacagcaaagccatacctagttgctcagatcaaaaacctcaaagttattcttaaatccattctttgattcatctcctatatctgatccatcaacaattcctgttggctttaccttcaacgtatagcttcaattcaatcacttctcactacctctaccagcatccttgcagtctctaagagtgcgtgtctttggaccaattactaaacctccgttggcctctatgtcctcacttagaactttaaaattacactggaatcttcacaaaagggttgcgctaaatgagataacgcatataaaaaagtataaaaaaagagtctagtagcgactaggtatccagaaatgctatgcatcattatcaccacaaaatcatttcccaaacaaaaagaataatcatatatatatatatatatatatcatatatatatataatcttggccacatataatcatagcactgcctcttccactagccatcactcctatcagtcttctcttcattccctctgcttcagtatacatcttcttgatgctgatcaaacaacctaaactaactcattcttcagagcccctttactagctgttccttgaacactcttctccatgatcctcacttggtctgtttccgctcctcattcaggtctctgctcaaaacctgactcatcggctgggtgcagtggctcatgcctgtaatctcagcattttgggaggccaaggcaggcgatcacaaggtcaggagttcaataccagcctcaccaacatggtgaaaccccatctctactaaaaatacaaaaattagctgggcatggtggtgcacacctgatatcccagctacttatggggctgaggcaggagaatcgcttgaacccgggaggcggaggttgcagtgagccgagatagcaccactgcactccagcctgggcgacagagcgagactctgtcaaaaaaaaaaaaaacaaaaaaaacaaaaaaaacaaccctcattcatcactgaggccttccctgaccatgctgtctaaacatcctcttccctcactatcactatccacctccttactatgctttatcataatttatcactactttaacttacattacttatttatttatttatttattcatttattatccatcttttcccctaggaatgcaaattccaagagggcaggtgtgggcctggtccttttggctcactgctgtattttcccaatatagaccagttcctagaacatggcaagtgttcaaatatttttttcctgtaaattcacacaccaaaaactaaaaaacagtttttcagaaacattttattttcatatcaaaatcttactaccagtgttataaatatacagaaggaatatacactgttaaggcaggtaggggagtgaaacatttaaaggctaaggttattcatgtcctaaccatattaaggtaaaaataaattggaagttccattgtcattcattgaacatgaattcccatggtctggccagttttgtcagttttatagagaccccttacattattttaccttttaaatgaaggtatcatatagtcaatccatgtactttactgttaatagtaataattaggttaatttrtgacaatttcataagggtctttttatatgctctcctgcagacttacagacttcagataactgctaattgtgcaagctaatcatacttaaggtcttagtaaatctggcatacataccagcaaatgccttacatagaaagtcttatatttttcttattcaccacaaaaggattattttgaagataattatgacacacaaaagatggaatatagaccttgcctctcaatggaaggggtcagaaattctttgagaactcttccattgagaggcaaggtctatattctgatcccttgaatgtaggcataccctatgactctttgaccactagaatattgtgaccatgattttgtgccaatgtctaggcccagaggccttacaaaactagaaacttctaattcctcactattgaaacacctgctcttggaatctagttttcatgctgtgaggaagcccgagcatttttctggagaggcccacatagagaagaataaaggcccctggccaatagctttggctgaactcccagctaagcactggccatagctgagcaatttacaatattgatgtgagtatacatttctggttaacacttacgactatgtaggtggttcgaccattccgttttttcttttcatattcatgatatttaataatgatacttaagaaataaaacaaaatgttccatcagtctgtgattgtatgtgcaggatacagcttgagaacatcagcctaccagccatgtggctgagtcaactaagtagttttcaggaccaytgaagccatcctagctgataccacatgaacttgaaataagtcataccctcatagccctgtgcaaattgtagattcatgaataaaataaataattattcttttcttaagccactaaatgtgattagttatgtaactatgatcaatttaacgttaataacacagagtggttctcaattgggcagaggtcctggaggargagggtagtgagtcctttatgacacacatcacagcccaagagaatactctgaagaacaatttttaatatgtaatatagttttatattttaaaatggaaaaatgcctttttataatatgaacattaaagacatgaaagaatacacaatgttatcaaaaagagacaggtcagaagattgaacaatgttataactcatcacagacatcactattcattcaagcattgctgaatttagtagatatttatttgacacctattatatgccagccactataccaacctctgggaacacaatgataaaaaagacagacataatccccaccctccagtagtatccactcctccctatagaaaactattcatccttaattctcccaaattatattctttgaaagaagatgaatctttctctttttatagtttataaaaattcatatagccaatctaagcatataaacaatatagtttatttctcrgggttaaacaatttgtagagtcaaagaaaaatcatgttaagctaattaactgtaacctggccttcactcttataaattgctcatgataagagatcaaatagtgatattcaggtctctaaaaaaatgtggtccagttatttcgtttgctcattaggtcaagctgcatctctccatctccttattagtaatttttccttcttagatattatattttgtgcccctccataatgataaccagtactaacttttcctaattatcttccttttataaatcttgccaagtgatattggccttaggctaagcagtttaaactattgatatgataatgcattggcagtaacgcttaaggcctcataggtgatccaaccatcattttctacttttatttctattcattaaagttcacctttaataatgacatttatgatgtggaaggaaaatgttccagcaatctgtgatcatctgtgtagcacacagcttgttaaaacatttgaaatggctccggttggccttagcacaaagtggagaagctcatcttcagaaacttccagtttccaagttgctctccttccatctctctcataatggctcctggcttcgctggatgctcttttgcagtgacccatatatgtaggcaccctctatgcatctgctacgagccaggcaatttctattttccaatcttcacttaatctacaccccattccatctagtatctgggctgtgccaactgttttgttagaaactggtctcatcaataactttaagtgttaaatactgaaaactatttgacgcattttccctctaagagatgctggaatttggaaagggaaattccaagtgatacagtgagttgactgaatcactatttgaatgaactgtcaactagtagaattagttaggacacagcaggatcacttttggaacttaccaaattttagtataatattggatagatgtcacctatcttagagctgatcctgtgattaccataactgactttgtcaaaatagccccaataattacatggcaacgactattgatattatttcctatatgccctaaagaaccacttaactttagaaagttaatcacaaacctgcattaatcaattactaatgtaacaaagayggaagaaatggagagaggaagaggaatgaagggaaagatgtgggaagattgtttacttgaaaaaattataagaaattaacataacagtaaaaacaaagaatcaaagtattcagatggcttgatctccactttatccttctatgatagttattctcttttaagctaagtgtattagtcagtgttctttagagggacagaactaataggatatatcttcacttaatattaatcttaatatataaagggaagtttattaagtgttaactcacatgatcgtaaggtcccacaataggccatctgcaaactgaggagcaagaagagccaacccgagtcccaaaactgaagaacttggagtctgatgttcaatggcaggaagcatccatcatgggagaaagatgcaggctgggaggctaggccagtctaatctttttatgtttttctgcctgttttatattctagctgcactggcagctgattagatggtgcccacccagattatgggtgggtctacccttcccagtccactgactcaaatgttaaactcctttggcaacaccctcacagacatacccaggatcaatactttgcatccttcaatctaatcaaggtgacactcattattacccatcacaagtccactccttgtcaacttgaacccatatacatctcctgagatcataatcttcaaataaagacaataataaagtcataattacacctaatataatacaactatcctttgtacaaccagaaacacaccaatccccaacccaaatactattaaagttaacaatacttaaatgctgatatgaagtcaacatgataaagaaaaaaaaaaggaaataaaatgaagatattttcttagtacaagtatatacatgcacaaacacgtttttcacaaaaggaggaaatactgatgacaattacagccctcatttctgcagctggtcagatggcagtagctggtattgatgactaccttctactacccattctgtagtccttttgccttcagcaagcacttcagcaggtcgtgttttttcctggtggagtgacccaaaccttcattcctgaagagtctgagtcatttgtagtcctgcctggattgggttgttgtagtttcccattgaccttaatcacagggcatggtaatactaagagatgccctaatggatctcctgtattccatgcatactgttccttacctccactagggagtagtaaactaatttcatcttgaaagtgtgggacaatcacccaagccaacactgtatctcccttcttagcctgttgacttaaaggtaggaagagcccaaagtgtccaggtggcaatcttaacttccagtttaatggaatctttgttgtgtctcckggctcctccctctggaaccaagacctctaggtcagcagaatgtaatatcgcaggaacaggaagtgaaaattttgctagtggatccctaggggtgatggtgaatggtgccacttccacttccaccccttaattactagacccatgaatcttggctatgggagaaacaataccatatatcggatgctgattcagagcatacatggccttctggagaactctggccaagacctgcaaagtattatcacctaattggcattgtaattctgacttcaaaagaccattccaccattctattcatccagctgcctcaggacgatggggaacatggtaagaccagtgaattccatgaacatgagcscactgccacacttctttagctgtaaagtgagtgccttggtcagaggcaatgctgtatggaataccatgatggaggataaggcattccatgagtccatggatggtagttttggcagaagcactgcatgcaggataggcaaacctatayctggagtaagtgtctattccagtgaggacaawcctctgccctttccatgatggaagagttccaatataatcaacctgccaccaggtagcgggctgattacccagagtaatggtgccatatcgagggctcggtgttggtctctgttgctggcaaattggacgctcagcagtggccatagccagatcagccttggtgagtggaagtccatgttgctgagcccatgcataacctccatccctgccaccatggccactttgttcatgggcgatgacggggtggctggggaaagaggccaaggggtgtccacacaacaagtcatcctatccacttgattattaaagtcttctcctgctgaggtcacctgttggtgagcactcacatgagctacaaatatcttcacagtttttgaccactcaaaaaagtccatccacatacctcttccccaaatttctttgtcaccaattttccaaacatgcttctttcaagtccctgaccatccagccaaaccactggctacagcccatgaatcagtacataatcgcgcatctggccatttctccttccatgcaaagtgcataaccaggtggcctgcttgaagttctgcccactgggaagacttcccttcactgctgtccttcagggaggtcctagaaaggggctgtagtgctgcagctgtccactttcgggtgatacctgcataccatgcagaaccatctgtgaatcaggccctagtcttctcttcctctgtaaactgatcatagggaactccccatgaggccaccggtgcaggctggggaagagaaggcagggtggcaggaatggagaccatgggcatttgagacacttcttcatgtaacttacttatgccttcaagacttgcttgagtcggatcacatatatatcacttccatttgatgatagaatgctgctgtgcatgactcactttatgactrgataggtcagaaagcacccagttcatgatagacagtttaggttgcacagtgacttgattacccatagtcaaatgttcagtttccaccaaagcccagtaacaggctaagagctgtctctcaaaaggagagtagttatctgcagaagacggcagggccttgctccaaaatcctagaggcctccactgtgattcatctatgggggcctgccaaaggctccaaacagcatccctatctaccattgacacctcaagcaccattggatctgctcagtcactaagtaaattcattttctttattctctctaatccagcaaaactcatttagcttctaataaaattagtacacttgccttgcttacacagctacagatttttttgtaactttgattaaaaactatctgggcaatatagaaaaatccctctgaaataggaataatagtagatgttcagggaatactgaactcaccatttcagactcatttattatggatcaaacaatagttcctaaatgtaacaactgtcaggccaccatagacaaccagagagtaaaactctatgctatctttagaagcccccagctacctcttagtgcccatcttttcccaacttcttacttgctaccatcactctaagcccccttctcacaggacctaccccattgcttaaggcatcacaccctcctagttggtgcagttgcccatctaatacaaaggctaacttagtcactaaaagattctctggaggggagctgtcttaggcactragccacaatctcaagtgagtgcaatgctatctatgccaaccttggaacactcgtcacttctccatgtttctcagaaattttaaacccagcttggaaagaagcagaggaagaaagaaagtgagggaggttytacaagaaacacagccagagactgctgatgatgcacagtcactcagaggttcccagaaggaaaatgaagccttttttgtgacatgatttttcaaaatctatagttacaaagactaaaacttcagctgaatacaaatgactaaggagaaatcagataggtctgtgttaaaagatgcaaagctggacaagggtcaacaccaacacacaactttatgttctcaaggagcagaacaccaacttggaaaagatagtaggactgacttattttgccgctgaaattttggtttgcttttattttctatctctaaaaattgatttttttttttttgagacagagtctctcactctgtcacccaggctggagtgcagtgacgtaatcacagctcactgcagccttgacctctcaggctcaagcaatcctcccaccttagcttccagagtagctgggatcacagatatgtgccaacacacctggctcatttttttgtacagacagggtcttgctatggttcccaggctggaaaactgctatttttatagattcaaggaacaactgaaagtataacatatttcacaaattatgtagctgatgacacatgtctttgtcgcttctattttgtttctatttttttcctatgttaagttaggaaaaggcacatttccccccaccatctccatttmcacacacacacacacacacacacacacacacacacacggtataattatgatctgatctgatgattgataatagcatgagatgtatctttcaggatatttgtaaattctttgattgcatctttaaaaaacaactttaaagcacaaaataagaaaactacaatgataagacttcagctatgtagcaatccattatttcgatacagagattttcctatgaccttgaatttataaaatgcaaagattaccttacctatttataagtctagctttatcagctacagaagaaaaaaaaggaataagaaaatacaacaagtcctctcttactatgatgaaaaactgaatttcttttgtttatggctcttctctgtttattttgtactagaaacacatttaaatgacccaggaatctttgcttttccgtggtgatacctgcaagccatttctccaatcataagcaccagcatgtaaaagaagcaacaaatacagaatataacttacatcactttttctatttatctataaagttagtgttactattatgcttacttaaatatggaagcattaggataatacttaaaataatactgaaattttattaaaataccagtaagattgatccgagatacaaagactgaagtggccggcactgccaataacctaaatagtttggggtcctgagaatgatccctatggaatagccaggagcttctcataacttctgagaaatcatgtcwtaatatgtcttctggctgattctcaaaaaaattcatttttgcttctaaatctttgttcatacagttcccttgtggtgggtttaaaaacattaccacaaatttttcctctctcggtatgcaaatcccttcgtggtaagactttactgcttctcccactaaaagatggaatctatttccttgagtcttccctagctttgtaaattcctttgaccaataggatgtggcagagatgagattatgcaacttccagagctagaccttcagaagacttgaagtttttgcctttactctcttaggatgctgccttgaaatcatcaccctgaagaagtctgggttgtactgagggacaacaagagagcaagaatagcgaagtctagttattcttgtagtccccactgaacctagctcccaactaatgcatcagctaaatgtagctgcctgaggaaacccaagctaaatgagcagaagaaccaattgctcagtcaacccagaggatcatgagaaatgatgaatgggtgtggatttaggtcactttggagtcatttcttagacagcaataaacaaccgatgcatctttctcccatgaaagccctccgttttgctccatccttcctaagtcccagacactcttcagggcctattattttcttcatgaaacctcttctggttatcccgggtcaagaaatttttctttctattcttctacagaacctagcaacataccactgtttaaaatattaatcattcatcttgctttatagtctttaacgtgtgttgacatatcttctataaatctaatgaggtccttacatctctctataattgacagcatagttctggacacataactatgctatatttacatcaaagatacaaatggaattaaacttaaatattctccttgtgtagcaaagtaaacagcaagtgcacaagaaccaccatcccagtttaaatatgactgagaatacttttaaagtactctgacatgccagtctgaagagatggaagacaaaaaacaaaccattaagagggatgaaatcacaaggctatggctaatcacaaggtgaaaattatctcctaatctcttccaagaatattaaaacctgggaacatcaattgttgaaacctggcagwttatgaaaaatatattataagccatagtatataaagacttcctcagaaattaatcaagaagagatgcctctaccaagtatagattaaaagttcaaatgggtttaccatttagtgcaattatttcatttcttagagactatactatggtattataaaaataatacataaaaatattcactgaaattttatatgctatataagaaaaacagtaaaatgtttcaaaatgaagattaggtgatacaaacattggcaccttaatacagttgtaaaccaggcagccattaaggtaatgatggggatctctaggcacagatctgaaaagattaatggcatatttttgtctaaaaatttacttaatttgtatgtatacttttttatatgtatctgaatgtgagggtgaatgatttatgggcacctcttgagtatacaattacctcttatactcatggcctcctttctatttacatcccaaagtatggtcttatcattccataggttaccataatgctttcctaattgttctccttacttctattctctgttataataccatctgtacatgaccaagaggcaaaattcctagaaacatgactaaggggatgcttacaaaatgttaacgttgttacttttgagcaataggatttgtggggttcttttgctttaaagaagcaaattttttaaaaagtgtataaagacttttctgtattaattgattattttacaataaccctgaataatttttagataaagaataggtacttatatttttcagaaaagtagaaactataattctctgtaaagagcaattaggtcaatttccaatttggagaatatcactcttctccaaactggttttcacattcatctgaatgaacataaagtataaaaacacagctctagaacctgaaaccactgttttcttttcttgctgggactgtacacagactaagctgacctgaggctttaaaatggatagtgaattttgcaaattatatgactgagctgaaccaagtatgcccaaagaagaaaagatgagttggtcaaggtggaaggaattttatttgatggagcagtccaaaatttgcaaactgtactctcttggaacactgtaattctctgtgatggtaacagatgtttatctaaaaaagtagtttctggatcaaataagtttcattaatgttgcatattaattcttcctcttggagagtcccaattcacattagcatgtcacaatgcatattagcatatcaaaagctctgagaggctttgcagtaagacaccatttttcatgcttgtttgtttttagaaccttttttgttcattaaaaatctatgaatattttgcagatcaccatggaaaactgttttacaatccctgcagtaggcaggaaggagcaggtcctggcattggggcacatgagaggctgttgccacaatcccaggaggctaatacaggcagcaacagaggagcctattttagcaaatctaaaaacaggtgtttactacaccaaccagtgtcacagactgaaaacgagatggaactagtcatgaaaggccatgcctacttacaagaaaagcaagagtaggagtgctaggtggtaaggcccaacttcaatttcaccaaaaaaataacctaggtagtgacagagagcaaggtgaaggacagtctacgtgagttggcagggcttgatgttttctttacaaggcttgttgggtttagacacagactctctgtattccctgccactgtgttccgtgggtcttaaagcagaatttttttaattgagtcttaagtcagtgtctggtgaataagggtaaaatgctatttaaaaaaaaaaaaaaaaaagcttattcttgcagttttagacaagttggactggagtgggaaagagactgaagacaggtaaacaagctaccagattggtcgccatctccatgaggaaagaaatgaagataatctggaatcgcacaggtatagcagatgaagagagaaataagtaaaccaatagaaatgaggaagaatcacaggacagagtggctaaacttaagtcagaggactctaacacagctacattcttgcagacctggagggcccgggggctatctgcgctgtcttggcactctgcatattcagtctgtactctcttcctttatgttgactggttcctttctaattctttttttcaaatcccttcagttgtgtacttttgactgccctacataaagtgcaaatgtattgaagacaagaaaacatattttcgaggaattgtgtatttcctagagctaccttgtgcattgcttagagcaatagattaactgatgtaaagttaattgttggtaagcaagcactgcaagttattttatatatgatggggtacttcactgacttattttaaagacaatattccatcctatgtaaaacaagattggatcttttaaagagcaatcatcaattgattatcatatacttgacaatcatcatcgtcatctaactagaacaaatccatgtgatgacatatgaagacaggaaaactccatcatctggaaacttaagaagcagaatatattactctacttattatacttcctaggaactgggatttggagaaacgttgagtgttgtgcctatagaatgtttctatcttcagcctattcattagaagctggccgaaaagtaaccttagttaattgcttatgatgaatggaatcaataaaaacctgcaaggttcacaaaaatggcactggtttaataggtttcaaagagtgtaagttttgacttgataaaattatccccacctttctaattttcaagactgtgtaccccatgaaacactgtatcctatgaaagactgtaagacacattactgaatttcttctcttactgtctaccacattactaagttttattcttttctagcaacacttggtaccaaatgttcaccttttcaataaatcattactgccaaggcttgacatgtatggaataaagccatatcaagttcattctaccgggcacatcattgtggcagaaatgtcaactataataagcatgtgatgaaaaagatcttcagggctcctgtcaggtactacataacctgacagtaggttaaaactgaacatttacatgaagaggttgcatgactgaggctgacagctgtcattaacaatatgaagaagaagaaatatgccagctaagtgtcccagctttcactttacaggtgctttcaagttcccatttaatccttctgacaaatatgggaggggcattcctttccatttacagatcagaaattggtcacttctcctcatccacattaccactgccctggtctaggtactcctctctcagctaaattactggaacagcctcctaattgatactcttgcaaacaatcatgtcctgatagtaagaactgagtaatattaaggtttcctagggaaacaaagcctcctgcaactcagtattttaacagtaaccaacttttacttatagttctgtagggtaaatgtggatctaccatttacccaggagtgatgccccaaatgggatacagcttgcttccacccgcaacttattcatctccccatggttatcagcaaagaggagaggatcagagggccacacagaacacttcctcccacctctcactggcagagccccgtcatgtggccccaacccacagcatgggaggctgcaaaaggtagagaagcacatagatacgtgataagtaaaaatagcctctgccgcaccaaggttcagtgcagtcaggcggattggctaaaacacaaatctgctcatgtcactccccttctgaatctcctacaatggcttcctaacacccacaggtttaatctctaccttcatcttctgatacttcacaccccaaaactcaagctccacaaacattcaaccactggcttcttatacactatgcagtttttaacatttgctaatgtttttccaaaaaatcataattatgaccaattcttaactacatccacagctaccatccatgctcaacccatctcttccctatacctctacaatagcctcctaactagttctttattttgatctttacaatatattctcaacacagcagctagtacattactttaaaataacatcagatcatgtcactgacctgctgaaaagtttccaggggctcttatcacaagtagaataaaaccaaaggctgcacaatcttcatctccaaattcatctctaaccctctcttcctcctcaccaggcactggccccatggattcctgtgcccacttggcaccctcctgctgcaggagctatgcattttctgctcctgacacatagaacatgcttacatggttcccaccttaacttcattcaggtctcctaaatgtcaccgtctaaaacagaaacccccttatgccatgcacataacctgctttattgttcttcacaacacttacccctacctgacattggattgtgaatatgcttgttgtctgtataacctgaygctctctccaaaatgtaaactccttgagatccggctgttctctgtcaaattgaatataatattcccaggacttggtgcaatcaatgcagaatgaacaaatcaatcattgagtgagggggtaaatcctgaccctctatgcctggaaggcactttatctgatgtcaygtggtagctagtctatcctgcagcttccctgaggatttactcaagccttccacattcttcccaccaggaacttgcccagtcccagtgtgattcctctcctgtgccctcaggtctcttactacagtgtctgacatgctgcagacattcaacaattttactcaattcataaattctccaaggcaacaggccaaatggcaagtaggtaataagttaggtaacaagagatgcaaacctattaggttggtgcaaaagtaattgctgtttttgccattaccttcatttaattcatatttatctttggtctatttttggattttctttatggtctcatgatcattctgtttctgagcaattatcacattgtgcttttaaaattttttaatttaattttatttttattatactttaagttctgggacatatgtgctgaacgtgcaggtttgttacacaggtatacacgtgccatagtgatttgctgcacccatcaacctgttatctacatgttatccctcccctatccccctacccgctgacaggccctggtgtgtgatgttcccctccctgtgtccatgtgttctcattgttcaactcctacttaagagcgagaacatgcagtgtttggttttctgttcctgtgttattttgctgagaatgatggtttccagcttcatccatgtccctgcaaaggacatgaactcatccttttttatggctgcatagtattccatgatgtatatgtgccacattttctttatccagtctatcactgatgggcatttgggttggttcgaagtctttgttattgttaacagtgctgcaataaacatacgtgtgcatgtgtctttatagtagaatgatttataatccttttggtatgtacccagtaatgggattgcttggtcaaatggtatttctggttccagatccttgaggaatcaccacactgtcttccacaatggttgaactaatttacactcccaccaacagtgtaaaagcattcctatttctccacatcccctccagcatctgttatttccttactttttaatgatcgccattctaactggcatgagatggtatctcattgtggttttgatttgcatttctctaatgaccagtgatgactagctttttttcatgttttttggccatataaatgtcttcttttgagaagtgtctgttcatatcctttgcctactttttgatggggtttttttttttcttgtaaatctgtttaagttctttgtagattctggatattaaccctttgtcagatggatagattgcaaaaattttctcccattcagtacgttgcttgttcactctgatgatagtttcttttgccgtgcagaagctcttttaaatagatctcatttgtcaattttggcttttgttgccattgcttttggtgtttcagtcatgaagtttttatccatgcctatgtcctgaatggtattgcctaggttttcttctagggtttttattattttaggtcttggaggcatcacactacctgacttcaaactatactacaaggctgcagtaactgaaacagcatggtactggtaccaaaacagatacatagaccagcagaacagaacagaggcctcagaaataacgccacacatctacaaccatctgatctttgacaaacctgacaaaaacaagcaatggggaaaggattccctatttaatcaatggtgttgggaaaactggctagccatatgcagaaaactgaaactgggccccttccttacatcttatacaaaaattaactcaagattaattgaagatttaaacgtaatgtcattacttttaatggcaaaaccatgattacttttgcaccaactgaatacatctatagtttctatgtccatggctacttcgagtgtatgctacagccactgcaaaagagaccttttaggaagtaagtaaatttcttttctttataagtctcccaacaagcttaccattttggccaattaatcaaatactcagtgtcacatctgcttaggacaagttacatacaaattagcctccaytggtttctttgacacacatacatrgaaacacttctgtaaatattctcatgcatttcataaagtgatggtaattttttttgactgcttggagcaatcacatgtaaagaatttctcctaaaaatggatattttacctgctatatatacaaatgtcatgacttcttcatctgaagaatcaagttcttatatttaaatgtgagtagtaatgaatcatttgattagaagcttatgtgtccaaagtagtcatgycctaatggcatggcacagaaggaaagtcaagtcctctgagtagtggcagatcacacacataaaaataggtaataatttttttaacttaaaaaagtctaagttttattctatttataaatctagttatttttctagccttcagatgtaaaataaaagcaaggcagtgagtatcttttataggataatgcatggaaacctttaaccactggaaaatataaggcatagttttaatacaaagtattttggaaaatattatgctcacaatttaataataatacatgtacagtcattattatatataacttttataaactcacttaaccttaaaaaaaactctctggcataggtctattatcatttctactttagagatgatgaaattaaaggtggagaggataggttgcttgttcaaggtcaaaccgctagtaagttatgaagtcaagattccaacacaggtattctgaccccaaatcctgtgttttgaatcattgtctaaaactgcctctcaataaacactttaaaattgttcccattagccataagatcttaaaataggctctctctgtttatataacatatcagtgaaaactgttttcactgcaattgaacatccacttgtgaagaaaatgaaaagtcaaacatgtcaagctcttgtcttcagattttttgattggcttattgggtattattcaatattgattatcatctgtgtaccagactctttgtgagatgctaaaatacaatggtataaaagatcacatctatccccagggaaaccgtagttaatagtagccagttaaacaatttctgttcagtgtcacaaatgctacatagggtgctataagacgaactcactggaggggcaccaaacccaatactgggggtttaagaaaagcttcccagaggagcaatttccaagtacttgctaaagttgtttggtggggctccaacatcataacagctaaaatttgtattaagctatatcgattgaaagacagttcaattacttctccattaatatgagataataaaactctccttgtggaaaacaaggaaatgtctcatttacagtttcatttagagatatgtctaaaacaatagagttgggttggaaatttaggatgtagttctgacaccaccacacattagctgtgttgattctggggaatgaggaattgaaatgaatagaaagccctaagcattaggcaagaaaatgtgcattatagcttgttatgatatgtgagaagagggggacaaggacataagcaaaggatgtggaaggacatatatgcttccatgtgcatcagtgtgtaagagatgggctgtacaagcagtgtggtaggcaaggattggtttagggtggctctgcctacatatctcagaagaagactaatcagaatcaggaagaataggtaatttgtatgaaaatctcagactgagtcattgtttgtgttcagtggcatccctaaggtcagtgaatccaatgctctgatcccattaaattcctttttctaagaaatcctgttatcatctctctcacccttctcccttttgaatagtaaatttctcccttcaatgggaattttctaatcagcagttaagcatatacaagcttcttccagcttattgaaaagaaaaaaaatcctctttgattctttcacaatttcatttcctggtcattcattcattgattctacaaatattcatttggtttctactacgtgtcagatgcacagataacacagagatgaaaaaatagtctcagtccatgcccaatgctggtggttttaatcactctatggtattattttaaaaaagagaatctctatgatacctaattcaacattttccctaaagatggttctggcaaatgttaaggagcaagaattaaagtattacattgaaatatctatgccaaataataaaagaaatgaaggaagatacaacttatctttaaattcctactcttgcctgtaattccaggactttgggaggctgaggcgtgcagatcacaaggtcaggagatcaagaccattctagctaacacaatgaaacctmatctctactaaaaagaccaaaaaaaattagctgggcgtggtggcatgtgcctgtactcccagctacttgggaggttgaggcaggagaaccgcttgaatctgggaggcggaggttgcagtgagcagataccatgccactgcactccagcctgggcaacagagcaagactccatcttaaagaaaaaatctactcttagctcagtgcacactgtataagggcactgaatgaatagaaatttgtgatgttgacatatagaaaagttctaagaacttgccttctactaactgacagaggtagtgacaaatagatgaggaccttggagtatggtgagatggcagtggaaatgacagaaaaaagaagagaaggctcccgcctgtaatcccagcactttgggaggccaaggctggtggatcacgaggtcaggagatcgagaccatcctagctaacacagtgaaactccgtttctactggaaataaaaaatattagccaggtgtggtggcgggcgcctgtagtcccagctactcaggaggctgaggcaggagaatggtgtgaacccaggaggcagagcttgcagtgagccaagatcgcgccactgcactccagcctgggcgacagaacgagactctgactcaaaaaaaaaaaaaagaagaagaagaagagaaggaagagaaagaaaatggtaaaatgcaaatgtaaatttctaatttggcatgttatataccctcaagtgtaaaaattaatttgttttaagctattaaaaaaggaatgacagtttcaaaataatgataatttaaaaatagaggatacatgaaggacagctctttatattgttaccaatgcataggtctagaatgtggctcttgagtgaaagaagtgatttttgtaattgtttcaggtattaggcagacaaattcatatgatttatctgaaaataagaacaatatataaatcagattcaagcatgtgtcaatatattatacccacttgagcactgaataaaaatgagttgtcctactggctagatcacagacattacatatgggaagtataattgtaaattatctaatgctttgaattatatagcgtttgaaggcatttaagaaatcaaacaattattttttttacttacctgaaaagatttatagaagaaaataatacaattccctatctgtttattatacatgcccaaaaatcctcctcaatatttttccccgcaatgaaaggaacaaagtggtctagaaataacaagaaatgataacagcccttagaatctacaagcctcaaggggtgactgtcaccagtctgctgctgacagacacaaagtgatgtctgtgaatgcatggctcaattgatggtccatgctccaaggactgatctgggtctagttttgctatttttaattatgatcycaggcttgcaacatgacatcatattttcggggtctcaatatgcactaactcttaagcatgcaggagacctgaaactcctgaggctaatgataaaaataatttatatttaaaacaagtaaacatatcctcccacagaagaaagaactgaacrtggactaaagtttacctcctggactttcattcccaaagaagtgaggtttttgcgggacactttgtatatctgtttactactacagaagattttaacttcacaaggaaactcataataaaaggaatgtagcatcttgtgtataaacgtgtgtttcttaaaaatggctcataatattgacaagaacttaaacaaatttacaagaaaaaaaaacctcatcaaaaagtaggcaaacaaaaagacacttctcaaaagaagacatttatgcagcaaacgaacatatgtaaaaaagctcaacatcactgatcattagagaaatgcaaatcaaaaccacaatgagataccatctcacaccagtcagaatggcgattattaaaaagtcaagaaaccagcagcacatcagaaagcttatccaccacgatcaagtgggcttcatccctgggatgcaaggctggttcaatatacgcaaatcaataaatgtaatccagcatataaacagagccaaagacaaaaaccacatgattatctcaatagatgcasaaaaggcctttgacaaaattcaacaaccttcatgctaaaaactctcaataaattaggtattgatgggacgtatttcaaaataataagagctatctatgacaaacccacagccaatatcatactgaatgggcaaaaactggaagcattccctttgaaaactggcacaagacagggatgccctctctcaccrctcctattcaacatagtgttggaagttctggccagggcaattaggcaggagaaggaaataaagggtattcaattaggaaaagaggaagtcaaattgtccctgtttgcagacgacatcattgtatatctagaaaaccccatcgtctcagcccaaaatctccttaagctgataagcaacttcagcaaagtctcaggatacaaaatcaatgtacaaaaatcacaagcattcttatacaccaacaacagacaaacagagagccaaatcatgagtgaactcccattcacaattgcttcaaagagaataaaatacctaggaatccaacttacaagggatgtgaaggacctcttcaaggagaactacaatccactgctcaaggaaataaaagaggatacaaacaaatggaagaacattccatgctcatgggtaggaagaatcaatatcgtgaaaatggccatactgcccaaggtaatttatagattcaatgccatccccatcaagctaccaatgactttcttcacagaattggaaaaacctactttaaagttcatatggaaccaaaaaagagcccgcatcgccaagtcaatcctaagccaaaagaacaaagctggaggcatcactctaccccacttcaaactatactactaggctacagtaaccaaaacagcatggtactggtaccaaaacagagatatagatcaatggaacagaacagagccctcagaaattaaaaagtcaagaaacaacagatgctggcgaggagaaacaggaatgcttttacactcttggtgggaatataaattagttcaaccattgtggaagacagtggcgattcctcaaagatctagaaataccatgtgacccatcaatcccattcctgggtatatacccaaagaaatataaatcattctattataaagatacatgcatgtggccaggcgcagtggctcatgcctgtaatcctagcactttgggaggccgaggcaagtggatcacgaggtcaggagattaagaccagcctggtgttagaaattgtcaatgttacgttgttgattaggttttattgccttcctttaagaaatgttggcctggtgctatggctcaygcctgtatcccagcactttgggaggccgaggcaggcaaatcatgaggtcaggagtttgagaacagcctggccaagatagtgaaaccccatctctactgaaaatacaaaaattagccaggcatggtggcatgtgcctgtaatcccagctacctaggaggctgaggcaggagaattgcttgaacctgggaggcggaggttgcagtgagtcgagatggtgccactgcactccagactgggtaacagagtgagactctgtctaaaaaaacaaagtgttgaaaactagatgttgatggaagtatcttcagagtcataaagggaatctctgagaaactaatagttgataacatatttaatagtgaaagacttaagatgttaccctaagattcaaagtaaataatgcatactcactctcaccacttctattatatattttgttgaaattttatccagtgcaataatgcaggaaaaagaaataagacacaccaattagaaaggtgacgtatagtttacatggaaaggatatgattgcacaaatagaaaatgtttaataaatctatcaaaagcaatatgaacaatacaagtgaatatagtcatatagaaagacacaaaaagaacaaacaaaaatccagttttatttctatacactaccaacaaatagttgaaaagttagaaaaactgacatttttaaaaaatcaagtagcagaaaaatgtaaggataaatttaactgaatatgtataaatcctggacaataaaatccacaaaacctcacatactatatagcgacctttatcaagacaacagggtattgccataagggtaaatatgtaatcagtgaaacagaatagagtccagaaatagaagcacacctgtttggtcaattgattttgctgaagtatgaataattaaatagagaaaagacagtagtccacaataaatggaggtagaacaacaggatctccacataaaacaaaaagaatactgattcttacttcayattatatgtaaaaattttgaaaatagatcaaagacctgaaggtaaaactaaagctagaaatttctaaaagaaaacataggatagaatcctttccccattgcttgtttttctcaagtttgtcaaagatcagatagttgtagatatgtggcattatttctgagggctccgttctgttccattgatctatatctctggattccctatttaataaatggtgctgggaaaactggctagccatatgtagaaagctgaaactggatcccttccttacaccttatacaaaaattaattcaagatggattaaagacttaaacgttagacctaaaaccataaaaaccctagaagaaaacctaggcattaccattcaggacataggcatgggcaaggacttcatgtctaaaacaccaaaagcaatggcaacaaaagacaaaattgacaaatgggatctaattaaactaaagagcttctgcacagcaaaagaaactaccatcagagtgaacaggcaacctacaaaatgggagaaagttttcgcaacctactcatgtgacaaagggctaatatccagaatctacaatgaactcaaacaaatttacaagaaaaaaacaaacaaccccatcaacaagtgggcgaaggacatgaacagacatttctcaaaacaagacatttatgcagccaaaaaacacatgaaaaaatgctcacaatcactggccatcagagaaatgcaaatcaaaaccacaatgagataccatctcacaccagttagaatggcgatcattaaaaagtcaggaaacaacaggtgctggagaggatgtggagaaataggaacacttttacactgttggtgggactgtaaactagttcaaccattgtggaagtcagtgtggtgattcctcagggatctagaacttgaaataccatttgatccagccatcccattactagctatatacccaaaggactataaatcatgctgctataaagacacatgcacacgtatgtttattgcggcactattcacaatagcaaagacttggaaccaacccaaatgtccaacaatgatagactggattaagaaaatgtggcacatatacaccatggaatactatgcagccataaaaaatgatgagttcatgtcctttctagggacatggatgaaattggaaatcatcattctcagtaaactatcgcaaggacaaaaaaccaaacaccacatgttctcactcataggtgggaattgaacaatgagaacacatggacacaggaaggggaacatcacactctggggactgttgtggggatgggggggggggcggagggatagcattaggagatatacctaatgctaaatgactagttaatgggtccagcacaccagcatggcacatgtatacatatgtaactaacctgcacatggtgcacatgtaccctaaaacttaaagtatattaataataaaataaaaaaagaaaaaaaagaaaccataggagaaagtcttgttcactttggagtaaaaattatctctaaagaacatcataatcacaaaatatttttttaaattgataattggacttcttgacaatttaaactttctccacttccaaatatcattagacaaaaaattcacaccacagtctgaggcgaggagggcaaatattcacaatacatgtggtgtatgagaaaatatacaaaatatataaagaatacttataactcaataaataaaccagcaatctaatttaaaatgagcaaaaagtttgaaggtcctttacattcattttctagagctgctgtaacaaagtaccaagactggggaacttaaacaataattcatttacttactgtgctggatgctaaaagttcaagcttaagatgtcagcagggttggtttcttctggggcctctgtccttgcctatagatggctgtcttctccttatatcttcacatggtcttccctctgtgtatatctgtgtccgaatttcctcttattgtaaggatactagtcgtactagattaggacccaccctaataacttcattttaaattaattatctctttgaagatgctgtctccaaacacggttgcattttgaggtactgggaacttcgatgtaggaatttgaggtactgggaacttcaattttacaatactagtcagcccaaaacatactttattaaaacagtatactaatgactaataaaaacaaaaacaattatcaaaatcattagtaatcagtttaatagaaactaaaatcacatttagatactactacatgccaatcagaatggtaaaaatgataaagactaagaatagaatatgttggagagaatacagagcaactggaactctcatgcattgctggtaggaatgcaaattggtacaatcactttgcaaaactagttaggcagtctcctataaagttaaaccatatgaccaacagtcccacgtaatctccgtgattatactctaattatgtaatcatgtacaaataatttgttcccagcaataaccccagagactccaacattatctgccacatgttaagtacagacaaaatatttatcgaatgaatgaataaatgaatgggatttctttaacccgcaaattattattattgaacatttaggttatttccagtgtaaaggtaaatctacagtcacgtatcttgtaatttaggcatatttcaagcctcctgaaggaccttcccgaatactctccaaaaaacttgtgccaatttttatattactatctgtagcgtgatacagttatcttactctgctctttacccagtatcaggcattaaaattcactgtaccattgccaatttgatttgtaatttaatgttaayttgtacttccctaattataagaggtattgatctttttccatagaatttgtttcttctttgtaaatttcagagtctatttttatagttgtgcattatgatttgctcattatacaaaagcaaatgtcatccatgtcttctaatcataacacagtctacataatttttaaatttacagaattaaagcaggactttgtatctactttctgctacataagaacatttttattaaaaaacatttcattaagcacaccaagcaatgtgtttaatacatatatgcttcaaaaaatatacttttaattttttgtattagaaatgtattattacattcagtgaagttttggatggtgactatatgtgggagacactaaactaaacatttcatttcaattcctacttatgcgttcatagtcaagggcattgcaacagtttctttattagcaaccattacataggtaattatattttctatggaatagacagtggcactagaaaagacagttcattagtggtgcagttatatattagagctataaatcctattctttttaaaaacacatacacgtgcacactcatgtgctcaattccatataccactgtgaattctcaaacttaaaggaaaaagatttcaaaagtattagtttttcaaagaagaaaagccaacattaagttttaaaacttctttcacaaggcaaaagagtaaaaaccaggaattgattttcaaatgctggtggaatgagaaattctttgatgtcattgagcacactggatattgtggcactcagcagccaggagagtcctcgccaaaaaaacaattattgagcatcagctgttttctggaactggaaactacatatagtcatacatgtttagaacgatattaaaataagaatagatgttcttggggacaagagaaagaaataagaaaaagtagactgtaggtgagcagagaagagaggactgtgaataattttatcatgattagtggcaaattaatcaccatgctcaatatttactgttttctctttggttgaataatgagcaatcactgtaaatttagtatagtatttattcatttgaaaagatctcagaaacatagacttatttttagaagatgaaaataaataagtcctggatgtttgttgccaaacagaatttggaactaacaaaggtcccgcatagagtgccagccagccgctgataaatggatcagtccttctctacattgacacagagggagaaaagaatgctacaaaactacagccattttataagagccagatttacctaaatcggtcacttttcaatctgttgtgtcaacattccatggaaacatctttaagccttcaataaaatgcttatgcattaagcgccatttaggccacataacagaccacatttttctactcatatttggcattacaggtagtcaatgataccctgacacagtgcttagcccccaagagcttagattctaaaataagcaatattgaagtacataaacagaaactatatgcacatcacttgtttaaagattttcatggaaaacctcaccatttataaaccctcattataagaatgtctcacttctttttttttttagtaagaaacttttatcctattcaagccattatattttttctgtttttgtttaaaattctttttcctgatacataactgataagtgggaactaaatgatgagaacagaacaacacacactggggcctgccagaaggcggagggtgggagaagggagaggatcaggagaaataaccaataggtgcctggcttaatacgtgggtgatgaaataatctatacagcaaacccccaggacacgagtttacctatataagaatgtctcatttctagtagaaatccctcatgctatgagaaagggaaaacaattcattatcactatgcacattactagtcatgggtaccatttaacaagcattttgtaccacaacagtactctgcatggttgatataagtatccatattttacagacccagacgaaaaagaatattcagattaaatcatttctcaaagtcacactgctagtgagtgataaagtcttatactatcagactctctaccttcaaagccctagttcctgaaaagattaatagactgtctcctaaaataactttgatggtccactatatgtctatcactcttagaaaacttattttaaacatttaacaatatttgtggggccttcaagaaaaaactgaggccaggcacagtggctcaatgcctgtaatcccagcactttgggaggctgaggtggaaggatccattgaggcccagagtttgagaccagcctgggctaacatagagaaaccccatttcttaaaaaaaaaaaaaaaaaaaaaaagctggggcatggtggtatgagccagtagtctcagctacttgggaagctgaggcttgggcccacatgttcaaggctgcagtgagctagatcaggccactgtactctagcccgggtgacagagtgatacctgtctcaaaaataaaaaagaaagaaaaaactgaaaacccttcaatattgctcttctcctgatcatctgagaagaccacagatctttttcaggaaactaagaattctctctactgaaagaactagtattgagctgcatgctgtaatttctatgctccaagacatgcacaaccatgggactttagccaagtctcacaagcaatgtgctatacactcagtaaccagacttatgcttattgtatgacactcataactggacagtcttcacaacgctgaggtttgcatagcagactgtggagtaggaccacatgcttttgtggttctaatccatgctatatgtgccctggagaaatagggccaccatgctgatccatacaataatcgctttacaacagggtatggaacattcgttttactgtctttcttttttaatgtagtttactaaatttgctttaccattagattacatgctgaacatgcttcttgggtagattttaattgaggaacataactcttcagaattggacacagatgcaaattcccaagccatcagagctcttattaacatgggattttaagctcatattggtcatctgacttagcattcagaaaactaagctaaaaaagtttttaagtactttctatacaacaagagcctttagctttatattacttcctttctactttatggcctaagaaatgtttctaatatctctgaaagttttatcaatagcttgcaatgatacgcttctacagttagattttaaatctctaaacatcagattcacctaaaattacattgaggaatcacactgggaactgtttaatgagttaattagtacttactcttctaatagagttgcactcatcaatctgggagataaatagcagatgcctgctttctgagttatctttcttttcccacatccttactgtccatttaactatttgatccaatcgggacaactttttgagtaagaattggatatattcccaagttcaggagaattcaattacctaggatgtatctaaaaaatttagcagtcctgtttggaaagctagtaaatgaattagtcccttacccttaggaaatgcaatgattttacttgaaataaaaaaagagtcttttctctgtggagggtgattatgattaactagggacgacttctaggctcaggacaagggtaactctgctgctgctcatggaattcaaattaagaagatcaaaattccaggacactttaaaatcaggatgctggcaatctagtgttcattaatactagacttataaatggcatatacagaaagaaaaattgaaattcatatcacctaaatgaaatatatatttgcagatacagaaaatttatgttagaatacacaagaatctatcaatagtactaattacctctgtggagtagaatgatgggataatgagggtggagggagacttttacttttcacgttacacactgttgtccttttttccaccacagatatgtagtacaataataataataatactattacaataatataataataatgaataataagaagtggctcacaatagatacaaagaggaaagttggaggagtgtgagttaagaatctttaagccacagaggcaaaggtcctttgccccaatttacatatttgatctcaatttgctccagtctatatcccaacatctaggtatataatcatagccagttgtttctcttattcagacacagagatataacaagtttataaacttctgggattaaatagtcccagaagtatttaatctgttagccacagcccttcttgcctcttagagaaccaccagtactgcagaaatgggatgttttcttcaagctctgtgttagaatttaaaatatttttcttagtgaaattataataaaacttgaaaataactcaaaaaattctatttaacccacaatgtatctataatacggcactaacagcgctcagtatggatatagcccatatttgaaattggatttctctgagtctgtgaattgcattccaaacaattgacttagaaatgaaaattactacaacaattaatttttaaaaatggaaataatggccgggcacggtggttcacacctgtaatcccagcactctgggaggccaaggtgggcagattgcctggcttcaggagttcacgaccagccctgggcaacacggtgaaacgctgtctctactaaaatacaaaaaattagccaggtgtggcagtatgcgcctgtcatctcagcaacttgagaggctgaggcaggagaattgcttgaacccgggaggcggaggttgcagtgagctgagatcgcgccactgcactccagcctgggcgagagaataagactctgtctcaaaaaaagaaagaaagaaaaaaactagtctttccatgtatacagctttgagatatgtgtatgtaggtgatatttttaaatgtgccagctgttaaaaaaagaaggcaaatgcaaaccacaaaggagtaaaaggttagatgataaaatcagaatgtggaaaatattaaagatgaaaacatttcagtttgaattagtgcatattcaaagttgagaaaattttcatttgaattctgtaacatataattatgtcacttycaacatgaaagtgaattagacacaaactaaatgctttaaatacaacatagcaaacaaaagcacataatcaatttatgaactagttgtataactttataggatgccagtgtacaaaaaacaacaacgatctcaaatcccagtactctataaaagaagtatttcactttaattaatgaaagtaaagacaaattcttgaagagtaagttggataatgatagtaattatgatatttctatgcttgatcttaatgctcaaaaaagattcttgaaatcccaccaatttttttaaaaaacataattaagaaacccacaactgaaaaccaaaacctactaatgttactrgacaagctttttacctttctgtaccttaattattcctcttggggtgatgtgacatctaaagttcttcttagctctaagacaattatgttarctaaaattattatgatatcmcttatcctgagaacatagtaagcatataataactaagatgatcagttttcactattgaccaggctcataaataatcatcgaagaataatagttgaaaatattcttacaggaaaacatgttctttatttacatgattggacaaggtatttgctaatggagaattctcctacataccatacttgatgacaaaacttttaaatatttaaaggacaaacacatattgaacaaacagtgaaaataacatcatagtttattcattatatgttttctaaacacctcctatgtgtcacgcactgtgtcagacagtgggaatacaagatgaaatggcatggccagtgccttcagggagttcgagttcagcagaggcagttaattaaatgagttctttaaacaattatgagtgtaagaagaaaaatgtgatgaaagaatggtgatttcactacctaaacatccttttgtgtttcagagtcattatttatcataatgtagtagaagggagaagcacaattaaaatataacattaatgagagatagtttaatatacagtgttaattgttttacaaataaatacagtgttgaaattcaaaaacaaaggttagaagaaagacctgggtctgtgaggaaaatatttatagccccaaatcccatagcacttccctaatgtaataatttctgctttacattctgtgttgccaacacctgtctgtttgcaaataaacctctcacaatcattagtcatgtttgttcatgctgaacacttctctccttgaaaacacagcacctgcagaggacacacacacacacacacacacacacacacacacacacaagaatatcactctctgagcatcttcaggctgcaactttggaacagatgtgcccaaacatctctaattgcacagctggcttcctctggaacccatcaacccaaaagataacagataagcacgaagcaattcggccaaaaactgcaatactgtgtagcacgtgaaaatttgtgctttgatttttatattggactagtggtctgcacataaaactagcaataaacagaatcctgcagggttcatgttttcaagagcacacccagccacatgttctctttaatggctgtactgaactaacactctggcatgacagggtttcttatggcttgaaccaggagtgcggtgtgcatgtgtctggaagcccacaatgattgtgataccagttgaaaaggtaaagtgaatatttctcatatgctatgtgaaattcttcatgttgtcaagcttgatttgaagcttgaaagaaattggtcatgagctctttgtctgaaaactgacttcatcaatcatacttttcagggagaatatggttcctgtcaacacgggcattattctaacatacacacatagctggatgtgcctttcctttcaaagacttggctatgstacagtatagtttgaggtttataaagcactttgaaaatatacaaattactgtatcttgatttaaaaaagggaggaactaataccagaatagttaagactttattagatgatatcatttaataatagaatatttagatatgaatagaaccrgtagtgaacgtgatgacaagggaagtcatacttcccaggagtgttaaaatatttctatacatcaaaaaatgccaaacaaaatgccatatttggttgacttaatcctctatctttgacaatggcataaagagcatgtaaagggaaaatacataattagccccttgctcctaattttgcttaaactcttattatgctacttactgaaatgagatgtttattttattattatcactgcagaaatccgagaaaatacaggtctattcaatttcacctgctagcctagacttcaagtagacttcagagcaataccagtttgtatggtctttttggcaatagcaggaaatgatacaagcgaaatcagttcttgattaagggaggagcagaattgcattagttagatattctggtagtgctgcaaactataatgataaatgaagacagcccaagacttaagatgtaaagttatgtagctcatgcaattcaatgtcagtatttgaaggctatatgatgaatatttccagaagtataagaaaaaagtaagaacaaatttgcctcttactgatgcttcaaaaatcatttgtgtatatttaacaaaagaagtgtctaaatagatctgaagttaaaccacagtactgaacacactagatgaggtaacattgagtattatacaagatttaagacttaaagggagggactcacttcatcaaaatggaaaaagccttgaagctggggtcagaatatagcgttccagcttctgggtcagagaatacatgtatgaggtggggagaaaagacccatggagctgcccttgatgtgccagactgtctgctttgctcatacctcttgtttgcccataccctgaaattattattaaagcttcttactgcataagaaaaaaaaaaggtgttctagtgttagcattgctattgagtagtctcacatgaaacttttggggcctcatcactttttttctcaactgtgttgaactatgtagcctcatcacctgctagggtccagttcttactccttaaaacaagaaggataaatgaaattagttttagtttcagctgtctccctttataaatctttttactaattctaacacatgtgtttctaagagcattcgaaactttcctaagagggatttaaaaatgttggcatgctaattcccaatcaagactgaggctctgcaggtaacttttacagcctactaataaaacctattttattagatttgttgtgctttgtcttaccaagaatataaacttcctgctttgaagaaagggaatgaagtttaattttatcttttaattccattcaaactgaaactatacagactgaaagtcctgcacatactataagatgtgctaatgaagttgcagattgttgtaaaaggttactatgaaaggagaatttaaacagaaattatgagagtgtatattctcttytgtactgtaattcaatagatgaaatttaactttgttttatcacccttggcaggaaaatcattcaacctctgagtctcagatagatgatttgtgagaaatttgaattacacctaacctggcagtgggcaggcatctgaaacagatgatctcaaggttccattcagcaataagatctatatttttatattttttggttttaagttggaaactaattttacatatattcctataagactctgtcttatgggattttaaggttccactcagataactgtattagattaattctcaggagcaggaatagtgtcaccagatattaaaaagcaagtttctgtgcatatgttgacccaaaccataataatatcattattatttgtagacttcctaggattgcagaaagcctgtcacacatctgcataattcatctggacctgtatccctcttcctaaaaataattgttaatatcacagaaaaggtcactgaccccaacccaattagagaatttagacaaataagttcacttatctaagcatttactgaagttgctctccgataaaacctaagaatttcttagccacaagaatatctaatctgggacaggcaaaagtcacttggagtcaaatttatccttaagtgccagctgcaacatattctaatgggtgataacaccctacaacagtaacgtccttgcagtggacattcatgggctggaagtggctggatgtgcatgagctctgagaaggaggagattttgtctaaagttcctataccacaccctaggtgatataagttatgtacctgatgacaaaggctactcatggaaatgcaaaagtgagagttaaaataaaaagatatagacaaaagtccaaggattttactcaacaaatacttattgattgagagtcagctacctgccagacacactgttctaggcactgagggcacagaattgaacaaaaggaatgaaaacctccccctcacagagcttacatcccagcagagcatcacatgggggccaagccaggaaaagcagagactgcaccaaaaaaagctcaattgcagaggagaagaatatcatgcatgacaaagccacatggcaggaagcaagggaaaagtcaacaactaagagcagagatattgggggatgatgatgcagtagtcgagagagcagccgatgagcacattaactgacagagccggcctggagttttagatgctggccctgttcccattcctctgcctctccgattcctaagagagtagaatctccataagacaagcagccaggacagattccagactctgacattcagactacttcagtacctataatgtttggatgtgagaaaaaacttggctcattaagtgccatattctacacaataacaattctgtatggtaataaattatcctgcatagtactattgcatttcaattgaatgtataactacataggagagaagctaattatccatgggtattaaagatggttgtttaaaaaggcattagaaaactaagtagaaaaattagaagacgaagttcataaamatgttctgattcaaccagccatcaaattaatataacccatcttcggcaaagttgacaaaaacaagcaatggggaaaagactcactattcaataaatggtgctgggagaactggctagccatacgcagaagactgaaactggaccctttcttacaccatatacaaaaatcaatgcaagatggattaaagatgtaaatgtaaaacccaaaactataaaaaccctggaagacaacctaggcaataccatcctggacgtaggaatgggcaaagatttcatgacaaagacaccaaaagcaatcgcaccaatagcaaaaattgacaaatgggatctaattaaactaaagagcttctgcacagcaaaagaaaccatcaatagagtaaacagacagcctacagaatgggagaaaatatttgcaaactatgtatctgggaaaggtctaatatccatcatctataaggaacttaaatttacaagagaaaaacaaccccattaaaaagtgggcaaagggccgggcgcggtggctcacgcctgtaatcccagcactttgggaggccgaggcgggcggatcacgaggtcaggagatcgagaccatcccggctaacacggtgaaaccccgtctctactaaaaatacaaaaaaaaaaattagccgggcgtggtggcrggcgcctgtagtcccagctacttgggaggctgagtcaggagaatggcgtgaacccrggaggcggagcttgcagtgagccgagatcgcgccactgcactccagcctgggggacagagcgagactccgtctcaaaaaaaaaaaaaaaaaaaaaagtgggcaaaggacataaacagacacttttcaaaagaagagatacatgcagccaacaagcacatgcaaaaaaactcagtatcactgatcattagagagatgcaaatcaaaatcacagtgagataccatctctgaatagctattattaaaaagtcagaatagctattattaaaaagtcaaaaaataacaaatgctggcgaggttgcagagaaaagggaacactaacacactgttggagggagtgtgaattagttcaactattgtggaaagcagtatggcgattcctcaaagagctaaaagtagaactgccattcaaaccagcaatcctactactgggtatatacccagaggattataaatcattctaccataaagacacatgcacacaactgttcactgcagcactgttcacaatagcaaagacatggaatcaacctaaatgcccatcaatgacagactgaataaagaaaatgtagtacatctacaccatggaatattattcagccataaaaaacaatgagatcatgtcttttgcaggaatatggatggagctagaggctattatcctcagcaaactaacataggaacagataaccaaataccgcatgttctcacttctaagtaggagctaaatgatgacaacttatgaacacaaagaaggaaacagcagacactggggtctacttgagggtggaagtgggaggagggagaggagcataaaagataactattggtactgggcttcattcctgggtgataaaataatcggtacaacaaacccccgtgacatgagtttacctatgtaacaaaccttcatatggacccccaaacctaaaagttaaaaaaaaaagacttgaaactaaacatcatgcccctaatcctataaccctatataggcatacctcattttattgtgcttcacaaatactgtcgttttgcaaattaaaggttgtggcagctctgcatcaagcaagtctattgatgtcatttttccaacagtatgtgctcattttgtgtctctgtgtcacattttggtaattctcacaatatttcaaatgttttcattattatcatatttttatggtgatctatgattggtaatcttggatattattgtgattgtttagggatgtcacaaacttggccaatgtaaggcagtgaacttaatcaataaatgttttgtgttttgaatgctccatcagccagccattcccctgtctttcttcccctacttgggtctccctgttccctgagacacaacaatattgaaattaggccagttaatcactctacaatggtctttaagtgttgcagtgaaaggaagagtcccacatctctcattttaaatcaaaagctagaaataattaagcttagtgaggaaggtatgccaaaagctgaaagagtccaaaagctaggcttcttgcaacaaaaaataagccaagttgtgaatgcaaaggaaaagttcttgaagaactagttaaaagtgttcctcctctaaacacacaaataatgcgaaagagaaacagctttatcgctgctataaagaaaatttaaatgatctggatagaaaatcaaacagccacaacattgacttaagccaaagactaagccagagcaaggctctaactctccccaattgtatgaaggctgaaagaggtaaggaagctgcagaagttgcaagctaccagagattggtccagaggtttaaataaagaagccatttccataacatgaaagtgcaaggtgaagcaagtgctgatgaagaagcttcagcaagttattcagatcatctggccaagatgcctggtaaaaatggctacactaaacaacaaattttcaatgtaaatgaaatggccctcttttggaaggagatactatctaggactttcatagctacagagaagtcatgtctggcttcaaaacctcaaaccctctcttgtcagtagttaatgcagccagtgacttcatcttgaagccagagctcactgacaattgcaaaaacccaaaggtcttaaaaattatgcgaaatctactctacctgtgccctataaatgggacaacaaagcttgaatgacaacacatatgtttaaagcatgattcactggatattttaagcctattgttgagacctggtgtacccccccaaaaatttttttttcaaaagggtgcttctctctgacaatgcacctggtcacctaagagctgaaacagagatgtacaagaagatgaatattgttttcatacctgctaacacaacatccattctgcagcccatggatcaaggagtaaatttgactttcaagtcttattatttaagataatatatttcataaggctatagctagtgtagacagtgattcccctgatagatctgggcaaagaaaattgaaaaccttctagaaagaattcaccattctagaggccatttggaacatcatgattcatgtgaggaggccaaaatatctacattaacatgagtctggaagaagttgattgtgaccctcatggatgactttgaggggttcaagatttcagtggagggagtaactgcagatgtggtggggataccaagagaactagaattagaactggagcattttaattctgcagtgaattcactataaaactaactaacaaggagttgcttcttacggataagtgaagaaagtggttccttgagatggaatctactcctggtgaagatactatgaacatttttcaaatgataacataagatttagaatagtacataaatggccgggcatgatggctcaagcctgtaatcccagcactttgggaggccgaagtaggtggatcacttgaggtcaggagtttgtgaccagtctggccaacatggtgaaatcctgcctccactaaaaatacaaaaattagctgggcatggtggtgtgtgcctgtaatcccagctacttgggaggctaaggcaagagaattgcttgaacttgggaggctgcagtgagctgagatcatgccactgcacttcagcctgggcgacagagcgagactccaactcaaaaaaaagaatagtacataaacttagttgatcaagcagcagcaggatttgaaagaaatgactctagttttgaaagaagttctattgtgggtaaaatcaaacaacattgcatgctatagagaaatcttttgtgaagactgcatgcaaacattttattttattttaagaaattgccacagccaccttaaccttcagcaatgactactcatcagtcagcagctatctacgtatgttgaggcaagatcttccacccgcaaaaagattatgcctcattgaagactcagatgattttttgcattttttagcaagaaagcattttaaattaaggtatgaacattgttttttagacataatagtattccatatttaatagactgcagtatcatgtaaacataacttttatatgtactgggaaaacaaaaaattatgagagactcattgtattacaatattcacttcactgaggtggcctagaattgaacctataatatctctgagatacgtttgtgctggatattttaagacatcacatcacaaaacacgcacacaggcacactgaatctaagtattaaagaggagagatctatactcctatggaccggaaactgtaggagtgcaaagggaagaattcagactagtaaataataaacactgtcatcaatcaagcaatttaagtgttttcttttattttgctcctgcacgtttgtaagtgtgtatgtgttcatctacctcatgtagattccctccatctcaagtggcagaaccaatgaattaatccaggtttcttattccagaaaattactatatctttacttatatcaccatattcaaacaacaccccctagaacaacctggaagctgaggtcagttgtcaataatttctactatattaacatccaaccaattctatatagcttttgcctgaccatttgctgaattacaagcaaaaggttaattgtatgtcatttttccagtcttactttctctttgcacagaacagttggctccatctgatggccttaactaaatgaatccacctttgactttcattaaatgcactgaaattaaactcaccaaagctcaataaacttttcagatatttcaaaagacaactcttcttaatttcatttctaaaactctaaatgaatacattcccctctgttctacagctgggaatctatagataacgaatcctataatctactctaatgataactcagaaacagagccaaagaccttaaattcataacactgaacttaataatgaaaggagagttgacattcagcctttctttggttttagactcagctaataaaattacaaataatatataattcccatgtgctcaattaactcttagtaagcctttaagctttgcatatgtgagatggcaacgttctttcctacatctatttttgagatattttagcatattacaattaagtgttctttgttaatttttttatgcacctaggaaattatagaaagattctgatgacttagtaccccacaaatttaacccttctggtatcagtacagattaagaactctattagtcaataataattcattcagcatcatgactttttttttttttgagacaaagttctgctcttgttgcccaggctggagtgcaatggcataatctcagttcactgcaacctctgcctcacgagttcaagcgattctcctgcctcagcctcccgagtagctgggattacaggtatgcgccaccacacccagctaattttgtattttctttagtagagacagggtttcactatgttgtccaggctggtctcaaactcctgacctcaggtgatccacccaccttggcttcccaatgtcagcatcatgagtttaatgaagcaaaacatttcctgagtcagtatgggagtaaaaaacaaataaatatgcaccatatgccatacctatagttatagccttctcagttcagagagatgacaaggagacattgaaagttaacaaaagccaaagactgatgtctttttctcattaaaaaatctagtggtagaacttagactccaaagacatattttgtaaaggttcatcagcattacttaggaacacctctatgtagcacacatggatagcctagtctactttgaactctgccttctatgaactcctgaagcagatatacccctaatttcatttaggtaaaaatttaagttaccctgacagtagggaaaaataataattaagggtgggggactataagaaagaaattgttttcacatcataagctttcccagtaggcaaaaatgatgaaaatttctactgtgttttcaacccaatagtccatatatatgtccagaagcagggaacctacagcaacagtcccaagaaaaattactttccctgatggtaacattcacagtctaaaaggaaaagagcagcagcaatagtcatcagtagctccaagcaaatccttctttctatttgaaatgtcaataggccacctacagctaagcctatgaatcaaccagacttccattctgtttggctgcataaggacctatatatgttaacacagtgaaacagttcaattcacttttttcagcaaattgcagataactgagatgaaaatgctttaggattggggagtgagtacaagatggaggcctactattggtatagctacttcaattcttcatttcacattgccaacaaatatttgaaattgtgaaggagcctccctttcaccttcctcttaccatgaggagtatccttaaaggaaaaggaaaaatagattaatctgtatgttttcaaaattcttcctaaggtagattcacggttcagttttacaatcaacrtagcacatgttgtccatccagcaacagaattcacacaataaattgctatctgacatatggagtatgaagtgaattgcttttttttctttataggtatcctgatcagaatttaaagatttttcagaaacaaagaccttcrtgaggtcacaggtagccctttgttgagtcttttcagtcccagtaactatatacaacttaatacaataaataatctcaacggaatatttagacattgtcaaagattgtgtatgtacaatactgcattgctagcattaaatgcattttcaacttccaatattttcaacttaacaatggcattgttagttgaggggcacataaataagtaatatcaccacagccacataygaggaatatacataacaagcagcctgcctctctttaaaacaaaacaattatagaaagctaagaattccaaatcgctcttcagcaactgagaaatgtaactcatggtcactgtgagcagtggctagaactgacacattttgatcactaaattgtgttatggtgggagtcccctcctccccattaatagccagtgtttccaattttgctaatgctttactgacatcacaagcaaagtgaaaatgactaaagacaatgcatgagtcycttgagcaagcatctgagaaacaaatagcaataactccttattagcatgacttttagccatggattataagtaatgagtaacagatgtctgatctggtgtccctttattacattatcttaagggaaattcaggtttattttcaagctattcttaggtcaggtattgtaaggcaagaaaagtatttttattagtgggaaagaaatgtttttctagatgaaccaagtaacaaagagaagaatgaaaacttaacaagagtgctcaacccacacagaagaaagaagctttttacctggaatatgctggaatatggggggaaaaaaaactgcacggataaagagaaaggagaattgaactttgtcttagctctaccatggccctgtttgacccagaacaaggcccaagaataaaatgtattrctgcctcttctacagcacaggaatattatgagaactgatagatgtcaataagtgaaaaaggaagaacacagttaggttaaaaaaaatcaaatgaaaaatgaaactattttagttttaccatttttcacgtagttacaaaatacagtggtatttttgtgttccctctttgtttcttgttatctctctttccacccaccacttcccacaacaaattgagggggaggggtggtaattgaaacttcygttaaatcagtcccatggaaatggagcatggcaaaccaatactaaccacagaggaaaaaaaacttaaatgttttaatttggatgtgaaaatttctcatttaatgaaactcatgagtataattggatgctgagtcaatgagccagcaagtatttattaagcacctgctaagtatatggcattgcccgggcactggggaccaatgaaaaataaataagaccagatacttggtcttaagtatcttagaatatgttaggaacacaggttgaaaaatataatgtaataaactgttaaattctaagacattttagaaagtaagagaaaaaataataactatgatgtctaatttctggagttaaaactaaatagaaagggctaaaagaacagaagtgaacaatggcataaaagttcagaagagaatgaatagattttgttttaaagcctttgcattacactggaagaaggtaaagacactcattaacattagactatgttaagcatacacattaagatatctaaagaaatcgctgaaataatagacttggagattttaactcccaaaatagtaaacgagaaaaaagtcattctaaaggaaaacagaaagcacaaagtaagattacagacatgaatttaaatgtattggcaattcaaactaatgtaaatagactaacaacaggttaaaacaaaaattgtcaaagtgattttttaaaaaaatataactatgtactgtttacaagagattcaaaagagtataagaacattggaagttaatgtctaaaaatgacatacagagaaatactcagcaaaataaatctggtattaatagcagacaaaatgttccttaatctacaagtcattgctagacataaatgcaaatattgctagagatacaataatgtaaaaataayggatagaggtatcataaattattgctacataatagaaattatatgcagaatagttatatgtaattactcataattattaatggttaatagttggtggatgataattagaaatccatcaaaatttcaattccccagggagacataattttaaattggtatgcaccttgtaacgtagcctcaaatatataaaatataaattgccactgtaaagggagattttgaaaaattcacaaaagtaattggagattttaacacatttattttaaaaagtgatttaccatacagtttttctaaataattacagatttggacaacacaattcacaacccacaaaaatttcattattctaaagcattcaggaatgttaacaaaaagcacatcaccacatcatggtcataaagcaagtcttgaaaatttcaaaaacatttgtataataacttactttctgatttaaaaaaatattaaaaattaatagcaaaaataaaacaatccaaaaactcatgtgtacagtaatgttaaaataagctttccaataacctatgtatgggtcaaggaagaaagaagacatcaaaataggaaaacaaatcatgtactgtatacttgaaaattgctaggagagtagattttaaatgatctcgccaaaaaataaataaataaataaggtgacagatatgttaaatggcttgatttattcattccataatgtatacacttctawcaaaacatgactttttaccccataaatctatacagtaaaaaaaattgaggccgggcgcggtggctcacgcctgtaatcccagcactttgggaggccgaggcgggcggatcacgaggtcaggagatcgagaccatcccggctaaaaacggtgaaaccccgtctctactaaaaatacaaaaaaaattagccgggcgtagtggcgggcgcctgtagtcccagctacttrggaggctgaggcaggagaatggcgtgaacccgggaggcggagcttgcagtgagccgagatcccgccactgcactccagcctgggcgacagagcgagactccgtctcaaaaaaaaaaaaaaaattgaattaaaaaaatttttaattcttggaacaggaccttgtgtctaaatgtctaacctaaggcacatattttttcatattttaatatctctgaaatcaaactgtatcttgtaatcaacaacgacttctaattatcgttggccagatgacataattgccatgatctgcatataagcaattgttattcccagtggagtgacaaggaaatagcattctccatgtttcagtctgcaaacttgtaggaccatctgaggaagaaatagaaatcctgtttgttgaccaaaaaaatccagtagcatatttctagtaagatcaataaastaccagcaacaaaactcacagaataattgtcaacaattaggaagcaaatcccagggaaaatagtaaagcactctataggaaatgctcttgattatgtaacggatactataagaattacataatgtgaagaaattcagaagagttggaatttgtatgtggggaagtttaataaatagcttaaccaatgaatagcttaagcaatttatttttatatatacttttatgtgtatgcacaagaagaatatatggcaaaattatgtctttcaacaaaatttttaaatcttccaataaatagaaataaaaaagtagacattatgggaagtgattataatagcagcttttctttcttttacataaaataatgctgtatcttatagaagatgattatggtaccacatgttaaatttggtggtaaagctaagttacagtaagtagtggatatttacagtaaagaaatcaaagcttgaaaataaatgagctctgcatccaaatgaaaaagttttctaaaaaatgaaaagaaatttaatgaaggaaatcagtaagataagagcaaattttaatgaagaagaaaacaaagatatgatgaggagggtcaacaaaactaaaagtttttgaaaaaaaatcccataagataatgaaaacacatgtgacacacagggagaagatatttgtaacatatatacccaacaaagaatatgtccagaatatagaaagaacgcttacgaatcaattaaagagacaacccaataaaaatgaacaaaagacttaaaaagttgctttacaggatagtatacatgaaatgcttcctatctttttgttttgttttgttttgtttttgagacagagtcttgctctgtcgcccaggctggagtgcagtggcatgatctcggctcaatacaacctccgcctccccggttcaagcactactcctgcctcagcctcctaaatagctgggattacaagcatgagccactgtgtccagcctccatcacttttttcattcccaaaagttttattcgattttaaaatgttttttatttattttcatttatttatttttgggtttttttcaactttagattcagagggttcatgttcagatttcttacctaggtatattgtgtgatactgaggtgtagggtgtgactgattccatcacccagataccgaggatagtacacaatagttttccaacccttgccccctccctctctccccaagctagtagaacccagtttctattactgccatatttatgtccatgagtacccaatgtttagctcccacttaaaagtggaaacctgcagtatttagttttctgttcctgggttaattcacttaggataatgggttccagctgcatccatgttgctggaaagaatataatttcattcttttttatggctgtgtagtattccatggtagatatgtaccacattttctttatccagtctaccactgatgggcacctaggctgatcaaatgtctttgctattgtgaatagtgctgtgaagaacatgtgagtgcatgtgtctttttggtagaatgattggatttcttttgaaaatatacccagtaatgggattgctgggtcaaatggcacttctgttttaagctctttgagaaattgttatactgctttcaacaatggccaaactaatttacattccaatcaacaatgtatatgcattctcttttctctgcaacctcaccagcatctatttttactttttagtaacagtaattctgactggtgtgagatggtgtatcactgtggttttgatttgcatttctctgatgatcagaggtgtggcacatgttttcatgtttgttgtctgctgttatgtcttcatttaagaagtatctgttcatgtccttagcccattttaatgggtttttttttccttgttcaactttttaagtttcttacagattctggatgttagacttttgtcattgtagtttgcaaatattttctcccattatgtaggctgccactttactcagttgatggtttcttttgctatgcataacctgtttagtttcattagttcccrtgtgtcaatttttgatttttcttcagtttcttttgaggacttactcataaatgcttttccaaggctgatgactagaatggtgtttcctagtttttttttttctaggattcttatagtttgaggtcttacattgaaatctttaatccatcttgaattaatttttctatgtggtgaaaggtagggatttaaattgtacaataaatacaaattaaaaagtagacattatgggaagtgattataatagtagtttttctttcttttatataaaataatgcttagacactatgacttaattcatctctctaacaccagcataggttgagtctaatacaggcaatatagtatattttgtaagagcccaattttttagtcagaaaaagctgatttaaatcctagctctacctccagttagcaataggaatttaggcaaatcacttaatttttctttgtatcagttttatctgaaaaaartgtggataataatatctatgtcttttttttttttttctcgagacaagagyctcactctgtcatgcgggctggagtgcaatggcacgatctcggctcactgcaacctctacctccagggttcaagcgattctcccacctcagcctcccgagtagctgggattacaggcggtgccaccacccctggctaattttttgtatttttagtagagatggggtttcaccatgttggccaggctggtctcaaactcctagactcgtgatccacccacctcggcctccccaagtgctgggattacaggcatgagccaccacgtctgcgataatatctatttcataagacagttatgaataaatgtatgacaactatgtgatttttcacaaattatttaaaaatctgaaaactgaaacaccaccaagcctattatttcggaataataaatggttgtgtgtaggagtacaatacagtagcccttcagcaaatgtttgccaaatgaaaaaataggcctgtcttccttctcttcactccataaaagatggacttctcaaaccacaaccttcaccactacccacacacacacccttgtactaccaaatctcagttcattcctcatctgtattatgctaaaaatctcagggtgaaaatatgtcaaatgttcattatggaaattaggtttctccaagaaagggtaggcacaagacccaatacagcgactgtccattttgaagcaaggaacacatactattctcaaattggaaaaaaatatgagaactaggaggacagttaaagtaaatatagaagaagttgtatgactttgtatatctaagctttggtttcataagcgtttggtcagataatatgtaaggtcctcttcagttgtcgcattctcttagcccgtgtaggatgctgacagtcattgggtgctcagaaaatagaatctagaagtagcagggaatgtgtcaaagcacaatagtaaacaaacgttaaaaaaaacctattccatactgacaaagatgaagctagactgcatcattcatatggcccaaggagatatctaaagagaaaaataatgaatagatatagatgaaagaataattctctccatttgtggggctatcaaagttacacagaatgtatgattactgatgctattacagttttaatactaaaaagtagatctaatattataattttattatattataaatcatatttttttatttttcagaaaatattttagtgaggaggtcacacgctattttcttaaatgaaaaatatcatttttacatatttcttaagaaactaaaacatctttggttcaattaagagtgtgattttccaatatgtcagaaattatggcatttctacaaaaatattccaagaccatacctgatgcatttgtcacaaatgcaagccactcaaaaactcacatcgtcttcattaagaatgcaaataagtcaaaaagtaattgtttccacaatggcctataaataattttagtttaagtgaattatttacgaattgaaaatgaaattaccagtctattttctcttagtcactgtacctatttttccttcgctggcataaacttattatgttacacaagtgaagggtctccacgctaaattcagccatactacctcacttgtatgctactatgacagaagaaaaagcagatgaacctagttagagtcagacttattaactagagtgggtgttacatttgatttttcctattcaaccaaaaagttcctcacatcttcagcaaaatcccacatacacatgcccctacctcttcccctatggtcctcaatggtttccttgtaaaccacacccttcctgatgatgtggagatgtcttgggtcacccaccaccaatactcaacacacacacacacgcacatacatgtcacagaaagtaagccttcatcaaagttagaaaaaacattttcttttagacatatttatcatgttttatatttttcacaaatgctacactgaggcttcagtggctgttaaagatgactacaaggctggactttgatcaaataaaaaggcctgaattgtgacttggggtgtacttctcatttcattttcccccatgacaagccaaatgcatatcctgcatctgaaattatgtctgacttctctaaaccctaccaccaatgttaatagctgggtcaaatgttcaagctttgctttttagatcaaaggaagtttagaagcaaatggaactaacctcggagattacaaaataaaggacactcatttataaaattcaaaatatacgctaccatggttctagttgcatttttgagtatcagtgtatttcttcggtattgcccacagaatcaaagagctggtagagactttgaaaagtcaccaagccacgcttcaggttctgatggcattatacccttagtaggctaagaaaagaaaatctacctcaccaaacaagtagccccatcttctttttttgtcctatcttcagaactcaaagcctccccagttcattagatccttcagaatacaattaaacctcttttgttttgttttagcttcaaataaaaacacctggtaacatttgcataataaccctattagctaaaattattaatgaatataaacaataataaggcacagaaactgaggctatggaaggagagaagtatgcatgtttgccatgaaagccagcatcatttttggacttaattccatagtaactataagataaaagtttggatttgttcttattttttcctttttttgctaagatctcctttctatcattctccttcattgaggggggcaggggagaaggatgacaaatgttaggtaagagtcttggactttcccaagaaagaggaaatcatgaagtcaccaatggttagaacatttctctgctaaatgtgttcaattgctgtggaaatcctgtcaccttccctgctctccagtaaattaatcccaacttcctgctcagtgaaccagttgtcagtggagaagagggaagcagtgttactgaagccagccttccagggtgagccaacaatgtctagttttcagggctttgatccctttcacttgctatatctaaaggtcccacagagtgcttttagataggctttcaacgccatgataaaagagcaacgtgttcagtaacagttatcaaaattaggtcaagactgagactggcaccaggcccacttcacatccagctctcacccacccagaatgtggcagtgctgtctcctactccccaccctaactctcccataggtttgaaaatttgcctcccttactcaaaaaggtagcacatctaaggtaaaacttttaagtaaaatctcctttcatgagcaatgaatatagttctattcaactgcatagggttttctcagcattttaatatctagaccacattcactgtttattggctcattcatttattgagagtgtattaggtgttagacaccatgctaggctttggttaggaaagatgagccaaaacatgtgcatttcctgtgttcagtggagcttacagtctatctaaaggggaatatcacgtaaaagagtcacaaatatagtatgtctgtgtgtgtaaccacacacagacagacacgcacatacttggtgctgtgagaatatagaaaaggttgagctgaccttgtctgggaagtcagagaaggcttctctaatgaaatagtgattgagccaagatgtaaaggaaacatagaagctcattctgtaacaaaatccctttcctctcttttacaaaaatctatatttcacttggatcaacactattcacaggtttccattaagaatgagaataatctatcttcctttaaaaaaaaggtcagatactaaaaatgtacaactcatttctctctctgttgaacaacaaatagaatatagatgggcttttcccctttggctttctaattgatattgttaaattcataaagagaaatgaatagactactcttcacatgtaagggttatattgtttactcaccatcaatagaatacaaattaggagagttttttaaacataacaaaactttttttttcttgtctcattttatggtgacatccatattctttctcattccactttcctcatcagcaagaaatgtatatatctgtaaagagagtttactgtacttgagaaggaatcagaatccaaccgaccccaaagtgttctcaagtaccttacctagggtgtctcaaaagcaaaataaaaaatgtatcctgcaatgaacaacgtatagcactgtctcaattcttcctgaattctttgtaaagattcagcttgcattttcaaccctaatccattttcttaactttacaatcccaatcccttcctgaattctgactatactttccacatgtaggatgtgtctcactgtctttctagacagtcttctctccttaattctttattaaattctgctgctctgattttttgttagtgcaacttatccaggatgttggcttggatgtggaatctcagagaaactagacagatcaatcagaccctatgacaaagatcctgtttctcatctatatggaaatataaaatatgacccagtcataccttgagtgtttcaggagtgattacagggaagcaagatagatctagcccattactctcccttgtttatgatgcctgtcactctatcagagaagaaatgaaataagtctgccatgatttgtcttcacagtgccacactgactatttcctagtttatcrtgcatttttattctctcccacatgatggtctcattgacaacttcatgcaagtctggaaggaaagggcaactgccaaggttagtatataataagagtcctgaaatccagggagatcaggtttccaggacaggaaaccaagcactgcaatccacaaatgactgcagggtctggaaattgagggtcaattgcctagacaaggagtctgagtaacaggtatagaaaactaaaagcaagtaggattgccatacctagtcattccgttttgtcattccctgtgcactcatggcctttctataaaacaggaagccgttctcaagctcatgtggcctggctggagcggcaagtgacaagcacaaagcagagcagcatgtgcaacttgctctggcccctgccctgtgtaacagcataataaagaacttagtggatcaaccaatagtcgatgttctcctgctgttagtcacatgagggcattgtgcaagatgaaggtcatcttctaccacaatgacrtcttcaaaatattaaagatactttcccaagcatcccaagggtctccttgactctccattatgaatctatccacaaagaccttatttaaatgattttcaaacataattatgtatacatactacacaaacttttgtgggtaatggattctacatgttttcagctcagtttgtataacagtatatttcattttatttgaccaaaaaaggggaaaaaaacagtttgttaagcatcaatatgtagtaaataggaggctaccattcttgaacacatttcatcttcacaggactacagtgatctccattttayaggttaggaatctgaaatgcaatgaagtcaacgggtttgttagttgtcaggggagcagagatgagcacagacatgacagacggatacgtctgactttcaatcaccttcctgcttcctgttcacccgcctactcagtaacacaaaaagagcctccctggccaagatggtagccttagaacatgctatgatctctccttcccaccccaaattcctagaaattacaaaatagcttgttgaaacttagaggaagaatcctcagtaaacctcaaattcagggaaactattaggaatccttcaaagataggagacagcacctaaacaaagaagggacataaagctgcaaacacccagaggcacagactggagccctcctggcaaataacacttcacatgtgtccagctatagctggaggaatcaggcttgtcctgtgtgacttcgctgtgaaagaatttttggaagattgtgcccagtgtcctccagactttgccccatgtgcctttgccctttgttgattttgctttggatttttttttttttttttttttttttttttttgctgtaataaatcttagtcatgagtatcacaatatggagtcctgtgactccttctagcaaatcaccaaacttgggggtggtctgggggatgctgactcattgacctactacctgaccaggtccaaatgactctttgagcaaactcaaccaaagttttaagtaaaagaaaactaactgtagccaagctgctctcaaacatagaaaacactatgctacgtwtttttttttttttttttttttgagacggaatctcgctctgtcgcccaggctggagtgcagtggcggaatctcggctcactgcaagctccgcctcccgggttcacgccattctcctgcctcagcctcccaagtagctgggactacaggtgcccgccactacgcccggctaattttttgtatttttagtagagacggggtttcaccgttttagccgggatggtctcgatctcctgacctcgtgatccgcccgcctcggcctcccaaagtgctgggattacaggcgtgagccaccgcgcccggcctatgctacgtattttaaaggctaatagaaccagacaagggatatggaagaacagaaagttctcacacaattttaattatgagcaacattgtaaaagtcctaaataaattattagcaaatcaaatctagctttttattaaaacaaacatcatgatcaggttgctcaggccaaaaacctcaacctctctctctcttcctctcacaccttgtatgcaattggtcagaaaacatccagttacctctatttcaaaatagaagtggatgttcttcacccccactgccatccaccaagtcagtctcaatcacctccctcctgtattcctataataagctctttatatgtctccatttgcttcctttgctcacccgccacccacacccccacacagtctatttgtccagagtgagcccgcagaggcacaggcaggtgatgccatacctctgcttagaaccacacaatgtcagcccatctaactgagagtacaaaccccccaaacacactctgctccttatatgctttgctccttccgcttgccattgtacttatctcttctaacgaaaaatacaatatttcatttattatatgtattggtttttttctttttttgctttccatcattagaatatcagcttcattatgccaggaatttttgagtgttttgttcactaacgtaactcaagtgcctagaatggtaccagttcctgtaggcacttgatattttttgaatcagtatgtgaccaagaattgaaaaatagttccagataagaaagatatcaaggcaattcactacactaacatgttacacacacacacacacacacacacacacacaagcttaatagatgctaaaaagtttcatttttaaaaaccttacaaattataaatagaagaaatattgcctgttttattaaagaaatagcaaacatcatgcttattatgaaattggaagcatttcattaaaattagagaaaggaaaacagatgctcattttcacagatactagtacatattttacggggtgtcctagaaatgtaacaagacaaggaaaaaaatattaataaaacagtctaggatggagacaaatagtcattacacaagattttcacttaatttaaaaaaacaaatagaatcaactgctaaaatactagcactaagttatgtaacaggacataaaatcaacatacaagaatcagtaattctcctacacagcagcaataacaaattgaaaaggtagttttggaaagaacataaaatagacattcagagcacaggctgtaaaatacctgggaataaatctaacaaggaatattcaagatctttatggagaaaactacaaaatgtttctccctctctctcacgactctaaccatgctgggctctgtacggttctttgagcacatcaggcagcttcccagctcacagttttgcaccggtgttccctctggaaagcagctttttctcaagatgttcacatggctcacttttttccctgattcaaatgttactttatcagagaagactctgctaatcaaacagggtatgtgtgtgcatacaccacacacacacacacacacacacacacacacacacacacacacccctctgttgttctgtcatcctataccctactttattgtatcataatggaacatattatacatttgtttcttatttctctattttctctcttccctcactgaaatacaaactactacttaagagtaggggcatttaaacaatgatgtatccctaacacctagaacagtactctaaaatagtatatacttaaaaatatttgttgagtgaaggacacacaagaatatatgaataaatgaaggtataccatgtgcatggagaggaaatgttgatggtataaacaacataatgatcttgatttaacctataaattcaacacaatctttctttcttttttttttcttttttttttttttgagacggagtcttgctcttttacccaagctggagtgcagtggcgcaatctcggctcactgcaagctccacctcccaggttcacatcattctcctgcctcagcctcccgagtagctgggaaaattcaacataatcttaatcaaaagccaagtagaatgtttccatggaacttgatgagrtaattctgaaattcatacagaagagtaaatgatcaggaatagacaaagcctggaattgtaccctaccagatccaaaatatattacaaagatataagaattaagaaaacacaacaytgattcagaaatagacaacttgatcaataaaatagaatacaaattagagaagtgggtcaatatttgtgaacattttgtatataagaaaaaaacatcagcatgtcagattactggaggaaggcttttaactagctttttttttttttaactcaaaaactgtcaagtagctgggcacggtggctcacacctgtaatcccagcactttaggagggaggcaggtggatcacttgaggccaggagttccagacaagcctggccaacatagtaacaccccgtctctactaaaaatattttaaaaattagctgggcgtggtggcaggcacctgtaattgcagctactcgagaggctgaggcaggagaattgcttgaaaccgggaggcggatgttgcagtgagccgagatcatgccactgcattccagcctgggtgacagagcgagactcctaatcaaaaaaaaaaaaaaaaaaaaagtaaagtgttttagacatacctctgttatactacttacaaaatatgactcaagattatttttacctaagcctgcctacctattagggttgttatgaggattacatgaggtagtgcatgtaaaagaacaatgaaatgcattaatatgtccctcacataataaatctcagcaaattcagtgttaataattttttcaaatttttattataataaatagaaatttggttgatgacaaccatcaaatcttattctttgtcttttagtacttatactgtttgctgagttaaatcagaatccagtctgctactttctcttatcttgctttatcatcatttacttccttctatatcttgattttttttttttttagacggagtttcgcttttttcgccctggatggagtgcaatggcacaatcttggctcactgcagcctctgcctcccaggttcaagcgattctcctgcctcagcctcctgagtagctgggattataggtgcccgccaccacacccagctattttttgtatttttagtagagacggggtttcaccatgttggccaggctgtctcaaactcctgacctcaagcaatccgccagcctcggcctcccaaagtgctgggactacaggcgtgagccaccgtacctggccatctagatttcttttaataattgtctctaaaagcaatgttccacacacaaatatgacatagttaaatataaaattaatagttttcataagccactttaagtgtggaaaatgaagatagaaagcttcaactatcttttttaacactgaagaaatttacaggcagtaaggtatagtcccttctagtttcacagattggtatgtctgtctacttaaggctaaacccctgctgggaatataaattgctacagagagcaaaatgttttaagtttttcttatcttaaattgagaattatctaacaaatgtatctatattttccaataatatctacataaaatgacttctaaatctgaacttagttaaaatttttgtctaaggagtcaaaatgtatggggtaaggtagtgatttgtcaagattaatgaagctgcagaataaatctgatgcatcttgttggcctcgaatataaaattagccaggaataatcaatactgatataaatcaagaacagatcatgtgttaaatgtgaaactttttttttttgagacggagttttgctcttgtctcccaggctggagtgcagtggtgcgatctcggctcactgcaacgtccgcctcccaggttcaagcaattctcctgccttagccttctgagtagctgggactacaggcacgtgccagcatgcccggctaatttttgtatttttagtagagacggggttttaccatattgtccaggctggtctcaaactcctgacttcatgatccacctgccttggcctcccaaagtgttgggattacaggcatgagccactgcgcccggccaaaactttttatatttagaggtcagtgaacaactgatttagaattttaggtaatgtagcaatggtttgtttaattagtagggaccccttctaaattcaattagtatagccacctagaataattatagtacttgggagaaactacaaaataagaacamtataaaacccaagcttagatggcttttactctatactagaagaagcattgtttcttaatgattaataatcattagctaaaatcacagagtttatcaaaaaaatgtattcatctttaaagcatctgtagggcastaatacacccctgaagcttttttaaaaaattactcttggctttcatcccacagtataatcttgaacagagaagcaacaatgttagcctcaaacatcccagctaaaatccctcatcatttatataaaaatcaaaaattaattctcacttcagcctcaagcttgagaaagtatcaataaacacattcacaaaaatcccagtaatgaatgtaatcagagtgaaaagggctgaattttcaggagtaaatgaacaccactctcatgtgctttcttaaaattgaaaaatacatcaaagattattacaaaaattaaatttgctaatgatgtataaagagctcttgcatgctaaccatatgccttccacaaaaatagaaatcgttaataaccatctcaactgagttactcgtggtgagtcatcatttatgttggcctaatgtagtctgagatagtctcactcatgtttatattttctggaagccccraagccacccttataaattgaaagagacacagtaatagagatagagaatgcaacaaagattctgtatcatcatagaactccaatcacagaataaattaaataaaactgtactcagagagacagttggaaacagatacttaaaataatgatcttatataaaacttcattaaaaaggagggtggagtatactgtggttttataatcattttttataaatgatcagcactgttaatttcctaggaattttccactggaagagasaaaaatcttattgatctctctcttctcacatttacatatattttacatgtatacaaagcatattacatgtatgtgtttctttggaggtcctttgccccttccaccatgtgaggacaaaactagaagacaccatctatgaggaagcagactcttaccagacatcactggtaccatgatcttggacttcccagaactatgagaaataaatttctgttgtttataagctcctcagactatggtaatttcttacagcagcccaaatagactagacaacactcatgagatacccacatgccgaacgtgcatacctcgccatgtgggcagtgaggacaggctggaagcgatttctcaaacataaattatcaggcacattcccaatggatttgggattttacgttccttgaagaatggaggctttgttttagtcaccttgtatttccagagctgagccagtgcctggcacagaacagacaataagtgtcttacggaatcagaccaatgcaccacaggtgtgaaccagagatctccctgctccagttaagcaatatgtgaaaagtcacatatgcctaactggctttgccactttgtaactggccaaactcatgtgagattcttactaattatttgtgtagaactaattgtgcttttttcctgtttgttgaattcatgtcataaactcactatttaaatttgcatattcttctaagttcttcccttcctgtttcttgagagcggggactatatgttttggcatgacacattgaatagaatatttcaggtctataaggttccaaaactactgtcatttttggaagaaacgtgatgaaaacatactacagaatactatagtaagaaatataattcttatgggtagcatgcttatattctttcccagtagagttaaaggttacaaatgccattaaaaatgcacatataatatttaaacaagtgaatgcagtaaaagtaaaggtagaattatttatcttctgcactcctttagaacaagggctacatactattattctttgaatcctgatactgaatacatagcaggaccccaatttacattgaagtgaaagtatacataaatggaaaaaaatgctattccaataagcatttataaaagctatttatgaaagcaccaatagtttggtaacaatcagtgcttaaaaacagtaataaaatctttttatcgaacatctacttgatattaggcagtactatcaaagtattgcacgtacattacttcatttaatcttaactacaactttaatatgagataggtgtcataacccccacgtgataaatgaaaaactgtgttttagaaatgagtgacttgccaaagtcacctgcatagtaagtggcttagccagggtttctttttttctttttttttcttttttttcttttttttttttgagatggagtctcgctttgtctcccaggctggagtgcagtggagatcttggctcactgcaagctctgcctcccgggttcacaccattctcctgcctcagsctcccgagtagctgggactacaggcgcccgccactacgcccggctaattttttgtatttttagtagagacggggttttaccgtgttagccaggatgggctcgatctcctgacctcgtgatctgcctgcctcagcctcccaaagtgctgggattacaggcgtgagccaccacgcccagccagccagggtttcaatccaagtgtggctgatgttcaygttcttaaccacaaccataccccaaataattggttaattggaggaacactaccaaaaggaagacacaattaaagagaaggacaataaatttctcaggcatccaaattccttaatgtgttctttataacaatgtcaaacaattggcatcttcttagggtcactgcttaattttattagacagaacaaacctgatgtgagaaataattaacttcgrgggaaagcccctggttcaatgaagcctttttattagaacagtaaaacaattaagtttgttgtgccattgacgtgccttctctgatttctgatgagaaaaaatgtctttttccactgccatacaaacagtggattctgaaaacctccaagccagaaaacactactaatgagatttgagaacacagaggggctctgagactgcatgtttgatttgaaaggagagagcacagctcaacggagggtcatgccaatattcctgcagtgtggcacaggtgcaaataaatgctgaggctctgaaaacagtcttctcatcgtttacggctctcagtcccaacaaatgattgatttatctcaactgttaaggaaagaggtccagacaaagttaaaaatagcagagcccacattgtataccaaggcaattttttaacaacttgatcactgactgagaagaatcctgaaaattctagaattcatgtgggagctaaagaggttcattttctagaaatgctagaaattagagtttgatgatttcacaccaatgatattggaatacaaactaacataaaaactgcaacttactctatagtttaaaatatatttaactgccctgagagragatatattagaaaatgatgacactttgatttgccatagtcagtgtaagatctgctgtacctaatacatagctttacattgttatattccttcttttgttctgtgttgaattacctaatttatttttacgagactgagctctgcttatttcattgcaagacctgaaatcatgtgtttactgctccctactcaatttatctttaaagagggacataaaaggcagaaatggtttgttaggttttttttttttttttgctttatctcagatacagagctttgcccaagatatcctgcatccacacaaatgctgataattaatgatgtgaatcaactgaaatccatatacctctttattagaaaagcaaaatctgacctgaagactgaaagtgtcctgtgaatgagaaatttatctgcaccaaaatccagcataataccaagaataaaaccctttctaattgtacatgtaaaatcctgattaatacttgctctgactatttattagaaatgagatgagagaagagttcattcaatatgcctggctgcaaatggaccaagcactctgacgtggtactctttcactgacccatgttcacaaattcatttaactacttggacatcatcctcttaattcttaaaacccaaagcataccccacattattcttaataccttaacattcctatggctcttttcttttaacatctaattgattttccactgaaatttctttcaaaagactgaactggaatccgattactccaagaaggatcatattaacagtcaagaattcagttcctaatctttctatcaaaagagggaaatgctgttcagcatgaggcaggggccatttaaccttcctctttctctgctgttccatctgtctaaaggatcctggtatagagtcatgactaaaaccatggctttggcatcagactggcctatattctaatccttactagatgtgtgatttgggatgagccatgggaagtttaaggtattctctttgcctcattttcctcatctgaagaatgttaataataatgttaaagtattaattgaattaaataagaaagtgtttgtgggagctcttagtaaactttaaagtaactgacatataagtgttggttacatatcctggctctgggtcccattaaaaagaagccatttctacaatgtaatgtacaacatacaactctacaagtacagaaggccccaaaagcaagaaaccataaaagaaaaggtctgtttgaccatataaaaatttaaaatttctacgtggcaaataataaataaataaatagttactaaaataggaccgaagaatcaattgttagctggaaaaactatttgcaacacgtaagataaacgaaaggcttatatcgctaatatgttttttaaaaagatcataaaagttaatttaaaagaaacagcatactaataaaaacaatggatagaggacatagtaggcaatttgcaaaacatacaaatggtcaataaacataataaatacattcaacctcactaatcactgaatatccaaaataaaaaccatacaataaattcaaattcagacaagcagaggtatttttaaatgggcaaaatcaccatttgcaaggaataagagaaatggacacactcaaaatatgtcagtagactgttaagtcattacagtctttcaggtttgacactatatatccaataaaaaaaatgcrtaacctttgtgccaaaaatcttctagaaatttgctcccaaataggtaattgtccatgtaccaaaatacttatgaaaatcatttttatcrtattatttttaatattaatattggaagtaatttaaatgttcttcaatatagaattgcttaaataaagaatgttacagccatacaaagtagcactatacaaccaatccaaaaacgtggtatatacttgtatttgctgccacagaaaaatatccatgacacactgtaggcatagaaattgattacaaaaagtgtagtatagtttcatacataaaaatgctatatttatatatatacatgtgcctagagaaatatcagaaagtatattcactcaaatgccactaggtaatgaagcttccaattattctgatttctcatttgtattttctgtattgcttcatttttcttcacgagtatgtattatttttacaatcagagaaaatgaagctattttcattttattagaaaacaaatatactacttccctagagataatattttaataatgatataactgctctaggtctttttctatatgttttataaagttagaaatgcatttctgggactcacagggataaaacgaaattggaacattgcagagatgattaaattgagagcatctcacattccaaacttgaaaaaggctgccttaccaagttccacatcttactagctgggtggctttctgcaagttacttaatctctgtgcgctcaattttctctcttctgtaaaatatgggtaataataacacttatctagtaagattactattaggatgaaatgaatcaatgtctttaaagctcttagatttatagctgacatcctagaaaagaagtctgccgttcattgtaaaatgaaatcatacacaatatctacgtggcccatcatgaaagtactgattactcttattatcatgtgtcacctaaggacactgtgagagractaataatttttgctgtcccagagtattracagtcaaatagtctactgagtgtgattacatttaaatatagcatcatcaaaccaagcggggagagagagagaggtcagcgaaggcgtaccagagagccaaagtccaggatatctgaggttgtccaattctggcaaggtgatatcaattactttgacaaatcaataaacttctatattaaactattactactaccttgcatttatacagtgcatgagagttttgggggaacttgcccatctccatgatgagttggcagtctttctgatcatgctgccagttgaatgtgggaatggagactgtgctcaaccagcactttaggataccaactcctatgggggcaaatggtacagggaagctagaggcttaggaagaatgatgtggagggatagggaaaagaaggcaggtcatggagagaaaatagccagkatactaatgtatgtcagtagcagcaacagattagcagcccccagagaagagtttacatcgtttctgaaattctctactaaactctggaaaacttactctgagaacaataaaaaaatgkgaaaaatgaacctttcaggttaaagcagggatgcagggtggggtaaacttwttcattcatttattccaatgtgtcaactgtgctaagtgctaggcttataatggggtacaaaaccctcacataacctccagtgtgatgccctgcctactcacctgccttacacctccctgagttccaagataatccctcaagaatcttcgacccgcctgtgcaacttaaaaatcactagattcagtgttgttctgggttcaaaaaaaatgcttgaaacaaactgatttagggtatgtttgtatcaagaaataaaaattacaatcttgaaaatgagagtcataaatcatgaaatctgaaagaccaatcaattattcaaagccattagatctggctttatgcaataaagatctgaatttacacaataaggaaaaaatactgtctgaaaatgaaaatagaaacacagagatatacatattaccaaaactccctaagtcagaggtcatgcattcatctataaacttatgaaacattcttattacacaaagaaattatgcaaactgcaaaagagctttttgtttcaataaagctattaaatgcattaattgctctgtgttattacttaaaggcagcacaattaatttgtcattcctaccaatgcctatgtgtttttgtatggctctctctctttagctatcccaaagtactttcctaaacatttattttatttttatcctttgttgtagagctgcaaaacgtgtttcatcacagactggggaagctgacataagttcagaaacaaaaaaaaagtcaaatgtggttcagcatgttccgtaattaaacacagttgcaggaatgggaggcttcgtttttcactctcttgctatcaaaaacttacccactgatccaaagtaaaaataagagctaaaaacctgtaacttttctaaatagaaagaagataaattaaaatctgttctttaaaatacaggaaagtatgatttatgttttcatgattttgaaggtacagtctcaaaaccttaactgaatgcgtaatgtctaacagaccattaagtaatgggaagaaaatgccaagtaaagggaagaaaatgttttcactatcacctagaaattgagtgtgatggagaaggatttggagatgacttcagcctggttttatcaaattatgaatcaccagcattctgggaaatctggactaagccatatgatttctcatagccataaatgacccaggaaagctctacacctctggacataggaagaacagacaaccatcctgcagaaatcagagcaaaaaacaccctgaaacaacttcccaaccatttcactggctgttctgaaagacttgaatragtcacractgacctggctcttggggttcaccagcctagttatgacctgatttcasaatggacaaagaaggacagatctttttatctaacagccttgtggagcaagatttgatgaataaaatacatcttaagttgacctcttttgacaggaacagacacataggggctggattttgagtattctgagaatagtaacaataattttgtacttaaaagcttaaaacatgcttgcaatgttatttgactagatctcataacaactgtgtaacatakgtaggactatataattatgtctagaaccagagctctttttctggcttattatcctatgatataataatgcaaatgatatacattctgggttccaccttatacagtgcatttttagattcagttgcatataggggtcttcctttgtaatccctgaggttttgaggaaaggaaaataattttacttgatttttttaatccttagacgtagataactgcatttatatctatatctatagctctatctatagctacatctacatctttatctgtatgtgtatccatctacatgcacaaagatatgtcaaggaactgaagacacaaatatgtatgcaaacataaatttacattatatagtagacatgcatatatatgaaatattccaaataagcatgtgacttaattattaatagttaaattaacacctataaattctttgttctcagttaagcaaagtgtaatagaataaaaccaaagcacattttcaacatgttaagtgttggttgtatctaatatccctgatgaacatagatgcaaaaaccatcaacaaaatactagcaaactgaattcaacagcatattaaaaggatcatacactatacgccatgatcaagctgaatctatttctaggatgccaggatggttcaacatgcacaaaccaaaaaatatgttacaccacattaacagaatgaagaataaaattttcatgaccatctcagtagatgcagaaaaaacatttgacatatttattgataaaaactctcaacacattaggtataggaagaatatacctcaactcaataaaggctatatatggcaagcccacagctaacattatattcaacggtgaaaagcttaaagccttttccgtaagatcagaaaaacaagaatgcccattctcaccacttctattcaatatagtacctgaagtcttagagcaattaggcaaaataagtaaataacatccaatttagaaaggaaacagtaaaagtgtctctgtttgcagaccttatatatagaaaaccataaatcttatatacagaaaaacatatatcttatatatagaataatcataaagacttcatgacaaagctgttaaagctaaaacaaattcagtacagttgcagtatatgttatcaacaaacaaaaatcagttgtgtttctatacactaacaatgaattatccaaaacagagattaagaaagcaatcccattcacaatagcatcaaggagaataaaatacttagtaataaatttaactatggaagtgaaaaatctgtacactgtaaactataaaacagtggtgaaagaaattgaagaagacacaaataaatggaaagacatcccatgttcacagattgaaagaattaatattgtcaaaatacccaccaaaggaatctacacatcagattcaatgcaattcctatcaagattccaatgacatttttcagaaaaatagaaaaacaattataaaattcatgtaacccacaaaagaccctgaatagctaaagcaatcttgtgcaaaaaatacaaagctagaggcattattctctctgatttcaaattatattacaaagcttcaataatcagaatagtatggtactggcattaaaacaaacatgtagaccaatggmacaggacagagaatccaaaaataaacccacacctgtaaagtcaactaatcttcagcaaagatgccaagagtacacaatggggaaagaacagtatcttcwataaattgttttgggaaaactagttatctgcatacaaaagaataaaattgggacttcatctcacatcatatccaaaaatccactcaaaatggattamatacttgaacataagaattgaaatcataaaagtcctagaagaaaacatggagggaaatttccttaaaattggtcttggcaatgatttttttgatatgacaccaaaagtacaagcaacaaaagtaaaaacaaacaygtgggaccacatcaaacaaaatagtttctgcacagcaaaagaaacaattatcaaaatgaaaaggcgacctacagaatgggaggaaatatttgcaaaccactaatctgataagaggttaatatccaaaatatataaggaacccatacaactcaaaagcaaagaaacaaataacccgactttaaaatgggcaaaggacctgaatagtcatttctaaaaagaagacatacgaatggccaagaagcatatgagaaggtactcaacatcattagtcattaggaaatgcaagtcaaaaccacaatgagatgtcacctcacacatgataggatgmctattatcaaaaagtcaaaagatagcaattgttcacaatgatatgaagaaaagggaccacttatacactgttggtgggaatgtaaattagtacagccattatggaaaaccgtatggaggttcctcaaaaaattaaaaatagaaccaccatataatccagcaatcccacttctgggtacttatcgaaaagacatgaaatcagtattttgaagaggtagttgcactcctttgttcattgcagcattatttacaatagccaagatatggaatcaacctagtgaccatcaacagatgaatgaataaagaraatgtctatatatttttaagtattatwaagccttgaaaaaaagaaratcctgctgccatttgcaataacatggatgaacctggaggacattatgttaagtgaaacaagccaggcacagaaagacaatgcatgatctcacttacaagtggaatctgaaaawgttgaactcatagawtcagagtagawaggtagttaccaggtacttagaagtgggggaaatggggagatttgatcaaagggtatgaactttcagtgataagatgaataagttctgaagacctaatgtatagcatggmgactatagtcaataatagtgtatacttgaaatttgctaagaaagtagatcttaagtattcttaccacacacataaacataaaaggtaactgtgaggtggtggatatgttaattagcttcattgggataatcacttaagaatatacatatttcaagacatcaatctgcacattttatatatatataaaatttttatttgtcatagttctgtgaaaacataaaaataaacaaacaagaaattgattgtttgccctggtgcctgtagaccacattttgttggttaaccagaatttagatctatcactaagactaagggagagaatacaatataaattactgtttaactaaaagacatatgttttgctagcccacttcaacactaattaaagcacacattcattttaaaatgaaaataaactacaaaaggtttaaaacaaactaatgtatggcattaaaccatatggtctttcttttgtgtaactgtagcttgcatatttaactcttcatctaaatgtttccttctcctctttcaaaattctcccaaagtatactattatatttatcctttccccttgagtgttataatgaatattcttcagcatcaaatttttgtcagcctaaaatatacttacatatgttatataggtatacagattttgatacatactcgttctgcatttcacaggtaaagacagaaaaataaaatattaaccaaccccatctcagcacccctggcacatatacctgatttcttttagtttttacattcccaataagcagccattgtcctttgtgcccacatgtgtatgatccacagtctggatcataagaccacaataaagcttgtaatcaagccttgtagacataattgtgtactctgaagttagattcccaattatggatttccacagactataaataatagttaaatggttgagtgctctctgacataaaattaaagaagaaagaaattcccacattaagaaaaacacgacttggaaaaatcagataaaagtccttacagtgctggcattttttgtcaatgtataaattagaggcatagacaaggtattcttctcaccattatagacttgcacaagctttaagaatgacaaaggccatatattgataaatattgtacgaatgcttcatayatgctaaagtaacatacaataagcatttcaaaatgtttcagcagaaaatattgcaagtggatggtatagaaggaaaataaggggagayagaaaaataaatgatgcaaggaagacaagaaggataggcttgcatcagctctagagaattaaagaaattagtgctaagatatttgataagctagaagtataccttcgtagttgctctgataagttcttgaaacttttaggtggtcatcagctcaaaccactatgttggatttagtttaaaaagctgccggtatctcaaagcataaatgagaattttttccatgcaacttaggaaatctaaagtccccaaagaagtaatgcttgtgcacatgcacacacacgcacacacacacatgcacacgcatacataaaatgctaaggacaacaaaaaggagaaagaaagaagagccttggtgtcttagtccatttgagctaccataacaaaaagactgagtggcttgaacaacagaaatttatttttcacagttttggaggcatgaagtctgagatcagggtgccagcatggtcaggctctggtgagggccctcttcctagcttgcagacagccagcttctcactgtgtcttcatatggtggaagagartcctgttgtctctccctcttcttatgaggagaccagctccactggatcagggctccactctcatttaacccatttaatcttaattaccttcttaaaggccctgtatctcatacagtcacatgaagggttgggatttaacacatgaaattgagggagacacaattcagtccactgcatctgcttctttggttatgggtcagtgttgatgaatgatgcagaggactcacaagtccttgactcctgctctgcctgtccccatttcacacagaatgacagattataacgagcagaatgtggattataagcactgctgagagacgatataaacccaataaaaggcaaacatttaaaaagaaaacaaaagctcaacaagaagaaaacaatcagattcaataaagggcaaagaacttgaatagacccttcttcaaagaacatatacaaaaagccaatagtcacatgaacagatgtccaacatcaataatcattagggaaatgcaaatcaaaactacaatgagatactacctcacaccattaagatggctacttgcagaaaataacaagtgttgacagggatgtggagaaactgaaacccttgtgcactgttggtgggaatgtgaaatggtacaagcactgtggaacacactgtggtggttcctcaaaatattacaaataaaactaccatatgatccagcaatttcacttctggatagatatccaaaagaattgaaagcaaggtctcaaggagatatttatacacccatgtctataggagcattatttacagtagctaatgtggaagcaaccaagtgtccatcaacagatgcatgcatgaacaaaatgtggtatatacatacaaaggaatattgttcacccttacaaaaggaaaaatttgacatatgctacaaaatggagaaatcttgaggacactatgctaagtgaaataattcagtcacaaaaatacaaatacttttattctacttctatgaagcacctaaaatactcaaattcatagagacagaaagtcggatggtggtctccaggggctgaagaaaaggggaatggaagctattgtttcatgggtaaagagtttttgttttgcaagagttatgaggctatataggggttaaggatgtacaacattatgaatgtatttaatgccactgaactgtatccttaaaaattgttaagatagtaaaatttatgttacatatattttactgcaatttaaaaatgatgggttgtgaagaaaacaaaacattaatagctctaaatgagttcatgtgttctagccccatcagatttcatcccgacactgtgaagaacgtgccagagagataactatgccactgccagctatgtttgaaaaagagttggtaaaagactagaaataaggcaaacccaactgtagttttcaaataagaatatgaaaatatggtgaattccaataggagaccagtgaactaagcattcctggacaagatttagaatggataagcatccagaaataagaggagtcagcacatgatcctgcagaagtcatgcggtgataacctcatttcttgcttaatagagttaacatgtttttcagatttatctatactttggtgaggygctgaaaaagatcttcaataatagcctagcagggaagactggatgctcattcagttaggtagattcttaattagttgcaggaccttaccaaaagattatgactgacaattaatgagcacctgaatagaggtttctagaaacaacagcaaatatttatttagcatttacaatgagccaggcattatttggagcattttatatgaattaatttatcgggttttcacaacaatcctataagatacgtaataatattactaccccattttaccgatgcggtaactgaggtttaggggtttgtaagagcgtttgcccccaagattacatcaaatctgctaaaggtcaccagtgaccctaagattgcaaaatccaatgatcaattcccagattttgtcttgattgacctgtaagaggaacttcccatggctgctcactcatccctccttgaaacactttcctcagctgacctacagcatacctcactcctagatttcttcctaactcacttcattctcagtctttttgctggtttcacctcatctcactgaccactacatattgcaatgcgccagagtttagtgcttagacctcttctctattcacattcaatatcaaggagggttcaaccagtctcatgactttaaatatcagctcygtatcaacaattccagaatgtatgtgtccagccaggacctctcccctgaactccagatttgtctatgggactgcctacgagacatatgtacttacgtgtctatgcagcgtctcaaacttaacatgacttrtcaaaacttagctcttaattctagcacatctctctcctctgttttccccaaattatttcccatccttaagagatatataaaccaaaaaaactcttggagtcatctctgatttctctctgattttaacaaccacccccccgcatctagtctgtcagcaaatcttgttggctctattttcaaaacataaccagagtctcgccacttcctgccacctccattgttactatcttggcccaaaccaacatcgtctttcactaaaatgattgcaatagcctccctgaattatctttctccatcccaccttgtaaccctagggtttatgttcaacacaacagtcagagtgatactgttaaaatatgtcatatcatgtcatttttctactcagaatgctctagaagtctccatccacagaacaatggtcaccagggcccttcatggtctggtctcattacctttctgacttcgtcctgcactattttctcccttcctcactcttatctcagacactctggttgttcaatttataatgaggacatagactttaattatgatatttttgaacctctctttttttctgaaggtaaaataaaaactcttatttttcttattctttctttttcaacttttatcttacatacagggaagatacgtgtagatttgttacatgggtatattgtacccaggtagtgagcatagtatccaatatctagttttacaacccatgccccactccctccccctctagtaatccacagtgtctattattcccatgtttatgtccatgggtgctcaatgtttagctcccatgcagaatttagttttctgtttctgcagtaattcacttaggatcacagcctccagctccatccaagttgctgcaaaagacatgatttcattcttttttgtggctgcatagtattccgtggtgtatatgtagcacattttttaatccagtccaccatcgatggacacctaggttgattccatgtcttcgttattgtaaatagcacagctatgaacatacaggcacatgtgtctttttgttataatgatctcttttcctttggctatataccaaataatgggatttctgggttgaatattaactctgttttaagttctttcagaaatccccaaaatgctctccacagttgctgaactaatttacattcccaccacagtgtagaagctttgtttttaacaccactaaccatgatgattttcattagtcagctttgcctcactttaaatttctgtaggcaaagttctacctgacaacagaaaaattccatgtaccacaacagggagacattttattttcattgctgctcagccagcagatcatactgtataaacctatttacttgagactcaagccaaagattttaaaggcaatgtttatataacaatgttcataagatacagcttcacaagcatcccagtgatttaaactgaaaagcagctttcatcaaaggcacatatgttctgatcctacactgactgcctcaggcaagtatgccacttgacaatattttagcccaaacacaaactgaaaaacacctgtaacaggtttaccaacaaaattcacacagcattgtgaagaattccctgtgcactacagaatgctgtttactaaaatctaatagaacaggaattcagccctcatttttttaaatttagttcacagtactgaatgagagtgatttttcatctcacttctctattgctgtccacttctagtccaatgagtataatagaaacctgactttaagaaatgcaagatatttaggtccaactttatccatgatgctggtacatttcatgccttcctttaactctaaagtattaaccctatgtgaaaagtttagacccttgactcaacctacataatgacacagtgcttgatcatttttacagtgctaatccatatatttaagggattggagaragatacctgccggagatgggcttsaggaatgatgtagtatcagggatggcctggatctaatgagtacagagaaaatgatcgagcagaggttgtatataacagcaraggacttccaaaaaacagagaccatgcagaacagctgggaagccaagcagacagtaagtagacctacaggttaaatagacagatattatagcaatgaacctctgatggatttagcaaggttgggatattctctagtgacaagtagcttgagacaaatggtwaatagcaatgggaamgttttgatcaagagctacataaatccggatgataaacacatgacagaggagcatgaaccagcagaactaacagacctatgcaaagaagcagagagactcagccagagatagagggttgacgacatgtatatacctctgtttcctctcaaaactccacaaaataacagtaaatggattgcgtaaagccataaagccacaagaacaaacagaacagtagaacagacaaaagcaacaaaagtttggaagctggaaagcataggacaagtagtaactaactcatcagatccaagaaagctggatcttaaaccagcagaaaggaatgataattaacaatctgatatgcagtacagagccactaaatatcccaggaattgtcaccaccaagtactttgggaagtgaaggagcaaaggtggggctaaaactagaggatttattgaaagtctgtttaagaaacagatggacacctacccctccagatgccttccctaattccacagagccagtcaatttcccttttcacacttcagcagactagagaggatccctgcaatgaaggaagagcagaaagtaggggtttcacactgaaatcaggggttatgtgaaagcttacacactgagtgtcaaaccctcagctctattctccattcagcttccagagagatcagtgcaagggctatgttctccaggctggaaactagaaaattcctccctgagggaattggcagcctaatagaaatgaccccaaaatactggtgttgaggattttccacaaaataacccaattagatctccctacataaagtccacagccacaaatcagccaaaaacagacagccaggattccgaggcatctgcataaagcctccaccatgagaagcagagaccaaaaccaacaaacaaaacatcatcttgatagaaacagactatgtggggataagaaaactacacataaactttcttataccctcagaaagagaagaggagattttgcactcatgaagtgaaaacacaatgctatgagaaggaacacagagaaaaggcaagagctcttggaaattaacgtaggcaagcagaaacaaaaactcaaaagaaggattagaaattggaatacacgaaaacttctagaccatagagtaaaaaagataaaatcatagaaaactgtagaaatgagattaaaaaaaaaaaaaaaactaaaaaaccaatccaggagatccaatagccaaataataagaatttcaagaaagggaaaaagataaaaccaggagtaacttgtgaatgaaataactcaagaaaatatcccagtagtgaaaaataggcatttccaaatgattacacatacccattgggatgaaaacgaatccatagaaagataccttgtcatagtaacctcacaatactgggaactaaaaaaagattctaaatgtttccagagtggaaacagaaagaaaaacataacatttataagaatcaaggctcaaatggagtcctctgaacagttccattagaagttcaaagacaaaagaacagtgcaccaaaattttcataaaattatttctaacctttaaatctctacccagacaagctatcagttaagtgtaaggataaatgaaagacattttaaaacacgcataatctcaaaaaattcttttatctatactttctctagaggctactataagaggtgttcattcaaaacagatataggaaacaatgggtccacaaaagagaaaggcaaagggactcctggagatcagggctaatgggagacaacaggctgagggctttaagtcaagcctgggatagtgcaactagagaaagtcagaaggctcaaagaaagagccctccagagataaaaagttataaccgcctaatgtgagcatgatgaggttagagttacagaatggaagagaatttggtaataaatttaaaagaagcaacataagawactaagaaaaaaaattgtgataatgactacactaggggaaatcaaatgttgtacaggaaaataatcacagtataacatatgactcagttgtaaatagcatatacctagtcataataatgaaaacagctattgattatatcaaaattatgatctaaatatagagaagatttagaaaattggaaaatgcatatatatgcacatatatattatgtgtgtgtgtgtgtgtatgtgtgtgtgtttatgtgtgtgtgtgtagtggtagttaagagacataggacaggaaagagaattatataattttattttcatcttccaaagatggaagtcaacagacaatgactaaaactgaaaattctctccaataatcatgtaaaaacaaaaagataaatgccaccaaaaaaatgaaaatgatttgaaagtcatctctgggaaatgtctaaaggcatgaagatcaaggaatttccatttttcaaaataaaccttatagcgctatttggttctttaaactacatgtatgtattacctcgatctaaaaattaaatttaaaaaactacagtcagataatctgaattagcacacagattaaatgaaaaagaaggcaggagaaccagagacgtggaaaatatttgagatttccttcccttcatctgtgggccctgtgttccttccggtttatctcagctctgtcttccctggtattagccattacccaaatcccagtagaatcaccactttttctctggaaacttctctctaatgactgaataaattagcagttcaaattacgcagcacagaaaggctctgatcaaacatcagaagcyactgaaatctccctgtgagtaaatggacacacttttttcaaatgcagatttctttctttctttctttcttttttttttttttgagatagagtctcactctgtcacccaggctggagtgcagtggcatgatctcactgcaacctccgcctcccgggttcaagcaattcttctgcgtcagcctccctagtagctgagactacaggcgcaaatttctttaaaacacacttatatagttttgtttctttagcaaacaccaaaaatgatatttgtgcttctcatctaacttgaagcagtcctgaccttgtgttgccctctatagaagagactatccaaatttcataatcaaatgctgcccatagtacagacagttgtttccaaaccattaaaattcccaggttgttctcttctgtatccaatgaacaaagaaagattggaagtatggcaagtgcatttatgccaggcctcagcatgatcgaggatgagggacacacaggtgcagagtgttttcagtccctctaattcctagctcttcctaatgacccttttgctatcctctcactgaaacagtggcagtcacttttcaagaggagtgtggtaacagctgagaacaaagaaagcagcttagctttgagtttcaaattagacttttttaaagcccatagccaaaacaataatcttaaaagcatagatttcctttgcaagtgccaggccctcgagatagcaaatggtttttttgtcgtctttcttgttgtgttttgttttcactttaaaatcttagttcttttcccagaaaacatggtggtgggtggcagtgaaacataagagggcagaataaaaggaactataggaggtaacaagagaaacccaaaataggttgaagggaaaatcaaaggcagcaaagaagtatatccagcttcccatccagaactctacaacatgatagacacagagtggccagtacagccatagcacagatgtggcagtcaagcgtactatgaaaggtggaaaagtggggggatgagggaagaggtcctaaactaagttattagctctgtacagaaaaatgaaatcagtcacatgttcattcacctatgtttcactgtatgaaaatttaaacccaagactgaagaatttaggtctggagaactagtatggttttgaatttacaactttacaaatatggagatcaaaatacatttatctcttcaaggaggatttactgagcacctgctacactcctgttatgctagggatacagagtggaactagaaagacaagttccctgcctttgtggctccattttagttagaaagacaagcaataattacataaagaaagaattaaagaatataattagagaccatgatgaagaaataatgaagtataaagtaatagggacacttcagacagactggaggaaaaaggtctcatggcagtaaacgagggaaaaggtggtgtgaattaataatccctggttatttttcccacagagctaggaaaaaataaaaggcttctcttcttcctcttggcatcattaccttagctccttcccacccctgcctgccaagcggcagcccatgctccagacgtcttctccaccctcctctgaaatctcaacaattattttctcttcattgagacactgtgccagtttaaaactcagtccaatctggtacagagatgaggaacttacatcctttagaggacaaaatggcagcttcaaggggccttctggagtcaagaacacatgcagcaggatttctaatggtggaccattgagcaaaatatctgagagtcggctggctcccatgaagtcactttttgtgggagaaactgctcagcctatcaggagagctgcccttgatctttcaataatttgttcccaatatcacagttttcaatatttacgacagcaatgcagtaacatgatccagcaaaacaaacagagaagaaatagcaagagaggtcaggggagagccagaaagagagaaatattaaagaagccaaagaagaagtacttccgtatgcatgaaaaagtgtctatgaaatctagcaaatgtactctgagaggcagtataggagaagaggcccattttcaatagggagtaaatgaagaaaaggaagtgaagacacatgctttagaaagctttaaaagggaagaattgctgggtaataaggcaaagagaatgcaaggtccaggtcaagtgttttattcacatatgtatattagcttaggattaaaaagacatgagcatgtttatcagctgaagagaaagagccagtagagagagagagagatggacaatgcagaagaaagaaaaacaagctcaggtgcagtggctcacacctgtaatcccagcactttggaaggccaaggcaggcggatcacttgaggtcaggatttcaagaccagcctaggcaacatggtgaaccctgtctttaccaaaaaatacaaaaatcagccgggcatggtggtgcatgcctgtagtcccagctacttgggaggctgagacatgagaattgcttcaacctgggaggaggaggttgcagtgagctgagctcacgccactgcacttcagccttggtgatagagcgagaccctgcctcaaaaaaaaaaaaaaaggccaggcacggtggctcacacctgtaatcctagcactttgggcggccaaggcaggcagatcacgaggtcaggagttcaagacctgcctgaccaacagggtgaaaccccgtctttactaaaaatccaaaaacaacattagccaggygtggtggcacatgcctgtaatcccagctactcaggaggctgaggcaggacaatcacttgaacccaggaggcagaggttggggtgagtggagatcacaccattgcactccagcctgggcaacagagtgagactccatctcaaaaaaaaaaaaaaaaaaaaaagatgaagaaagaggaggagaaggaaggacaaacaattagaagggaaaaataatcaagctacagcacaaatctatgtacaaatccggggccacttcacagaatgctagaatcgtatatgtgactgcccactggacacaacaaatgaccatccatcgctaacttaagagcagttgcttgccctgaaagccttaaatcctgactctctttctctcaaaccctcatgttttgctggtcttaccgtatgtctggaatctaaccaatcctaaccaccaccatcatcatctctctccttgacctgtctgtcttctttcatttttgaccctgtacagtctattttccacacagcagctggattggtatttgtaagacataagacaaatcaagtcaatctggtctgaaaccctcaaaagtcttcccatctggctcaaagtaagggctactatcctgtcctataaggccctgaatggtttgcacccttggccacccctagcccaccttcctaaggggagagtcaggagtgtaaaggaatgcacatctgcaacacatttctttttcacagaagtaaaaggaaggccatctgctgcaatgaagatgagtggtcataggtttcggaaaggaggagaacgtgtgcaaattgtacaggaattgttgctcagcaaaatgttacaggaagaagattcgtaagattgctaaacattcattttaggggcagctgttcacaaggctgtctagttgactccagccagtgctcagcaaccctggaacagaaaaagagacaaatagatccagatggagttgttaaggcagcaaaagggcacaggatgaaggaatttggagtgtcagtgtgtgcctggggaggagggtctgctattctctagctgggtcctcataagggaaagaagttggggaaacagacctatgaagggaccgtttggaccctttctaaggaaaccaacaggaaaactcaacagcccagtctaagaaaagttcccgaggtctactattcccataccgaagtctcatcagaagagtcaataccagacctgcctcctttgctgatgcctaaataggggcatgaatttaaatgtctttcccttacaggacactttaaatgagtaatggtcccaaattagaccttcacagcttaagatctggtgggggggtgttgttaaaaataagctcaactttaaaggagatagagtctaaaaagggtagctacagagccagcttcaaagggaatttttaaagcctccagtatttcctgagagtccacttaaatatagttctcaccccataaagatctccttacctacacactcagcctaaagctaccaccatgtgcctggtacctaaccttccagggagggctaactcagttgtcacaacatatgaaaatattaaacaagtaggtaagaagaagtcacttaggagctggcttagaaattactccaaataaaatcccctctctggccatatcaaagaaatccttaaatccatgcctaaaggcctttggtatgacatttattttaataagttctaaatatattcatctatgaatttgtgagtctttcggcctgtgaaaaaacatttaagtattacatattaagcaaaattaaaatcagatgtcaattgatggatatcacatatgtgagaatcatctacatccccactgtctgttctacaccagagtatcacttcacctaccaggtgacagtgtgtcctgaaaaatattttctcataggaattaatattaaattcattggaaagtcaccaaataagtaaataaaattctcctctgactaaaacgtctgttctaagaaagttcaatttcatacaaacttctaagccaatgctacctttcgttttataacacaaaagagaaattctatgtctatgttatgcatctaataatcgaacaagtatattttgttgaatttgaaatttgatttagaaaaacatattggctgtgaaaattactgcatcagcataatctacctccatgaagttaatggctaataatacattattttccttcatataggagaaaaaacggtttggaccccatgagttccccatgtggctctctcccctcaactagccaatcaaacaagtcagataaagtcactgatgacctcctaaggcctcccagatctcttctgacttcctctctcagtggtcctgttgttctcccttccttcttaaagctctctcatcctttgttagcaacagactctccttccagagtcatgcttccattctacctcactgggttctcttctcagcccctctgtggctctccttcttcagagtctactcttggccagctttatgctgactgcaccgtacacttccttgacatgattactttctatacattgttattcccaaagagatctctctgtgcctcatagctctggaaaccagaaccacatttctaaccacctaatgaacatttccatcagaataacctgcaggaaaaagaaccactttcctccagtaataactgcacctttttcctattttagaaaaaagcttcatcatacattcagctgaatttgctagaaatctacaagtgcttttgaactcgtccttctaaaataccccacatattcattaattcacccataaaaacattttttaaagtttcaggaagcttggctgggcatggtggctcatgcctgtaatctcagcactttgggaggccaaggcgggtggatcacctgaggccaggagttcgagaccagcctgaccaacgtggtgaaacccccaactctactaaaattacaaaattagccagacgtggtggtgcatgcccgtaaccccagttacttgggaggctgaggcaggacaatcatttgaacccaggaggcggaggctgcagtgagctgagatcacaccattgcactacagtctgggtggcaagagcaaaaatctgcctcaaaaaaaaaattttttcaggaagcttacgtacaatctattctggagtatcaaaaataactctgcaaagtagagactattatctccattttacaaatgatggtttacataactgatataaattcttataaattatgatgcaaaaaattgaacctagattcatttgtctgactccaaagtccacagtcttttcacaaaccatgaaaccacagaccacgtgccaaatctgatctgccacctgcttaaagttgtattggaacatagccacactcatctgtttaygtattgtttatggctgttttagcactacaaaagcagaggtgagtagtttgcaacagagaccatatggctcacaaagcctaagatagtcactatctgcccatttacagaaaaaaaaaaagtttgccaactctaaatctatactgtcctccatatatttaccacctcaatttatgtcttcctggattgctgcaacagtctcctaactggtttctctgccagtagcctttatctcctccaattcattgtccacaataaagaatcaaatttttcttatttatcccacaacctttaggataaaaggcaaactccttgtgaagctatggaaagctttttgacatcttggttctttcatttctttccattcacatctactttccactcaagccaaagtgaaatgcatggagttccccgaaagggccaagctatttgatgcctacatttttgcatatactatgttctctatacctggaaaatagctaagtcctgcctcatttacctacttattttgtattctgagctcaagagtcactttctcctagaaatcctcctgggctccctcaggctgaactaggcaaacatttttattcattcattaattcattcaacatgtgttcaatgggcacaaccatcaagtaggagataatgctttgtgctaaatacacaatgatgaacaggacaaagacagatcctcttctcacaagtccagcttctttattccctcttaattcatagtataagaacagatgagacgaggatgaaggcagaggtggacattgagatggggatggagagagtaagggagagacagatggatcagtgattttcttgtttgaccctcttaccacattaaaaggttattgagggctcaaaagtatctagtgtttcttaaataccaatgtataccagaacacctggcacaaggctgaatgaattaaataattttgagtgatacaaggacacaagagatgaagatccttgtaaaacgttcaggctagttaataggctatcaagaaaatgtcatgctgttttctggggaaagtcaacctttacagaatttgagaggctttgtgaaaatgtgactaggaatgaaaagaaagatgggtataaaagaacattcctgcaaaagacacaagccctagttggaataagaatcagggagtaaagtgtacatcacacagtctttttctaactactggactacacatctgagactgccctggactacacatctgagactgctaaaccatgawaaaaggtgcctataaccctgaacttggggctccataaaatgttttttctcatgcgaaactcagctcattaaagaaaagaaaaaagacaaagttttctttacaagctatggtaaagcagacacaaagaattgacccagtttccaaaataaacattaggcttaaagctctccccatctggctaaaactaaagccagaaatgaaaatcagcatgtacacactgcattttctacctacaccgcaataacaaggccaagacaaattttaacatgtaacttaatattatacctgaaatacctgaagtcgcatattaagatttgtagaataatttttttctaatattaggaaagggcaacaacccacttttaagcctgtctggatatccacctaggtcgagtacctctccaagtccaagtcccactgggcatggtgtgcagtctcttcctgggccctgatcctttaccctgagacacatgcctttcagtcttcctagctgcctaatttctatatggaaaaacacttctctttccaaaagcatattttcttttctccataatatttattctctgacaacttttcctcttaacctttacagaacattttctatagaaaacacatcttattctccataaagcaatgtatgcactatatgtaaaaagccctaacatctttgtgacaccactttctttccatcttaacctcatctccaataaccagctccatgccatggacaggggcataaatgcaccaatagaaccttagaagtatagaatgttagtcctgaaagggaccttaaaagtcactgatttcaactttggcatttcacaattgaaaaaaataaataaagctcagagagatgtaaagactctccagggtcacacgggcctttgctcccaacttactctatattctcccaatttctggatcttaccatcttctatttatttccttttccggtggggagaagtcagggcaatgcccataacctcagcttgacttttatctgaattccacagaggatgctgaataaactcatcaacatgagaatacagtgtgtggcattggtctcctctgtatggtgctgattgaccagtgtgcaactaaatgcttcccagttgcacttaaccgcctacatgaagattcagatttcttgtcatacacatcccactggcagatggtcttgctatacttttagatgtgctaaaccatttgtctactgcattacagatcatactagtcaattacagaaagtttttagatgtttacgtgattaccaattacatcctatttgaaaattgcagattagcatcattatgacagggcttcctgtctaccaattaaaccccagcaatttttatatttataatttttagtttggtttgttttgctttataagactcagtttgcattgcatcacagcaggacaaattctcattgacatatactgcatgggtcagcctgtctcaatttaccaaagcagacaatagaaaaagtagaaaaatgcttttagagaaaatgaatacccaaattccaatctcatagccctttgacatatgctgaatacatatttaataatgtacttaacagtgtactaaaacatatatatggagagagaaaaaaattatggttgaacttatggcaaagagttattcaaaacatatttttattttatatgtttctttcttttagaaaattataatgaaatatgcagatgtagagtcccttataacggctggattaaactaaaatacagtttatatgataatttagcaataaagaagggactaagtaactgctttcttgataaatctttggaagaggatttttaaaaacatatgaagacaagagtataatcctattagaaaaattccatcattgcattcctttgttttatagtcatcaaaataaatcatccacgtactatggtgccttctgaatagcagcaaaattagtcagtgtgcctaatccttagaaaatctaatattattaggggctcaataataagattatgtaaataaaatggattagaaaacacttcatgaaggcatcattaagtatttaccaagcaaattagcaaggagattacttacatcttgatctaaatacacatacacacacacatacgtatgtacatacatactattttctacaagtgctgcaaaaatattctctcacaaaagccctttggtagtgaattttgtgaatgtcagcagagtagctggattcattcatgaatggacagatacagaggaatggggaggatgtggctaccctggggagtaatggctgccaccagagcagtggaggtcactcaaggcagacagagtatgaaaaaaccaagagaagacaaatttaaggtaaagaatgcatgacggtagatgtatatagagaagcatcaggcaacccttccaattcagaaatctgaacaggaagatttcccatgttgggcaaatataggaacaaaggatttaagtctaagaaattcccaggtagcaggtaagaaaagtatcctgggaccctgctgacataggagggatctggaaggaatctcagttgagtggaattaggggaaggcctatactattttttgaagatctgtctgatatatgaacaaggaaaacttttgagactgtagtcttagacagagcccacatccaacttagcattatggtagcaagagcctaggaaaggaaaggccattgaaaagagggctcataaggacctaggaatcgggattgttgccacattcatacttctaaatttttctgaaagacatataaattttggatgactttctcgagaaaaagagtctatcatttgcaagtagtgattatttttctcaacagaatataggcagttggtgtctccatcaaccttttgataaaacatttttctgtttttgagttataaggttacaagtggtgcttcttagacagccacacagattgactagaaccctggcacaagtgaaaaaatgaacctttctgttttctacctgcctcttccctatcctatcttccccaccacacatacacacacacacaccgctaaatccctggctatggctgctagcacatattggtttctaagaatgcaggtggtttgttttcatttgtttgttttccttggtgttcttgtaggaaaaaaatgatactatatttacaaagagctacaatatccaaatttggttgacatttcgggtctaacaaattttggaactgtgcaaaggtactataacacttcatgaatctagacagctttttataatattctcaggtttttcaaaggaaatatcccatgaaattaccaaggacccaaggactaaaagggaaatttaaaggtatctccctggaatactctggctatagaaactggacttaatcagaagcataaaaggaaaacctaagtcaaaaggcaagaagatgtcaaaaattggtatacaaacagaaaactgctactcaggtattcaaagaatataatagaaactcagagaagaaaacaaccaactttaaaactaggtttttatctctaaatcaaaacaggaacttcagaaaatggaagagatgaggagaaatggaaatttagatctagcaagtataattggctattcatgaaggagagaaggaatagaaccaactctgaaccaaatacagwwtcggaaacccaactgaatatacgtgaaaatttccactgtaggtagattcagaaggtagatggtaagaagcagtgagagaacattttgttggagcttccagtgacttgcttcttagaacttatatcgataggccgataagacacggggttaccaactcagctaaaggaatgactacacccccaaaggaagacaatgcaggtgagcttaccaggcctttcacaaaggaatcggggtcaaagctctaacaccctgcattttgctggcacgtacttgatcgtagatctaactgggatggattcaaggacagaagatcttcatcacgaccatcagggacatcttcaatttcattcattcatatgaaaaattaagattgagcacaaaactcttaagaattgttyagatactggggatacaagaaacggacagaggcctacctctcatggagcttacattctgaaggaaaagaaaaaccaagtacacgtgggttcggatcgtggtagggacaatgaagggaaaggttaaagagtagagactacaggttggcattgaggtgtttttttatagtagggtagcactggaaggaatttctgtagaggcgatwccgtggagagccacatgaattcgggtcataggtcaggagaggagtgttataagcaatgggaaagcaagtacaaagactctgagacaggcctaagactgatgttttcagggaaaatgagatggtgagcatggacttaggaggataagccaaggaagaatggttgaaagtgaagtgagtgaggtaggcagggccatatcaggaaggccttgaaagatgagctagggaatctggactttatttcacacacattggagggatttgagcagaggaatggtgtgatctgatttgcttttaaaggggctgcttaagctttgggatagagattgtagggcaagcataagaaaattaggaagatataggaggttacttcaaaagttcaggccagagatgatggtgacttggtcttgggtggtaatctatggaaggagagagaaataatcaaatgtattttgaaggtaaaccctacaggccatgttattaatagatgtaacatagaaaaacagaaatctaggatgattcccaacttcggggcctcagaaacaaagtaaataattgtgtcctttgactctacatagattttattttcctacaattctcttatgaaaaatataactgtgctagtacatccactctgtaaaatagtttggcaatttctttaaaaattgaacatacacttatcacatgtcccagtaatcacattcctgggcacttatcccagagaactaagaactaatgtccatattaaaaacctatacacaaatgttcacagcagctttgtgttttttgtgtggtttttttttttattttcagttccagggtacatgtgcaggatgtgcaggtttgttacatgggtaaatgtgtgccatggtggtttgctgcaatatcaacccatcacctaggtattaacatagcagctttatttgtaatagccaaaatctggaaacaaatacaatgtccttcaatagatggtgagttaaacagtagtacatcctaaccatgaactactactcagcaataaaaaagaacaaattaattactgatacattcaacttagatggatctcaggggcattatgctgagcggagaaagtccatttcaaaaggttacattttacataatttaatttatataacatactcaaaatcacaaaattataaagatggagagcagatgagtagttttcagggaatagggatagttgggggaaatgggtaggttacatataaaagacagctttgtggtaaaggaacagttctgtatcttgattgcagttgtaattaaagaaacctgcacatgtgataaaacaatacagagctatacacacacattatatcattgtcaattttgatactgagctatagttatataagatgtaattattggaggaaactaggtgaaggtaacaaaggccctctccacactatttttgcaacttccaatgaatctataattacttcaaaacaaaaaggttttcttttttaatctaactatgctcaagtataaggcaaaatgtataaatattaaaagtagtatggtgctaaatacagcctctgacaaaatgttgtcttctgaatttataaagtacatttttgcccatacatcttaccactttgtatacgtaggtatccatttaattaatcatcagcatctctctctgtgtataaggacattttcctgctgaaagcctctggagcaaacagcacttggaattctcactctccctctaactgcaagctctaaccagcaaatagagcctgcctgttcttgttcctatacctgtacaagggttcattagacaaacagaagctgaacaactgccaacactgatgcttcaatagctttcagacattctaaatgatgaaaactacctgcttagactcaagatattaacctttcatgttccagcaaacgcccttggagtcccagaacttttgccatcaatgtcaaaatctaagcctctgcaacatggaatctcagaaaggacagcttagacacacacacacacacacacacaaaaaccgatgaccatgatccaaaggctcaagaggcgctaataatgctaatcacaccttcagtacaatcttttttatttatttatttatttatttttattattattatactttaagttttagggtacatatgcacattgtgcaggttagttacatacgtatacatgtgccatgctggtgtgttgcacccactaactcgtcatctagcattaggtatatctcccaatgctatccctcccctctccccccaccccacaacagtccccagagtgtgatgttccccttcctgtgtccatgtaatctcattgttcaattcccacctatgagtgagaatatgcggtgtttggttttttgttcttgcgatagtttactgagaatgatggtttccaatttcatccatgtccctacaaaggacatgaacgcatcattttttatggctgcatagtattccatggtgtatatgtgccacattttcttaatccagtctatcattgttggacatttgggttggttccaagtctttgctattttgaataatgctgcaataaacatatgtgtgcatgtgtctttatagcagcatataaaggggatatcaccaccgatcccacagaaatacaaactaccatcagagaatactacaaacacctctacgcaaataaactagaaaatctagaagaaatggataaattccttgacacatacactctcccaagactaaaccaggaagaagttgaatctctgaatagaccaataacaggagctgaaattttggcaataatcaatagcttaccaaccaaaaagagtccaggaccagatggattcacagccgaattctaccagaggtataaggaggaactggtaccattccttctgaaactattccaatcaatagaaaaagagggaatcctccctaactaattttatgaggccagcatcattctgataccaaagccgggcagagacayaacmaaaaaagagaattttagaccaatatccttgatgaacattgatgcaaaaatcctcaataaaatactggcaaaccgaatccagcagcacatcaaaaagcttatccaccatgatcaagtgggcttcatccctgggatgcaaggctggttcaatatacgcaaatcaataaatgtaatccagcatataaacagagccaaagacaaaaaccacatgattatctcaatagatgcagaaaaggcctttgacaaaattcaacaacctttcatgctaaaaactctcaataaattaggtattgatgggacatatttcaaaataataagagctatctatgacaaacccacagccaatatcatactgaatgggcaaaaactggaagcattccctttgaaaactggcacaagacaaggatgccctctctcaccactcctattcaacatagtgttggaagttctggccagggcaattaggcaggagaaggaaataaaggatattcaattaggaaaagaggaagtcaaattgtctctgtttgcagatgacatgattgtatatctasaaaaccccattgtctcagcccaaaatctccttaagctgataagcaacttcagcaaagtctcaggatacaaaatcaaagtacaatcttaaggttagtttaggtgtggataagtcatctaagtcaacttgaaggcgtgaatgatggtgaagtctccctcaagatcttcaaaagcagcttctttgtatgtatttcctttatgttctggtcttctgatgccatccagtcacagtctgagtgcagagcacatggtctttgttcctttagggggtattctacttccaagaacttggtacccaggtatacctgttaaatcctaracacttctcattgctgaatgggcttatattcagtaatcctttcattctctcaaacaggcatatattcaacctagagtggctataatgawgactagctttataaaccctttctcctagtcttaattgtaaaaacctatacaaaagtgtatcctaaggtcaactttaatttaggaattcagtattaactagaatatttataaacaatatatttcacatcagatcctatctctttttttttttttttttggaatttaacacattaccaacaaaatctatggaatgtgcgaaacgccacctctctggatgctggtcctggttccttcaagagagcactgctgggtacacacattaatatgtttttcacacattattatgtcctgaagagtaaaatatattattttgcatttctattttctaaggtagattaaaaaaaacaattgcaaataagatggattaaatacctttctgtaaacaaagtagttcgttttcatcctatctgagattgtagccaggaaarttgccaataacaataattttcaatgaaaaaattaaaayacttacagccaaccatcatcatagccaccgaaaacatcttctccacatctgtggtaggagctatgtttccaaatcctatggttgtaaggcttgtcatggtaaagtagagagaggacacgtacaatgaatccttgctgggtcctccttcccatatcccagcactggtattgtagcgatatggagtcccaatgctcaaagccagctggtagagccaactgtctatttggatggtgttagtgacttcatcaatgacctcgtagtctccgatgctataccatatgcaggccagccagtgggccaccagtccaaacacacacaccaggagcacgaggactgctgctccatattctaggtaatggtccagtttcctagccacacggcccagtcgtaagagacgcaccacttttaaagaactgaagagactgctgattccctggatttaaaaaaaaaaaaaaaattacaccacattttcaggaaaaaaaaaggctggggaaacaatacaatggctcaccttcataaatttaaccatccmattatatattaagaacatatgtatattataggtctgattttaagaaaacaaaaaagtcaaaatgataaactttaaaaaaatagatatcttcctacccaaaaattcatattttcaaattattagataaaacagatttcattagctaagaaattcccaatttattttcataagtagaatataaatggtacagagagaaaccgaagatgaaaattgctcaaatgcgttatatacagagtatacaaataggagtgttgaattcagaccttttatttccttttcctataaaactttccctctactctaaaaggtttcttttcatttcttattttatgatagctacaaatagcagaactctgaaaaaggaagcacagtcttacaggcaatcacacaggaaatactttggtatatatggggaaaatgaacaaataccattgttggccccactacctcctgccacaatcatgagaatcactgcatttctagagctctgaaaacgtgaacagagctgaacctgaaatgggtgtgtggcctactatcctatccattctctagcaaaagtcaccaaaaataacaccaaaaaaagaacagcagccggaaaattcatattttgttgagaagcttaaaataacaaataagggattatccaaatcaaagcacagcataggctttcttaaatcaatgaaagtcccatagttacttttttggaagcatgtaatagaccacctgcagaggtaggataagttcattcctgatgcagttcacaaaataggcagggagggaaaatggagcagtgatccaggaagcctctcatgcagtcattacctgcaaatccattcgtatccatgacttccttactgctaaccctgtctcccagaatgtagacaaggaatctaatataacttactctgacatgaattctgaccagcaaggaggaatttgttgttgcagtagaatagatgtatattaataagactctaattatgcatgttaaagttcctgacagttaagaaggaaacagttggcagggcacagtggctcatgcctgtaatcccagaactttgggaagccgaggcaggtggatcacctgaggtcaggagttcaagaccagcctggccaacatggcaaaaccctgtctctactaaaaaaactcaaaaattagccgggcatggtggtgggtgcctataatcccagctacttggaggctgaggcagggggaattgcttgaacctgggagacggagggtgcagtgagccgagatcatgccactgcaccccagcctgggtaacagagcgagactccgtctcaaaaaaaaaaaaaaaaaaaaagtaaacagttaagaatgcatctggtttgttatactatattctataagacagcatgtgtttgaaatttttcataatgaaaatttaaaagagaaagataacaaagagaagtagaaacaagagtccctatagaaacaaaggagtagcagggtcatcctgctgggtttctgcctcaacttcaatttccttaggcctacctctatttaagttgaaactctcaaatattgtagcatatatacagcctaaaaacaaattcccatttcactttaacacttgggggaaaaagatgctaaactttagtcagttaaaaagagtagaattaatgaaataaagaagacaaatttgtgtaattcagtgacatgagatgttggaaggcttgaaagctttcaaaaatggaacagtgcagtcatcaacaagtaatacaaaaataaacatttatggagcactcctatatgccaagttctgttttaagccctggggatattaagataaatatgcctcacttctgctctaaagaaacgcataatcgaaatacatgaaaaactcaaacagagttcagtttaaaaataaaaacaatgatgttatagataatattttctggttagctcaaacttttaaaggaactttgggacttctgtttaaatactgcatagaaaagtcatttctacctgaattcttttctctgaaaatagcttaaagcaaagagaaggaaaaacagagagaaaatcttcaccccattcaaactaagaaagccaacacaaaccccaactagaatgtcatgagttaggacctactagaatgaggtccaaatggtgggaagacacacatccctcatctctagcaagcagattgctccaaaaggaggtgaccatcctgacaggcctgctctggattctgcttactcaaaagcacattttctaatatttagaagtagtttgacactacttaaatattataaaatgttttatgagcttaaaaagcaataaaacattagtaaatagacatacttgatatataaagtatatataaaatatcagttttatatagagagagagcattatagactctctctgccacaggtttagaagtagtttgacaccacttaaacattataaaatgttttacaagcttaaaaagtaacaaaatattagtaaatatacatacttgatatatatacataaagtatatataaaatattagtaatatatacacatatatatcaagcattatagactctctctgccataggttctatggcactacttcctcttggtttttagccaaccctccaactgacgccctctcaaaatcactttccagggctatccttctccatgcttctatttcatgttaggattctcatgattgccctcagtcctcttctggttgatctactgcatatctaggtttcaaccatcttccatatatgaatcattctcaggtccacttagcacaaaaagaaacctctctcctgagttattgatactaagccaaatgtctgccgtgcgtttcctcttggatgtcccacaggtatccaaaaataggtcctaaagggaaccgtttgcttctcccaaatcagttatcttctatcatgtgaatgacatcattatccacccagtcactcagacctggggcgaagcctcaacttttcccatttcctgccacatgtagctggttatcaagtcctgagggtctcaccactcaaagtgcctaaatgctcaaaatatatctatttaataaatctctcaaaaaatttccttctcttccattcccatagacatgtttggtcatgatttcctggttttttctcacttgtgtgacaggaactgcctctccatcagccatcccacctccattcttgcttcctctaattcacagatcacactacaagggctatcagtctcgtatttctttaaagcacaactgtctaaccatgtccctctctaatataaactcttttcatgttggctcattacctataggaataaatattaatttccaagtgtgacacgcgaagcccatcaggaccttgtacctacctacctgctcagcatctctcctgccaattcctccacctgttctctaggctgctgccattctcagataggagtagttcccagaatgtccatgctgtttcatgctacgttacaagttattctctctgtttaaaggcttccttcccccactcttagtggttaggatcttacatacagtttatgacaaatactctctcttccatgtgcacttccctgacatcatctccctgcctctgccatctttattgtcatactctcccccgtcccccactgggagaattcgatatccttcctttatgttatcatacagtttctgcacatctctattataacaattttcactgtcacacttactacaagtctgtttgcatgtatgacattccaggaaactccttaaggagcagatctactgtcaattacaaagctggcatatggtaatatgttaagcagccaataattcaataaatgaaagaataaacttttatgaaacaagcaaatgttggggatcaatttggagggctttgattaattacaaactcagaatgatttaacagtataatgtagagaacaaaacagtcaatgtaacttagggttgcattaatagagtatgtcattgagtacaaaagagaaattctccttaatctctacactgactaggtgtattactccattttcatgctgccgataaagacatacccaagactcggtaattcgtaaaggaaaagaggtttaatggactcacagttccacacggctggggaggcctcacaatcatggaggaaggcaaaaggcacatcttacatggcagcacacaaaagagaataagagccaaacaaatggagaaactccttattaaaccagcagatctcatgagacttattcactaccacaaaaatagtatggaggaaacacccccacgattcaattatctccaactggtccctctcacaacacctcggaattatggaagctacaatttaagatgagatttgggtggggaaacagccaaaccatatcactaggtcacacatgtaggagatcagttgaatatattcatcagagaactgccaaaaaaaaaaaaacccctcaaaactcaactctattaggaaatgtgaaaggaactggaaaaagggagattggagcagggcactatttatattcaaatacacagtgcatggatgagggctgagctcactctgtataatcctaatgtgggtaacctggaaaaaggctggagctacagggatagaaggatgcaaacaggatttcaatgggcctgtgccacacacttctatgcagttaaccaacagaaagttaggtcatttattgctacttggaaaagacagacaaggcaataataacattgagtatttactacatgccaggtactattctaagtgttttctttgtattaattaaattaaaattcagaacaatcctatgtggtacctatcattaaagcatggcccagaaaagttaaaaataattggactaagttcacatacatagtaagaggaggaagccagattcacattcaggcagtctgtctccagaattttccttcgttcattctgaaagtctctatacctagagtataatgtgtaacttatccaaccacatgaatacctgcaatattggcttaaacatgagcattctctacatgactgaataaagtagattaaatacctagcctcctctttccctccactcagtcacagcaatggccacgcagtaggggtccgtggaggccctggaactcttatatctatatagtctgcagttctctaacatggatcaattcattttgtttttataatagcaggattcctaccttcattgttcacatgaggacactgaagatcagacaggttgaacgaatcgtccaaagacacagttagcaaggaacagaagtatcactcagacccagtccttcagattctgagtgcatttcccacaacaaccaaccacgctgcagccttcctgtccttacccccaatctctcctacatcattgctgcaatattaatcttcctgaaaggcagcactgagcatatcgtccaagggcttatcacagacattaagcataatctcttgaacaggcctycaatgcccgcaatcccatctctgtctatgctgccaggtcatttccctctatgcctctgcatagccctagtgctccaatcaaaccaaactcctttttgcccccaaacatcatgttgagcaaaaggagctagatacaaaagagtatatactgtatgattccatttctgaagagttcagaaacagatggaactactccatggggttaaatgagcatagtgtctccctttgttgggagaggggcagtgattacaaaaggcatgaggagaccttcgggttctggcagtattttgtttcctaacacagctactaatcactaggtggttcactttgtgaaaattctttctgctgtacacttaagattgggataattttctttaaatatgtcatatttaaacatcaaaaaaatgttatggaaaacctaatagtcactgatgtgttattaagctaacatttcaccacagtacatgattcagattaataatttcttactcatcccatgatatttggtgggggcgggggggggcagggagtcatagctatcaatgtatctaaaataagagattttccttattttatgattcactctcataacctttagattgggccacgaattgcatttaattcctgttggcaagtttaatttcacttatatgatactactagacagttttagaggttgatcctccaaaaatgcccttcttatgtacttctgccttttttataacaatgttttgatgctgtactttccaccagtcttagatattcattgattttctgcttcatttcactccaaactttccaatctttctgtgccctcctctgcacttcagtggctttctgcctctatcccarcctctgagctattagtacacaaatccctgaggttccactgtggaacagaatatcaaatacatcaagtgcataacagaacacaacagggtgaatggaggactttcagccatcagccttccacctttctagccaatttccttacttgacaagcccctcaggccatagtagcacaaggaacagtatccaggagacacctctgtgccattaacccttcaagtcacttttgtggattccacattaaagagatgtgagatgttatcagcataaaataatatcttgcaatgataaagccatccaaaatacaaatcaattctcttatctgaycgtcgctaataatagcaggtagataattcagccaatattccttcctattttcttcaactttcttgtccaaggacacgttgcaattaagtggagatgaaagagcaggaatacagacttgtcatayccagttgcaygattttgcacctacactttgcattctcacaatacaatgttctggtasattgtttcaaaaacatagctgtgtttatttttcyccctgtatccatacccctctgcaatgttacttataattcctcccatcaagacagagggtctgtttcctatctcttaaatctagactgactttaggacttgctttggccaacagaatgtgatataaatgactgcagcagatccaagcctaggcctcaaaaggccttgcacaccacctccacctgtggtcttggaagccagcccagctgccatgtgaacaagactcactaggctttgggggatgagagaccacagaagcatccctttgagtcatgcatttcagccatcctagactactcaggccctagccaactcagcggctgaccacagatgcatgagtaaacttagttgagataagccaaacctagcctaaakcagcagaaccacccaattgaactgcagactcatgagttgaataaattatggtggatattatctataaagctttagagtkatttgacatgcaggaaaaaagataactgataaaaatgtaagaaaagtgcatatgttacatgcttatgagcacagaatttcatatttctaggacagaacactggggcaatatagatatcgcgttaatagagaggtcccatcttaatacaacattatcccaaataggaaagatatgggtrtgtaaagtaagatttaatatacaattgttgggtgttatttatctgtyatattcagaaatatgtygctattatgctttgcatggattgacgccaacaaatacttcatgagaataaagaactccaagttattacttcataaatcttataaatatttctaaaagccaatctcacctaaaacttaacatcaccttgggtgatatccatggaggtgagmcttccaatagcctggccttggagtttcttcaccaatccatctccaacaacctttctacttctcctcagacacccactttcatgatcaaaatctaaaatttgttatattccaaaactttctccagctctgaaattttgaattgaatcatcctgctatctgatcatggctgcttctctgtcaagatcaatggcccaattacaccaactgcaaaagtagtttatccttactgaacctgtagtcctttccccaatgtattaaccctcttcattctctaccttttttcttatataatcccataatttcaataacatcaacaccctaaattgcttagcatcactgtctcttcattatgcccactatcaaaattcaagtcctggctcaattaccagctttcttcacawctgtattatgaactgctcaagacagttatacagtgggttccactataaattcattaccatcactttcaatgcatctgtcaactacctagcaagtttcctgtttttcttgtaaatttacctgctcactatatttcaagccttctctactctactcaaaactccatccataccctcttcaactacacctttcccatagatatttaaacatctcatgtccctctcattaagcaaaaaaaattaacataccccctcaccctcctaaatcagctatgtgactaagcaaatcagaaaccaagaagcatccttgccatccctttctctaacatcacctcacccaacctaccttaaaatcctattcattttagaacaatattttatcatggaaaaactcaaacatacaaaaaaacaggtaaatagcataataattcccccatttacccacaactyggctagagtaattattaacttatcaccacccttgtttcttctacatctctcttttaacagcaaactcctggccccactggattattttgaagcaaatccaaaatgtataattttgtccataaatatttcagggtatgtctctaaaagacaacatattttttaattcaacaaaactatcacccattatcacacctgataaaacctaacatgatttctcaaaatcagcaaatatccagtccactcaatgcccaccctctctccagctggtttcttagaattaggaccaaagaaggtccacactttgtgytttgttaatgtgtctcttaatctacacatttccctctcctttttttaatctgttgaagtcaaatttatttatataaaaaaacagattgtttgtcttatagagtttcctaaattctgaattctgatgtttgcatcattatggtgtcactagtataatcctctgtcctcccactttcctgcaaactggtagttagattttgaaacttgttctgaatcagtttccattatttttaaatatttgtagtaataatgtttttatcaatacataattttaactcctatctctcaaatttatctacctctcaccacctcmactgtcatcaccttagatcacactaacagcatctctctcctctatctacgggagtttcctaactgtcaaggcatttgtttaaacctattcaatctgttctgaacactgcataagagttacctcttcaaaatcactgctagtttaaaattatctcatagcttcccactgttctaaaatctgttttgtttatacagccttgcacagtcgggtccaggcttaccactctagctccrttctcttctgctcactctccatccaattttcaattctttgaatatgtcattctccctcgaacacagggattatgcacttgctgttctttgtaaatggaatgttctataattctttcttgcccattcctcagcctagttggctctatccatactttaaattatagctcagttattgcttccttagggaactttcactttctgatctagatcaggtcatttcattatataatctcaaaggaccatgtacattcccttcatgacacttgtctctttgtgattgtgcatgtgtatcatgttttgctcattcttttatccctagcacactctagcactcttgggaacctagtgatttaaagaatgaaaacattaattaaagaataacctaaccaatatataaatctctcataataatttctgattcctccagcactgataccataatcaataattaatagctgcttaattttcacaggtagtaccatatcaggmaactggatagaaaccacaaaacagtaataagctctgtttcawaagcattgggcccttattctaaatagattttatacatgaatgattacatagtccatttccatttccttttgtagagtgcaatttaaagacagaaaaaaaattgcaaactacatttgttatctgaacctctaacccagataacaarttacattgctttttcctattcagaattcactgctccaactcaagctaccaagagctctacggggaaataatcctaattactccatggattagctagcatccttctgtagaagatctgaatttaaataacttgtgcataamaccygtattagccaattcatattctaattgaaacacagtggcataaatggccagacagacagacaaagaataggcacttattttcagcaatatccataatgtagtaacttttaatatgcttctttttgtagaaaagactttcattttcatatccactgggtccacagtgaatataaagcttgatcaaaatatgtaccctatgaagaggtgtattgcctaaagccctgatttttttccaaacattatgatatgtgtacaagcaaaccaaattggggatgctttaaatccttcttcaataatttcttgctgcctttagaataaaacccaaactccttaacacaacctacccctgcctacctcttcagactcaccttgagcatctgtcttctgctctctacactctgtcatataggacttctttcctaccttaaaaatatattctttctcacctaggagatctccaaacatgctgtttaaaacaatctccctacccaccaaccgtttcttttgtctggtgaattcctatgcatctctcaggactgggcttaaaaatgtaaccccctcagagacacttctcctaactatccccaaccctgaaagttaagactcttgttttatagcataaataattagtccaagaaatgctgagggaatgaggtaacaggcaatgagagttgaagcagagtaagactgaagtggccatgatgggctatgtaagcaaagagacaaagcaaaagagaagaaagactaagtgaatttgtcagggctctccagaraaacaggactaacaggacatgatggacatgaaaatggaaatggagatggagatatggagatggagatatggaaatggaggtgcagatggagatggatacagggatggggatggaaatggagatggggatgctgatggagatggagatgcagatgcagatggagatggagatggagatgcagatagagatggagatggagatgcagatggagatgcagatgcagatgcaaatgcagaaggagatggagatggagatgatgcagatggagatggagatggagatggagatgcagatggagatgcagatggagttacagatggagacggagatgcagatagagatgcagatgcagatggagatgcagatggagatggagatgcagatgcagatgcagatggagacggagatggagagmagatagagatggaaatggagatggagatggaygtgcagatggagatggatacagggacagggatggagatgaagatggagatggagatgagaaggcacccagccatcctgaatcttctatgaaaatgaaaatgttgaggttgtatttttaccttcaaatacaacctccttgtttcagccctttgaccaggacatcatttggtttatcagtgccacacgcrcctgcctgatatttgattgcatttgatcagcaattaatgcagaccctaatccagatataaaaaaatgctggaaatcattcactatctctgatgcaayagcgttcatcaaaactgcaatggattaattaaaaccagaaattgcaaatacctgctggaagaacttatggattgaagtcatgaatgattttaaaggcttcctggggatcaatggagaagctaagaaaataattcacacagcaagacaagttagtgaagaagaatatgccaacatacttgatgaagtggaagaacatattgaaggtcatcagaagtgctaacaaatgagaaactagaagaacttgttgagtcaccyacagaggaagaagaagtgaagcagaactagcaatgtggatactatggaaagttgctgaagtgtttcaaattgtacagacaataatggacagaattatggaatatgatccacagatgaaacaaagcactaaagtctcctatatgatcaatgaaggaatacaatttctatagcaacattttaatgagtttaaaagagacaataatttccaactacagtgttcttcccaaaggtttcagcaaaaaataaccttcaactatcaaggatccctaatattgacattatctgctcctgctcctgacattcaaccattaatgttcatggcttgatgatccaggatcacctgaagaatgtaatcattttctgatatattatcagaaggtcaatagtagcctaaagctaggtcacaatgcctacatcattcaccctacttcatctcatcatgtaggcattttttcatctcacatcatcrtaagaaaaagggtgagtatagtaacaatgagatgttttggaagagagcaaacasattcacataacttttattacagtacattatagtaattcttctatgttgttatattgtttatttcttactgtgcctaatttataaattaaactttatcataggtacgtctgtataggagaaagcatagtatatatagggttcagtaccatctgtggtttcaggcctccactgggggtcttggaatgcatacccatgggtaaaagggaataactgtatatagatgttgatatttaggaagagagagagatgtattgtgaggaatgggctcaaatgattayggaggcagagaagttccacagtctgccatctgcaaccaggagacccaagaaagccgatattgcaattcaagtccaaagacctaagaaccaggccaatggtgtaaattccagtycaaaagcaagacdagatgagatgttccagatcaagtagtaaggcagaaaaaaggagagaattcctccttcttccatctctttttctattcaggccctcaacagattggataatgcccatccacattggggagaacaatctgctttactgaatgtactgatccaagtgctattctcagcaagaaacagatacacccagtaacaatgtgtaatctgaataccccaaggtccagttaagttgagatgaaattaacaagcatgctaagaaattcagtcaagagagaaaagcatacagacagagtcagtgagtcacattagtggtgggaaactcaactaaagatctacaaaccctaagaaaatagctagaacagtaagcagtcatgtcctccaaaataattttctaaaatatcccttttttcaacaattttaatgaccatatgtgatcatatggaatgttaaggctataagaaaatgatactggagaaaacaatgtcaatgaaagactgtgagayacatgaagaaggagttcaaagagtagctccattttctttttcctcacttccctatactttggctcagctccttccttttttcaggctcacttccctaatattagaaattggctctgccttgggccaagttccccagagcaatcttggtctagggccatacattaggttctaaggtaccactgttatttgtgctatgtgctgaaaaatatccatccttatactaaatcttccatcacttgaggtcacttgaatctctttcctttgcaactaaaaagaaatcctaacctaacagcggcatttagcccattacatgctttccaacatgttcacctcctcatcaccccagtcattatctatatcctattgcccctgtattatttttatttgtagagcatatcactagctgaaattatactcacagacacacacacacacacaatttaaactgtccacatatacttactgtctgtttttcccccaccagaatattaactctgaccaagatgaccttaacttggcttcttcctaagtctaggatcctgacttcccttttcttagaacatttatttaagaaactttctatcgtaaattctttctctgcctctttcagaggaaaatctcccagcctcttgccaattttataacccaggaatgtctttctcaaagacttgtgggctattcctttggaatataatcatcaagaaagatagtgcctctatttcctaatgtctgtaggagggtagatgtcaaactttgataagcaccaattatcaaatgattagatgacctaatcatattgaccaacatctctacacttgtttcaacaaagttgagtccaatccctctcccctagtgcaaaaatctctctctactattgcaacggtcttgaataaagtctttgttttcaacaaatgtctggtgcaatttctctttaacagttttatgaagatagggaaggatttgtgtgcttgttcactgccagattccccaatacttataataaaggagtacctcaatatatatatakakagagagaggtgaatagatgcataaaatcaagtaagggatttgtttttttcatttaaaggatgacattcagagaagaataaatccttcttatgtcgttgctgtagtttgcatgtggtttgtcccaccaaaactcaagttgagatttgatccccaatgtggtagtgttggaacatggggcctagtgggaggtgtttgagtcatgggagtgaatctcttatgaacgtcttcataccattctcatggtagtgggtgagttctcactctggcaagactggattcattcttaaaggaatggataagttcctgcaatggtagatttttctagagccaggacactgtttgggttttgtctctcctcatatgtctgcttgtcctttgactttctccacaaggttatgatgcagcatgaaaaccctcatcagaatccagggccatgctcttgaacttcctaacctgcagagctgtgagctaaataggcttcttttctttataaattacccagcctcaggcattctgttatagctacacataatggactaagasagccatccctgtatatttctcaatgtaccaccacacctcagaagtcaaaccaaatacacagtcattcataacactaaagagcagaaatttaacaattgatctagtgatcagtcctagtgatatgtttaccatatgtactggcaggcttctgtacatggatactgtgtatttcctaaaaataattactttctttgccatcataggtaagatgtcattaaatagatgttcttttttaaaacttgttagatttcaatattgaagacaagaagaagtgattctaaaattccagtagcatcatattgaayataaaattgagcaaatctaaaaatctgtaatctatggtaaaataatttttgcactggtttccatgatatagacctcttaatttactgtgaccaggacaattgcaacatctgtaaaagtttttgagtwaggccattcacaactcagtgtaatcctgtgtataaatgtgaatgtaactgaagatgactgatttttcctgacacaattacccaaaaacaaacaaatgacaatggaaactagcatcttctgaaagtgcacactgggcatttgatcataaactctgtatttgtatctgcaatactgatcaactaaacattcaaacactactatcatcgatcatgcttatttatcagtagactcagaagggcacagaatagaaatcactgctcatcaaaagggcagtattagcatcctcttccatgggcatagacctcatagtagtttgtgtagcagtccaaagagctatgctccctgtccccagtctccccaagaagacaacttaaaagtgagaaaataagactcagtcagcaagtactggagccatcttgacttaaaagccttgagaaatagtctaatctcaccatcaccactactctcactcattctggacactgaaaactaaaactctatcttactgtctacattaacacgactttggactattgttctgtctcccttagcaggaccttctttctccaggactctcctgctcagataaatggtttgatttttttattacacgaactttgcaaagacctattaactctttagtgaaaagtatctgcagacagtttatgtcctaagattctttgaattctttccttcaaaatccttgccttgctgtttcctccaatcctgtgctattgtatcatattcttgaactttacccagttctaataaagcccactcccctagccactccctgtttttaaaaacctaccttatatcaaactttcgattcttaatccattctgtccttttctttcctgctctgagtacactactagagctttgcatggcagtgttcccttttaccgtggtaagcaataaattcaactcagctttgtctttttaacaggttgtgttggtaatgtttggggatgtagcttttgacagcctcatgctctacctaatctaatacttctaataacaatgccacaggcagtttcagagtcccacaagagatatgctcatatctgatggaactctgaaagctccatcattcaaggaacccataagctatggtgtccttatcaagttatttatagtttattaaaagttcctcacagtctagatgcaatttactgatgagggaatttttttttcctttttgtggagatggggtcctagtatgttgcccaggctatcctcaaactcctgggctcaagcaatcctccttcctctgcctccctgagtgctgagattacaggcattagccaccatgcccagccctttttttctaaacataagtaatattgcctagaaacataaatgacatgttcccttcatcagttcccagggaagcaaaggaagactgctagccaaaggtcaaattctcaagcagaagaaaaaataattttgttaaccctttacctaaatataaacaacacttcttaaagatgaagaaattcaatacaaagacaaacatattctttataagttagtgtgtgttgtgtgaaagcagggacattagggaataaaatgaagtattaaaaaggctaaatgaagtagggatgaactccactggagcttccccaaaagcagagtaacaaaactatgatttctcaagcatggggataattattgcacagaaagacaataaacagtaacctctatgcaagtattcataagtagttaaggtaaaaactgtttaagagttagctgtaacatacaaattccaatatatttcaaccttctttgcctctatgttagaatcatcccctgatgcttaacaataggaacaatttatcatgaatgaagatcagtacagataaaaaaatttttatgtaaacaagaaaatcaaataaaggaagctcaatgctatcctcattgcttgttatttcctttcctctcaaagctaattccctcagttagacagactgctttgtctcattggaaattcatgcaaaagaatgttcctgcaacatcaccaaacttttcaaatctaaggaagtctatctttaaagctgtgtattacccaaccatgataacattctctaccaatgcccaccaggaatagaatttaaaagcttagatgacagccatcatgctccaatttggaacttgaggctgactcttaccctttctccaaattttttccctatctcttccttcaccctgacccctcttttatttacacctgcaaatagtttgtgagaaagtctttccctcaaagtagaaagtagatatctgttcagagactgtgtcttgttcatctttgtatttatttgtatttatttgtccacaatactttgcactcccagtgggagatcacagcttggaggcttaaccctagggtaatccttaaacatgtatggaaagctggtagggtaggtcatctgactggaggattatttacatgacagcaaaagaatactcatggaaagcaactcatgagaggaaatgtgaacatagtggtcaaaggatatgccctatagtctgtgagaagaaagagtttagagcacagctaagattatgtcacaaaggtttccctctggccttatctttcccattattaacaaaaagcatgtatagttaggaaatgtggtatgcctcattcacttcaatagaaatatttgtaggctggcaattagatgtcaggcatcttggtaggtatacaaatccaagatgagttagagagacagagtgtctgctttggagattcttccagaaacaagcataatacctaaccattagctctctaaagatctttgctggatttgaattatttacctgaagtacaattaaaggatgccaaatagggtcaccaacacaccttctctgagcctatagatgaaagacgagtaatccaatactcaatataaatataaatccaatataaatataaatgattttcaaattgttattagaatcactatatgtattaaaagaatagaaatcatacaatgtctgctttcaggtcacaatggaattaaattagaaatcaataacagaacaatatctgaaaaatacccaaacacttggagattaaataacacacttttaaataacacgagtcaaagaagaaatctcaaaagaaatttaaaataatttgaactatacgaaaatgaaaatacaatttaacaatgcgtaggataggagatcacaaaatcagtgcttacagggaaatttacagctttgaatacatatgctggaaaagaagaaaaatctaaaatcaataatctatactttcacctttgcaaaccagaaatccaaagtaagtcaaagaaaagccatcataaaaattaaagcagaaataaatgaaattgaaaataggacataaatttttaaaaatcaacaaagccaaaagctaattctttgaaaagattttaaaaatcagaaaaccaaacaccacatgttcttactcataagtcggagctgaataatgagagcatgtggacacagggaggggaataacacacactggggcctgatggggggctkccagggacggggagggagagcatcaagaagaacagttaaygcatgcagggcttaatacctaggtgatggattgattggtgcagcaaaccaccatgacacaggtttacctctgtaacagacctgcctgtcctgcacgtgtatcccagaacttaaaataaaattaattttttttttttttttttttttggctgggcgcagtggctcatgcctggaatcccagcactttgggaggctgaggcaggcagatcacctgatctcaggaactcgagaccaccctgggcaacgcggtgaaaccctgtctctatcaagatacaaaaaattagccaggcgtggtggcatgcgcctgtagcatgagaatcacttgaggctgggaggcagaggttgcagtgagctgagactgcgccactgcactccagcttgggtgactgggtgacagagtgagactccgtctaaaaaaaaaaaaaaaaaaaaaaaaaaattaaatcaataagcctctagtcaggctaacgaaacaagagagagagaagatacaaattactaatattagaaataaaagaggggacactactacaaattccatgaatactaaagggataattaagaaatgctatgaacaactctgcccacagatttgataaatctgataatgaaataaatcaaatccttgaaagacacatctgctaagacccacacaagaaaaaaaataatctgaatagaactacatctattaaagaaattgcatcaataattaataaccttctaaaacacaaagcattaggcccagataggttcacaagtgaaatttatcaaacatttaaggaataaattataccaatttcctccaatgttttccagaaggtagaggcagaaagaatactttcttgtgcattttatgagaccagcattaccccaataccaaaaccagacaaagacattacaagaaaagtacaaactaatatctctcatgaacatagatgtaaaaattctcaacaaaatgttttgttaatatttgatttaaaaaaatttaatctaacaatgtattttaaaaagtatacactgtgaccaactggatttggttctaggtatgcaaagctggtgcaacatttgagagtcagttaatgtaatccataacatcaacaagctaaaggaaaatggcatgatcatatcaatggatgtagataaatcatttaacaactccaacatcgattcatgataaaatactctcaacaaactacaagtagagaggaaattcttcaacatgataaagaacatctaccaaaaaaaagaaaaaaaaaaccctacaactaacatcatactcaagaatgaaaaactagaagctttcctattaagatcaggaacgaggcaaagatgttccctctcatcacttcttttcaaactcatcatggaaattctagctaatgcaataaaacaagaaaaggtatacttactgggaaggaagaaataaaaatgtcattgttcacagatgattatccatgagatgagatgattatctatgtagaaaatatgaataaattgaccaaaaaccatgaaactcataagtaattatagcaaggttccaggttacaaggttaatacacaaaaggcaattgcttttctgtataccagcaaggcacaagtggaatttgaaataaaaaaccataatgccatttactttagccctccccaaaatacttaaatataaatctaataaaatgtgcacatgatctatgaggaaaactacaaaactgatgaaatatatcaaagaagaactaaataaatgaagagatatttcatgttcatggatagtaagactcaatattgtcaagatgtcagttcttctcaaaatgaactagagacaacaaaaatccaattaagaacctagcaggttattttgttgatacaagtagactgattctaaagcttatatagacaggcaaaaaattcaaaatagccactacaatatggaagttgaagaaccaagtcagaagactgatgctatatgactttaagactaactataaaagtatagcaataaagagagtatggtattggagaaaaaatagacaatagattaactgatcagaatagtgaatccaggaatagacccacataaatataggcataaatcttagacaaaggcaaaaaggcaatgcaatggaacaaacatagtcttttcaaaaaatagtgatgaaacaactggatagccaaattaaaaaaaaaagtgaatctagtcacagaccctacacccttcacaaaatttaactcagaatgaatcatataaaataaaaaatgcaaaactataaaacttatggaagacaacacaggagaaaatctagatgaccttgagtatgacaatgactttatagatacaacaccaaaggcacaatccatgaaagtaataattgataagctggacttcattaaaatgtaaaattctgctctgcaaaagtcacagtcaaaagaatgagaagacaagccacaaactgagagaaaatatttgcaaaakacatctaataaagtactatcatctaaaaactaaaaagaactcttaaaacaacaattaaaaaaatgcacaaaagatctgaacacacatcttaccaaagaagatattcctatgagaattaagcatatgaaaaggtgttcagcaatatatgccatttgtcaattgaaaattttaaaacatcaaaagagatacatttaaacagataccactacacacctrttagaatagtcaaactccaaaatactaacaccgccaagtgttggcaaggatgtggaacaacagaaattctcattcatcgctgatgggaatacataatggtgctgccactttggaaaacagacagtttgaaagtttcttacaaaastaaacatagtcttaccatatgattcagcaatcatgtttcttggtatttacccaaatatgtttaaaacttatgtccacatataaacctgcacatgaatgtttatagcagctttattcataattttgcaaaacttggaagcatccaagatgttcttcagtaggtgaatgaataaataaactgtgatacatccagacaatgatatgttattcagcacagaaaaaaaaaatgagctatcaagccttgaaaaaacacagaggaaccttaaatgcctattactaagagaaagaagccaatatgaaaaagctacaaactatctgattctaactatatgacacttagagaaggcaaaactatggagacacaaaggatcagtggttgccacggataagcagagaaggagaaaagaataagcagagcatgaaaaaaattttaagacagtaaaactaatctgtgtgatgctgtaatggaggatacttgtcatcatacttctgtccaaacccattaaatgtacaaaatcaagagtgaaagccactagaaacgatcaactttgggtgataatgatgtattcaagtaggttcatcaattgtaacagatgtaccactctggtgtgggatttccatagtgggagaatctatgcatgtttgggagcaaagggtacagtacatgggaaatctctgcacctcctcaattttgctacaaacctaaaagcggtcttaaaaattaaagtctatttttaaaaaggctcacactctttacaaagttagatttaaaagcagattgcttaggacttaatgttggcatgctatcatcagctgtgaatcacagtgaaaagaaaaatcaactaattccaagaaggattgggtagcgctatggtttgattggtttgtcccctcaaatatatatgttaaaacttaatcctcaatgcaataatgttgggagatgaagacaaatagaatgtatttaggtcatgagggatctgccctcatgcatggattaatgctgctataaaaagggcttgcagaagcggwgtgctgtcttctgctacatgaagacacatttgtcttgtttgctcttctgccttccaccatgtgaggacagcccccacaggacaccacatgccagtgccttggacttcctagtctccagagctgtgagaaataagttcctgttcttcataaatgacccaacctgtggtattttgctatggcagcacataacaaacttagacaggcagtatttatatggatttaataagattaaaactaggaaaacaaacagaaaaattaggtatatcctagttataccactgaagtattattttaaattatctatacactttaatgaaaaggtaatggcaagccaactatattaaataacaatttctaacatgttattctttgtagaaggtctgagatggcaagcaaaagggaaaaagaggattctaagctgacagaagttactgaagtctagaagcataattagccttcctgatttcctgttcttgttttaatgactagatcagaaataaaaattattaacgtaattatacaggataaagtgaaatgatgcatgtggcagcttgacaagcataattcatgacaaaacaataatttagaaaattatcttccataaacttttctgaaaattaaaagtatttatatacttccacttagcagtcattgttctattcattctttctcctaaagcaatgcatgagttatcttttcccaatttcatttttgacctagtttttatgtttatcacttattaagactactcattatcatcaaaattccccatgtttcatatttcctgaatcctcctatgctaccaaacagcgtgttatctgcagctgctccatctttgatgatgttctatggctcaactccctctaatctccccaaaatcaagctccctgaacctcccaaagctgtattcaaatgcatactacaaagaagctcaatcctattctttggattcttagtgacaacattcttttaccctctgtttacagcttttagaaaatttatgttccttcttttcaaacagaatgccttctttaatggaatctgtcttttctgcctcacaattttcttaaagaatcacatattcagttcatgaattcctagtaaaccaaactaccttcagagagcgtgtcgacaatcttgaaaataaagaacgttattaagtcttctaagtcattctgcacttacatcatgtaaaaggattatatcgtaattttcagactcatattctttcttattcccaagtcaccattaatgtacttcctcttcaggtctaagttctattttatttttatgtcattgtgcaatttactaaaaccttgctaacattttactgcttcaggtcaataagtcaccagtatgccttaagagcaatgaagaaataccaaggagatggaagacacattcttcaccatcacaggatttataatccagctgaggaaacaaacacatacaaatgaaataataataccccaccagatttgcagaattctacaagcaaaatatattagtatcccttttcccatttattccttataatcaccttgtgatataagtaatttagctatacactcctttccttgttttacatcatggaaactgagaaccagagtaaccctctcaaagtctcaaaacaaacatgtcctagacaaggcacaagactccagaacatccaacagctgatatagtgcttatgaacacacacaaatcaacaaaagaaaaaaatatttttaactatattaaggcgcatacatatacataagtgaacatgaaatatggtgaagatattaattaaagctgcttgggaatgatgcaggcaggcttcctgaaagaaatatgttccagaaaggtgaatgttataataaggggtaataaagagccaatctataggaactgacccagaaaaaaggcaaagaatgcataaaatagtatgaatgaagaagccgataaacgtgtggataaatctaaataagaattgacaattaaatattaataaaacaatcacatattaaaaggaaaaaattaaaaataatgtagatccaaaataaaagacaataataatttgaaagatgaaggggaacagaagtccttgaatcaaatgaagaaaggtaaagatacttagaagcttctggaatctgttaagtcaaacactgatgttaaaaatgtaagagtaatcgattaacagaaaaaattccaaaccagtaggaggaatccaagagattaaaggaaagttcaatcaatccaaaacctggaaaaacaaaaggaaaaagaaaacaccaaaacacaaaggtaagaaaaggcatttaaaaatagaaaataagatgtactaagtaaatcaaaacgtaattaatcacaatcaatgtaaacagattaaacttgcctgttaaagagactttcagaatctatacactactcataaaatatatatccagaaatatacggatcaaatacacaccaaccatacaaaagcaaatttagctataatagtattaagcaaactagaccttaagcaagaaaagcattattagggacaaagagagttagaaaataacgtggaagaaatctcccagaaagtgtagcaaaaagataaaggattagaaaataggagatttaaaaaaaaaaaaaaggaaattggccaggtgcagtggctcacgcctgtaatcccagcactttgggaggccaagacgggtggatcatgaggtcaagagatcgagaccatcctggctaacatggtgaaaccctgtctctactaaaaatacraaaataaaattagccaggcatggtggcagcgcctgtagtcccagctactcaggaggctgtggcaggagaatggcgtgaacccaggaagcagagcttgcagtgagccgagatcacgccactgcactccagcctgggtgacagagcgagactccatgtcaaaaaaaaaaaaaaaaaaaattacaggactggtctcataggtacagtatctgaataaaaggagttccagaaagaaagaaaatttagaaaaggtcagagggctggagaaaatcataataggaaaaaatatcaagacagtagtcatgcttttccaggctgaaaaggaccacctagttaacacccatcaaaactgatgaaaatagatctgcacaaaagcatatcttcagaaagttacagaaccttaggacagagaaggtgtatgaaacttccagaaagagaaaataggtcacatgtaaaggaacagaaatcgtaatgacttcaagtttcttatcagaattactggaggagtacaatggcattgtatctttcaaaattctgaaggaaaattatctctagccaagaatattatagctagcttaactatcaatcaggtgaaagagtaaagagaggtttgtttaagaaaatgatatcgatagaatacttcttgcatcaatgtaatgaagggagatttagataattgtcagagaactttgtggttgaattagtgataagaacatagaaaacataaaatcagacagttatcagctcccagaaaaatggaaagtgcagaaaaagaaaagtaattacagcatgctgcaaggatcagctataaaatgcatatttgcagtcataacaatatcaacacttggccaggcccagttgctcacgcctgtaatcccaacactttgggaggctgagatgggcggatcacttgaggtcaggagttcaagaccagactggccatcatggtgaaatactaaaaaaatttaaaaaaaattagccgagtgtggtggtgcgcgcctctagtcccagctgctggggaagttgaggcaggagaatcgcttgaacctgggaggcagaggttgcagtgatcacaccactgcactctcgcctgggtgacagagcaagactctgtcaccaaaaataataataataacaataataataatatcaacacttaatatttattgaatcaaaaggatgatatattgtgagaatgaggtgatgaaaatggtgcatttaaatagtgagcgaaagtagaaaggggagctaaaatctcacctttcatgttgagaagtcaaagacaaaacctaaaattgacaaaccaagaggtagatatgtaatcgtgttgtttggtgacatggaagcaaataataaaagaatcccctgaaaaaatttgaaaatggttgcctctagggtcttctcttttttaaaatgaaacattgccaactgttctttatagagattttaccaattcattctcccctgagcagtgtatgagagtgatatgccacatcccacttgatcaattgaggtcctgtaaggagtagatgccaagccagggttatttacgcaagaattttactgaggtaaatgcctgggaaggacaaaatggggaggaggggaacacgaagagcctttggactacaatgcagktctaacacctgtgaaagagggaaggmagactcaggtaggaagaaaaagcttacacttttacacagtaaatggatagtcccagagcaaaagttgcagttatggacaagttatagtattcccaccatactcagacactgacggggaagagccctggggaaatgtgtgagcccagcttcaacatgtgagctgcaggagatcagaaaaggcagcagccttcagttaactgtgttcagtgatgtgttggaaaatgattaacaactagctctacagaaagttttttaaaaaggccttgatttgtagcttttgctactttctgtagtgtaaatacgcccactgtggctaatttcaagctaccactgtgagatcaccaaatgctgagtcgagaagagatggtaacaataggctttctaaagccaggagctggacccagggtgccgctgaccgtactccacacagcacgtgttgatgaaaggagatttgagcggtgtgcctacttagctactacactcaacagcctagtgttctaacgtagtttcggtctttgcagcgtgataaatgaaaattgtatttagtgtggcgggcaccagtagtcccagctacttgggaagctgaggccggagaatggcgtgaacccgggaggcggagcttgcagtgagccgagacagagcccctgcactcctgcttgrgcgacagagtgagactccgtctcaaaaaaaaaaaaaaaagaaagaaaattgtatttagygtggatttactttgcatttcttgaatatgagctaagttgagagaatcttttaatatatattacataattataaatgtataaataaaagtattacatagttataaatgtattattaaacaatatatttactgtaatactaatcaagccaatcttttgattatttttaattgacagaaataattgcatgtatttactatgtacaacatgacgttttaaagtatgtatgcattgtggaatgactaaatctagctagttaacgtatgtgtttcttcacagttatcatttttgtggtgagaacactttacacccactttctcagcatttttccagaatgtagtacattgttaactatagtcaccatattgtataatagatttcttgaatttagttccatctaactgaagttttgtattcttccaccatctctccattcaccccaccccttggtaaccattattctactctatatgagatgaacttttctagattccacatgagtgattgcctttattaaaatctttaggcctatactctaaataactaaaatctcaatgtattaatgtaataatctgtgtagtgtgcaaaacataaatactgcttattgtcccctatcatgtgatttgtattttcaaaattaactcctttaactcacttcagaagataaatttgaaaaaaaaaatctttaaaagcttgatgtaggtggactcaaaacttggaaaatgaattattatgatttttttctcataatttataaagtaataattacatacacaatatcaaaatacaatgtctacacttaaatttgggggaaataatatttatattattatagttggttgaacgtaaatattttatagaaaaagtcactgaagaaaagtttcaatctatctcccaacacacatagagaaataatatattacaatgtattataataataataacaacagagtaaagaattttccatctgagcagtctacagactagaatctataggaacatcttargataattaagttagtaatattatcataatgaacatattttaataatagacatattctatattgactcttctatatattatgaattgaaattactggttgtatcctattagcttggtgtaacaacttaaatatcatccactattaagttagagcctgagaagctgtggatgaagtggtcttttaagcttctacatattttaagtacttctaggtgcactgataacactgaagaagcagagccttacatgagacaagacatcagaagtcatctgatatggtttggctctgtgtccccacccaaatctcatctcaaatggtaatccccacatgtcaagagagggacctggtgagaggtgattagattatgggggcagttttccccatgctgttcccgtgacagtgagggagatctcatgcgatctgggggttttaaaagtggcagtttcccctgtgctcctttttctctcctgccgccatgtgaagaaggtccttgcttgtttccaccaggattgtaagtttcctgaggcctctccagccatgtggaactgtgagtcaattaaatctcttctgtttataaattacccagtctcaggttgtatctttatagcagtgtgaaaatggactaatacgtcatccaatatccacaaatatattcagacaaaatgtaaagcaaaagctatgaggaagaaaccaaagtggcaaaaattcaagaattgctgtttcataaaagtttctttatctttatgttaactctaccattgttatcatatgtgtcttgagaggaggagtcaaaagatctgtgaatgagtagttttcaaatgctgcagcttttcaaagaaaatacatctatttattaggttgttataaaagtaaatgtggtttttgccattaaaagtaattgtgaaaaccacaattacttttgcaccaatctaatatcttctttcaatcaattatgtagtttgtgaactgtagttgacttcaaatgccgccgcttttcttctcctccacttcttscatccacaaactccaattcccagtaattagtactttcaaccagatatcaaggagaagaaacagatgaaaactaatttaaggtaatcaaatataataacttttggcaagggtttcaagaaagttgaaagtggtggctaaaaagaggtttggattatctgtggaatccatttatcctgatgttttcaaaatatatgacccacagtactcagaaaaccaaaacgaaaaacttacctcatccacattttcaaaggcattgatgatgtcataaggtaaacaagacagcagatcgatcacaaaccaagttttcagatagttcatccttatgagcttagggtcagaaatgacctctccaccgggccccacgaaagtcgtgtgaaaatttaaaacgatgtcaaccagaaaaataacgtccaccacactatccagtaccagccaggctatgttgttctgctttgttttgaaggaaacattataaggaaccataatggcggtgtagaaggtaagaattaaaatcacccaatcccaagtagttttaaaagcacaataatgtaaaataatgtgtggtggcgtctttggcgcttcttgtttatactgaggaaggatatctgatcccagctgaagaacctaaaagagagaaaatgtatttatacatgactaggttatctctgcacagtcagtgatgaattcaaatctactggcagtcaaaccacagccagtcatgctccacagtcttgcctccctcttctcctgagttgtcctaaaatttgttcagaggaagtcactccaagtccaatcactctaccaaagctgatctttctgctgttctatctggcatgctctgatgcagtagccaacactgatccacaacactgctggatgtccacttctgcaagtgcctcctgcacactcactctgcaagcctgcctagaatcacatggctctcatggactgtccagcagttatttgggtgagacaccattatctattcttcatacacatttagcacctcaggaagcataactttgattctgatggcctcgctggaccccggcatcccactgttggtgatgctgttgttgagtgatactcagcaagggccctgatgggtggcacagcagtgtaaagggttgtaaagggtatcgcctgctttttcccttcctcccttagatctggacttaaagaatattgtgtttcttgcccaactgcaaatttcctttagggaaaaaaatattaaatactcaagtttgtttctgtataccaattcaaatggaaaaattttagtgtaagtttatatgaaccttgagttacactaattaagtctaattacagcagaaaacaaagataaaaagcagatgacagagcaagagtagaggtttgtgtatccctgggcaaaggtaaccaacacaggacatagcattgccttctggaacctggaacctgggaattataaaaaacagttgaggcgagatcacgaggtcaggagatcgagaccatcctggccaacatggtgaaacgctgtctctactaaaaatacaaatattagatgggcgtggtggtgcgtgcctataatcccaactactcaggaagcagaggcaggagaaccacttgaatgcaggaggcagaggttgcagtaaactgagattgtgccactgcactccagcctggcgacagagcgagactccgtctcaaaaaaaaaaagacagttgaagggataaatcaaaaacttctgccctgtgccatcaatgaagccaaagacaatgtatgtgttaaagagtttggtaaatggaaatttttaaatattttcaacagatttgcccattgtatgtattcagttattcagtgtctctaggactaatgggacccagaaggtaggagtcaaaaaggccaaatcataaaatcataaatgcattaaatatttagatgtaagaatggataaaaataaaaatacttgttagcatgtaactctgagttataatatatgccacaaaacaaaacaaatatactagcatctttggcagcttgggagagtatcctaaagttcctctcatatacagaacttacatatctgaaaactaagaatataatatccatttttactatttttgatatggaaaacatcactggtggtccctttaattgtatgttagaattgttatttttattttggtgtttgtaagaatacttataaagatattttatgtatttgccattatcagtacctcagttatgtttttcccatgatgtcttaaattacttaacagcaaatcatcctaccaggaggtaagattcatgttggggtgaagtattatacaattgtacataatcatgtcttttcttttgcttttcaactactggcctgtcaattccaatttcattgtgttaaacatgaaaattgccttcatattcaatgttagtagtttaccatctatatatacacagtctatgtttaaccacaaataaatcaaacttgggaaataagaacaaactcagtaccagggtgcattaccaccttcgtggaccctaagcctttgtgccttcctagactccttcatggtgaaaccccgtcctactaaaaatacaaaaattagccgggcttgttggcacgtgcctgcagtcccagcttctctggaggctgaggcaggagaatcacttgaacctgggaggcagaggttccagtgagctgagatcacaccactcactgcactccagcctgggtgacagagcgagactcagtctcaaaaaaaaaaaaaagtgtgtatgtatatatacatatatatacatatgtgtgtgtgtgtgtatattataacagataaatatattaatatcacacattcagtttttgtttttacctaaaattaccctgttttcttctgctgttaatagaaattgaaacatcctatagacccgtaaaagtgttgtggggccctggacactgtgcctactgtgctgacagatgtaagccctgctcagtagcctggattaatgcaggtctcctctaaagatggaatggcatcaccctgagttcagaaagtcttaaacctggctatatattagaatcatctggggaagttttaaaagaatacagtatacttatacctagactccaccctggagaatgattaaattggtcttgtttgggttctcagagaatctatattttcaaaaccttcccaggtgattacaatgtacagcccaaggtaagatatctgtcttacatttctttagacattcaggacccaattctctagacagtgatttgcatatgtaaagccctccaaaaaaatgcaagatggggacaaaaaggaggaggaaagggtagaggaggacaaggaggaggaagaagaggaaaatggcaacaacaaaaaacagtgcacaaaaaataagcttcatctttttcatatgcaaagcactactaatcttcactctgttcctgggctctttcataaaacagtaacagactcttcattttcattgttatgtcatttgtgcttctataagcaataagcctttggtggaaggaggatgaaatcacattttttgatgtatttttgtaccaatacagacacattcttcctctctgaagatctgagagcattgactctaacaaagtcaggcccactgactgatgtggcagggcgtatatatttatctctacccaacataaaagtgaacaagctaaaggcaatcagcagggtgtcaatgcacgcagaaaattaattaactacctttatggagactggaatctttgaaactggggatcagctccaaatttgggggatcaggtagaattgagatcaaatttatctgtctttgaaaaagtaaaagcacctcaaattccatagctaaaccaaatacttgcattgagcaaattacaagagttttgagtaccactggaaaaacaacattgttatacttatttggtatttcttttatgtctatctttggagatctaagagcatgcgctgcaggtattcagactaaatgtctatcgacaatcttgttatttctgtatgctctctgaaatcgaccctaagatctgacagaaagcagttttatatcagaaccaggtttatgaataagggatgactggtaaagaaactaacactaatcacagagcaaagaaaaaaaaaacagatgggatgaaataggaatacgtttctcaaaaataaaaatgagaaaatgtcaaggggaaagtttctttcttttccgttgayacagtgaaaaaacaattctgagtgattctgggtgctaagggagaagattgtcttctctatggccccctttcacttgttgtcgctctgttgtgtaacagacaaaagaaaaatcctgaatcaggtgtggttaagaccccaaaggaatcatgactataaaaattcacaatcacagaaacaacctcctacatttcagcttgatttgcagaaagaaacaggcaactttaggcagaagaggaactagctccaaaatctaagcatttttgcaaaagaaagttgtatctcattgtctgctttaaatcttgtactaattgcatattatcttttaaatattgtgattattattactagttaatatttagttatattaatgtcttattttggtcttcagaaacatgtctgcacatcaaaggattcatctttccccaagcyaacagtgctatttagagcagaaaaccaaaagtctttttgttagccatggtctaagaaaaactccatagtcttctaaattcagggaacatactttacttcctaatcccctccaaaccagattcaatatttacgacaagttaagaaaattactctgaagtgcttcgactcacttttctgcagcagagaaaactgataagcgtatggattttatctttctcttttttggtaaaagttacctgagaatattttgtgagtgcaaacgtagtgctcagcatagttttggtagcttaatgagctttttggcatctttcataccagtaatacaaattatggttatagaagacatgtgaacaataaagctattagctgcctcagagttctgtcctcattttttttctccttagtctcagrgtaacatcgtctagtcacatgacttgaacagccataactgtgaagatgacactgaagcctacaattcaaactcaaatatccttccagagtgccagacccataaatctccctgctgttcaggcatctccactagggcttcctatggggctcttcaaactttgtatgccccaaactgaactcatgatcattgtcctcaaatcttctttccttcatcttacattcgtcattttattaaccaacagaactatctaccctgtcatctaaatcaaaaacatagaattgtcctggactcaaccccttgtttcacacactattctaatgtattaacaaatgtgttsactctaatcttaatgtgtctgcaatccacccacttctgctaccactatcctgctgacaaccgtggtcatgctaacttacttactgctaggacttcctcactggtttccctacctccccattctccacagagccactaggccaagcaggagtttttaatcattttgtgccttggatccctatggcaatctggtaaaaactatggacctcttcttagaataaagtttttgaattaacacaataaaaacatgaaattgcaaaagaaaccaattaggacccacctccctttgagaggtttttctgaggcacaaaggtcattttcctggcacatgagacaccaaccaccaccatttcactatatgccaccctaccttctccttccccatatgarttcaactacagtaaagtcatactcaacgtcaccatactacctcatctctgaccctttgtacatgctggcctccctggtaggaataaactatatcccttctttacctgactagctctcacattttcccttcagaattcactcagcccaggtatcatctcactcacacagccttccctagggccccacatttgggcaaattctcctgcacaggctcccacagcaccctgtcattgcatcttttcacatcttatgatcagtttcctctgctggatatttaactccttgatgacagggcccatttcttatttaactttacatcctttgcagagtgccaagcacagagcataccctgaatatgtgtttgctgcatatatgcatgaagcaatgaaagaactccctatctgatatgctcaaagaaaaccttacactctacagacatgacctgggatgtcatgagctacactcccatttcaaaagttggagagaatgaatagaaatatttgggatttctatatttctacaagggaaacataaattatcagctaagtatttataagatcatagccagaaatatctatattaaatcattttagggaagaaaaatgtaccaacaccaccatcttgggaagcaaarttcatctcatacttacttcagctagtcttgaatgtttatggaccacctctsttttattcattggcgtgagctgctgcaaaacacttcggctatttgtcaaagcccgtgtcaatcgggcaaatttcgtccaaccttaaaaataaggaaagaaagtctcagtttttcatacaaatgaataaggaatccaacattcttgctagcattaaaaagatctcagcaaccacataacatccaaaatgaatgcaaagtatcaaacaaaagtattttctttccttctgtatagacatgctcatatatttgaagtgtggccataaaataatgagcaatttttatgtgtgacctttgtattttgcccwtatctgtgtatagtccctgtagccaatgcaactagctatccacaaaattctgtgctcctccttgcattgtacagctttcttactgggaaatagctgtccaattaggaacatacttcccagaatttcttgcatctcagtatggcctatgtccctggttctcaccaatggaatgcagacagaagtaatgtgtgtcacttccatgccgtgatttaagaaacaactgtgacttctccacaatttctctttctttctaccagctggacaaggcccaaggggatagcaaagctgctgaataactgtgtgggaaaatgccatatgccagccaggatcgtttgccttggactgttacatgagcaagaaatgtgcttctattgtattaagccactaaaagttggggatttatttgttacagcagctagtcttaccctaattataatagtccttcaatgtgtttgtgtgcagatataagagaataaaactgaatttcaacaaatcttactttttatggttcatttcacacacttccatcttccttgtaacatagcaaaatgttatttatctgttattaacaactgcagtgatacctaaatttatttttggaatatctagaattgttaataatgtcttctgaaagagcagtgacttttgggggaaagaaatgcaatttaatgggaaagaattttcttctggggcctcaaattgccagtaataaaatcattaatctcaaggaaatgtcaataagaagtgaacaaatagaacaaaaccagccatactctcatcctgtctcaattatcctttccctagatatctcaaaagctccaattcattaaaaaattttattaacactatctgataacttctacacaattacccttcatgaggtcatttatcaggcaactccttaaaactgaaaaactcctgatgttccaaaggaatgatgacaatgatgaaatttcagatgatatgacaaaaaaaaaattaaggaagaaattctggaaatacacctgcctaatatctgtcaaaccataaaatgcaggtgacatcattctttactactattcttcaggctgattctaatttaatttaagctttgtattgccccaccaattcaggtctatgtatcaataactggattggaaaagaaataaactggcatcaattgatggagagtctttatttcttctacattattggaccccatcctagtaattagaacaaaaaaaaagttaggttttgggaattgtatgcaaccctaaggcttaccctgtacaatgtgctgtggaaacaaaaaaaaagggtattagatatgacaccaactctctaaaaactcaacattaatgaaaaaccaacatgcaatctctatgacaaattgagacttttcttttgaatgccagacctatgtgtctagctagccactggacttttcttactacagtattctacaggcatctgacaacactcaacatgtccaaaactgacaccatcttccccctttatcacccactctgcctcactcatgcatccctgatcttgtcaaatggccccaagatatttctaatgcccaaatgagaaacatgaaattcgccatcctcttttcactattacctacacacacacacatacacacacacacacttatttcctagccttatagattataacatcaataaatatctctcaaattgaatctcctctctgcacccctactatgtcagacaacacaacgtctttcacccgagttaggcagcattccaaaaccacatcctcattgcttgcaaagttctttctaaaacacatgccttttaccctattaccctttaacagaaacctgaaggcctccaggataacactgtatatccttggtatacaggtcatttattttctgatccaagtgatttgctctgcctctgtctcttgccactttctcacacatgctctgcatcccagccttattaaaatcaatagcaaatcaaataaagaataaattcaaaactaaaattaaatctactaggaattctttgcacaccctacgctgttttgtgtttccgtattttcacatgttacaatcattctgccttcctggaatgtcttttccctcccccatctttctggctaacacttactggtaactgcagactcagtaaaagcattacctggatgcttctttgatccacccacaagtgagaggtgccctcctctgtacacgcacatcatgggatgcatacctcacctggcactaacaacactgatgtaattgttgattgatataatagccactcttgctaaactcttgtttatccctccattcttagcacttgaaacaaggcctggcataaaatacaccataaaataaatcaattgtatttgtaactttaaaaatcagatataaaataaatctcattttgttttattatcattggtttttggtttggttttgctttgtttggtaaaagtggtgagggcgtctttggatgacagtaactatattagtcataggtatattataattttacctggtgataatctgtgcaccttacatcaatagaatgttataattgccttgactatttctagaaaattccaagtcaatcttttacttactgaaggctcagatttctaaaacaggtaaaattacagcccttggtataactcattggattaaaagaaaagcccactttcgttccctgtgtgaaaaaaaggtttatccagaaaacattttgaaaaaaaaaggagacatttaggaataaattaaatgatccataaacaaatacaaatcatcaaatggcatgttttctctgatttcacagtatcatacatgaaaataagtgtgagaaaggagaaatatgacaatgaaagcttattgtcatcctctggctttccatttgaagcatcatgagcacagactacaactgtgtttcttaaggaggaagcagttgttcctaatacaaaaaaagcttgttcaaatgtctgtgtatgtgtgtaccttaatttacacatgaagtcagtgtgatcaaggaatatttcatctcttttctttaccttattttactttcttgaagaaaaaaaatcatttttaaacagtaaaaataaaacacatgcatttttctccatgaataaaaataggactatcattgatttgaaaaacagaaagaaaatgaaagagaaaggtaatattaacccatcattctaaaaatgttttaaatcagcatattctgagtaagactacccttgaacatagatgaaaagggaagtgactgcatcgtgcgacttttagttgccagatcttatattttctatccttgtgtattagtccgttctcatgctgctataaagaactgcctgagactgggtaacatatgaaggaaagaggtttaattgactcacagttacacatggctggagaggccttgggaaagatacaatcatggcagaagggaaagcaaacacatccttcttcacatggtggcaggaaggagaagtgccgagccaagaggggaaaatccccttataaaaccatcagatctcagagaatttactcactataatgagaacagcatggggggatcacccccatgatctaatcacctcccatgaggtccctcccccaatgtggggattacaattcaaattaaaattcaagatgagatttgggtggggacacagagccagaccatattaccttggttgactaacacatagtgggcactagatctgtttttgtggaatgttttactgaatggttttgtttagtgaatgaattaatgatgattaatgaggaaataaataggagtacagcatctgcattatatgtaaatatttaaaatttaaagaagaaaatacattcagttcttaggtattagcatagcttatatgaaggaagtcttttggttgaagaaggtaggaaaggcatggtagggaaggttagagaaggaattctggaagtgttaaggattataatctgctttcagaaagagaactggggaactgctggcagaaaaaagaaaaaaaagtggtggcaaatgttgaactgactcagacggaccagaagagagaaatttaggagaaaagacttggaaaggattctttcttcctagataaatcaaagccaaaggcggttgtaaaattgagtaatcgtttatgagttttgctatcaaaatgccctagaacatggagaatcaatgcaaagcaaatgaatgttttggtacacattaaaatcaatgggagcattcagagatgagctttctgagctactcagtaatctttttatttgactctgattagggccttcttgcagttccagttccaaagagttagcatttttctcacaacacctatgctgtccttctctccttactgtcagcacaaacccctgccaaaaatgttattgaaaaaagcagaagccataagaaacatgatagtcttctttttaatttatataaagttatgaggtacaagtgcaatttctttacatgtatcaattgtataatggtcagggcttttagggtaactgtgacctgaataacatatattgtactcattaagaatttctcatcatccaccctctcccacgccttcaccctcccaagtctccaatgtctatcattccactctctacatccatgtgtacacatttttttaacacccacttatgagtgagattatttgatatttgtctttctgtgtctgggttggttcacttaagataacggattccaattccatccatgttgctgcagaagacatgatttcattcttttttatggctgagtagcatcccattgtgtatatatgccacatgttctttatccagtcatccactgatggataattagattgattctatctttgcaattgtgaatagtgctgcaataaacatatgagtgcaggtatcttttttgtgtaaagatttattttcttttggtacatatccagtagcaggactgccagatcaaatggtagttctatttttagttgtttgagaaatctccatattgttttccattgaggttgtactaacctacattcccaccaacagtgtacaagagttcccttttctccacatccttaccaacatctgctattttttgtctttttaatggccattctgattgttgtgagatggtatctcaytgtagttttaatttgcatttctctgatgattagtgatgtcaagtattttttcatatactgttggccatttgtatgtattcttttgaaaaatatctattcatgtcctttgcccactttttaatggagttattttgttgttgttgaattgggtgccttataaattctagatattagtcctctgttgaataaatagtttgcagatactttcttcccttcttcaggtcatctgttcactctgttggttctttcttttgctgtatagaagcttttagtttaattaagttccatatgtctgttttcatttttgttgcctcagcttttgaggtctttgtcatgaattctttgcctacaccaatgtccagaagagtttttcctagattttctcctagtatttttataacttcaagtcttatgtttaagctaatccatcttgagttgatttttgtatatgacaagagataggggggtcctgtttcattcttctgcatatggcaatccaattatcccagcaccagttattgaaaaaggtctcctttccccaatatatgttcttattggctttgtcaaagatcagttgtctgtaaatatgtggctttatttctggactatctattctgttctattaatcaatgtgtctatttcttataccagtactgtgctgtttgggttaacatagctttgtaatataacttgaagtcaggtaatgtgatgtcttcagctttattctttttgcttaagactactttggctatttggggtttttttagttccatatgaattttagaattatttttctaattctgtaaaaaatgacattggtattttgataagaatggcattgaatctgtagattgctttggacaaaatggtcatagaaatgtgacagccttcagttccccttctctcccatccacctccagactaaaccactatggcacctggttcttacctgcacccctatcatctcagagaattgatcatttgctccttcctgatcacacatacgtttcaatcatgtactttgaagtagattctaaatttttgctatcactaacaatgtcttataccaatccctttgtgttcctgaacacatctggaattacctattattacctatattagttcatttgatctcccaccaacttgtactgtataaactttgaaaaagttgagctgccatactgtctaggtcagagaaaaaagacgtatcagcagttctaacttttccaagtgatacatttactgatctcacctttacagagatctaactggtgtgactgattattcagcaaagtttgctaatgttacttagatgtggtcgatacagggtaatgcaaacagagagctgaatatgaagagcctaatacttgctctgtaagttgttcatggcattatgagaanatttgttctcctaaaagctcaggatgccagctccttcttaataaaatattagtttagctctattgggttgcaattaacctytttgtcatggactgcctaatcttaaaaataaaaagaagtcacagaggcagttaaatcaatctactagactgcaacacaagattctaatctataagtaaaaagcttaggtaaacaattatgctcttggccaaagagactacattacatagtataattactcatatttcatctgttgtttcctctctaaagaaaaccattggcttccacaaggagaagcttgctattttggctgttattttttattctatgggaatttttttgtcacaattattggcaagaaaatgccataactatttggcacaagatatttcacactgtaattatcttggcagttttggagtctgtttgaaaatactgtacagtataaatgggcagagatttaggccatctcttttagaacacatatggataactgacagaatggatttcttggctgtaattttcctctttgtattattataatgtatcaggtaccactgactgattacctgaacaacactatcaagacctcaataccaggaacaaaaaataacgggaacactttgcccccttaaattattatcagttagtttatttggttcaaagcagcataattctctccaaatgaaagtattctcaacctgtgcttcatttttgtggggaaaaaagaaagcaagggattgaggtagttaaacctcaacaataagtctccactgagaaggacggggcagcatgggtgcaatagagagaacatgggatttgaaatcagtcagacgttgagcgtcagaatcttcaacagtaaaatggagacaacaatactaattttcagaattatagaaatgaccaataatgaatataaaattcttggcatacattaactactccatcaacactggcttccttccctttcgatgggttttgcaaccatccatcatggtataattcaaagatagtgttgacattacccagtgccagtaagatcaaatatcaattcagaataaaagtttggtaatcatagattgattacaaggaagaggtacgttcaaattagttggctgccatcacatgttgtagttattttcccagatatgaatcagaaataaaattcasagtgagtccatttatttaagtctttcaatcatatgtctaagtttcttggtaaaaatatcgatacaagtaggagattaatgttaattccagtcaattttggcaaatcctcaaaggacttggacccttgttccaatcatcaggccccttttcatgttaagaaggtaaaaagtccttgctctgggattacattctgattttgccggtgtatagattcacttgtctgtcctgaatgctaaaacactatttcttgtatgctggcagaatttttatcaatgaagtatttcttcaaaattttgcaaacacccttgtaaacatcctcaactcccagatctttgaagtccctgagtcttctcttattcacttgaccaaatttcaacattggataaacacaacttttcacttacttctgcatctatacctctttgactaaatatgagtggattaaaacacaatattatgctcatagataactagtgaaatttatgaccactagcctgaaatggacctttgtgcagctcagaaatcctgctgtgtttctcttgtccactcactattccactctcttagataactagttcagacgcactccactcttctcacacccttcaccatctttactctcagttgataactgtgattcctgtttttactgagacaacgggagcaatcaaaagaaagcttccactatatatttactagtttgcctcccccactagaatgtgacagaagagactttgtatctccaggacttagaatcatgcctgtaccatattcccaatttttggttgggaaaaaaaaaatagataaatgtaagacaaggaggataaaatattcctgtaagagtcctgaacaggctcaggttaagtaactctggtgcccaaaactgaatcaacagcaagtctactctacccaagttcaatgatctacacccaaattattttgatattatggtgttatcatgtcatcgcacccattatttcccaaaagttccatggttcctttacttgatttaaaaagtagaaagataggtgcttatgycaatattttaaaatgtactttcctacactgctagcttcaagatataggatgctgacttaatggcataaatattttatttctattgaatttttcatgttaaatgtacagttcacatgaataatagaaagtagctcctacacaccattcatagttacattttacaatactttttcaataatctgctatgtgtttggaagatacagagaagtctcaaaagtctatttaaaataagctcatctacagattctggcactggaaagagacctttttctctaatgcttttcacaatggggtctgattttccctataaattctaatttacatgtctatcaaactcatagttaaaaaatcaagtggtctgagttgtctcgagctttttcaaatatcattttgtataaaaatgaattattcatttcaaagagactgagccttacaaagaattctgtgattctgatgtggagatgcagataaatggagaagcattaatttcagaaagaaaagtcaacacttcaacatcagcaccctttccccaacttcactgcaaaatgttgccgactttgagtttccataaatagatatgtagttactgacaccaccacttaggttcagccggtcaaaactgctgcgaaagtactgtactttctttggccaacttcatctgtgccatgaaatcacttaaagtaagtaagagaaaacaataatcatgtagtgcaaatacaaatacatacttttttgagaggaaaagactatgatcaaagctttttactcagtctgattatcattcgtgtatgaaaatgttaggtcacaaatcagatgccaattatttctcttttgtttaaaaatatataactttaagatatagaccattgttagctgtagaattttttcatttttaatttttgtgggtacatagtagctgtatatatttataggtatatgagatgttttgatacaggcacgcaatgcgttaatagtcacatcatggagaatgagatatccatcctctcaagcatttatcctttgcgttaaaaacaatccaattaaactcttttagttatgtaaaaatgaaaacaattgacaacagggacatagagagtagaaggatggttacaagaggctgggaagggtagttggggagtaagatggggagatggttaatgggtataagaaaaaaatagttagaatattataggctttatatagatgytccttatcaaactagagaagctcccctctattcaaactttactgagagtttttatcatgaacaagtgctggatttcagcaagtgctttctctctgctgactggcataatcatgacttttctcattattttgtgaattacatttttatatggtagattacagcaactggtttttgcatgttaaaccagccttgcataagtgggataaaccccacttggttgtcataattctttttagatattgttggatycaatttttgtagaggattttgaatctatattcatgaaaaatattggtttggaaggccgaggcaggcagatcacgaggtcaggagatcgagaccatcctggctaacacagtgaaaccccgtctctactaaaaatacaaaaaaaaattaaccgggcatggtggtgggcgcctgtagtcccagctacttggaaggctgaggcaggagaatggcatgaacctgggagacggagcttgcagtgaaccgagatggcaccactgcactccaacctgggggacagagccagactccatctcaaaaaaaaaaaaaaaaaaaaattaaaaaaaaaatatgtctgtagttttcctttcttgtaatgtctttttctggttttgctatatgggtagtgcttgcctcagaataggttaagagagctctctctgcttctattatctggaaaagacttgaactggtattatttcttccctaaacgtatggtagcgcttaccaatgaaaccatctgcatctggtcttttcttggttttggaagattattaattattgttaattttttaaataaataaagcacaaatgaagttcatttttccttctgtaagttttggtagtttgtgtgtttcaaggaactggtctgtttcatccaatttatcaatggcagctatagagttgttcgcagtagccctttactctgcttgaatgtccatgtctttaatttctgatattggtaatttgtgtctttacccttttttctcagttagcctggctagaggtttactaactttaatgacctgttcaaagaaccagctttgggtttttgtgattttctctaatgttgtcctgttgcccagttcattgatttctgttgtaaggtttattattccttgtcttcagtttgctttggtttaaattgtttttctttatctagttttctaaggtagaatcttagattattgattttatgtctttcttcttttctaatatatgcatttaatgttacatatttccctctaagcactgcttttgctgcatctcacaaatttgataaattgtattttcatttttctttagttaaaaatatttttctaacttatcttaaggctgcttctttgatttgtttagaaacatgtttcatttccaaatatttcrggatcttccagatatctttctrttactcatttctagtttaattccactttggtctgataacatactttttaagatttatatttttttaaatttattaaggtagttttatggcccagaatgttatctctctggtgaatgctccactccttgtgaggtgaagaatatgtattctctggctgttggatggagcaccatgaattttaaaacaagcaaatgagcattaaacctaaatattgctgcaataaacatacgtgtgcatgtgtctttacagcagcatgatttatagtcctttgggtatataccctgtaatgggatggctgggtcaaatggtatttctagttctagatcccggaggaatcgccacactgacttccacaatggttgaactagtttacagtcccaccaacagtgtaaaagtgttcctatttctccacatcctctccagcacctgttgtttcctgactttttaatgattgccattctaactggtgcgagatggtatctcattgtggttttgatttgcatttctctgatggccaatgatgatgagcatgttttcatgtgtcttttggctgcataaatgtcttcttttgagaagtgtctgttcatatccttcgcccactttttgatggggttgtttgtttttttcttgtaaatttgtttgagttcattgtagattctggactattcacaatagcaaagacttggaaccaacccaaatgcccaacaatgatagactggattaagagaatgtggcacatacacaccatggaatactatgcagccataaaaaatgatgagtttatgtcctttgtagggacataggtgaaattggaaatcatcattctcagtaaactatcgcaaggacaaaaaaccaaacaccgcatgttctcactcatagatgggaattgaacaatgagaacacatggacacaggaaggggaacatcacactctggggactgttgtggggtggggggaggggggagggatagcattaggagatatacctaatgctaaatgacgagttaatgggtgcagcacaccagaatggcacatgtatacatatgtaactaacctgcacattgtgcacatgtaccctaaaacttaaagtataataataataaaaaaaaaagggaaaagaaaaaaaaaaccctaaatattattagaagactgttcaatttaaaagtagtatttatagttatcttaaatttcccaggcactgagtctatgtgtaaaggaacagggaatatgggtccaaattgaatactttattcgatcttcaaagcacaaataaattgctgtcatactttgaatggtttgcacactgtaaaaattatcctctcgctatttgatgttaaccagaaactgagcagatacaatattatatatgtgagttcctatgcaaggaataaacttactgtgattttttctataattatgattacagttggaaagattaaagtttctatgccagttttttaaaaagaagtaaggaaaggcgatgtttgtcaaatgcaaagaggaagacattttatttttagtttcctaagagattattaaaaataacatttcataaaaactacttctaaggttatttgaaatacttcatttatatgacaccagtttctaatttaaacataattggagagaataaattgggaataaattacatagaaaaggaggtaaaagcacatgccactgactagtggtttctatagcagtctctttgactattatagtcaataagactacagtcagaaggtttgcattttgccagtcactctcctgaagacaaaattattctttccataatctagcaacatctactctagggactacacaacagaataaataaaaactgaaaagtaacttgaaaaagtcaactattacaattktaattcaacaaaattcaatcaactaaccaactgagctctagttagatttcacccaaaccattccaccaattgttacgttttggctctaaagctcaccatggtatgaggtgttgaaattccaatcatattgattcaaaattaacaatgctcagccaggtgtatggcccrcgtctgtaatcccagcactttgggaggccaaggggggtcagataacttgagcccaagtgtttgaaaccagcctgggcaacatggcgaaaccctgactctrtaaaaaatagaaaaattagccaggtatggtggcgcacacctatagtcccagctactcaggaggctgaggtggggggaccacttgagactgggagatggaaattwcagtgagctgaaatgacaccactacactccagcccaagcaacagagtgagaccttgactaaaagacaaacaaaaaaaatgctctataaaatttcttactcatgctataagttaaccaatctatatttcaactttggatagacatgccatttctattccaacagtatgattgaataaaacagattccaagcaatgaagcaaaagaaaggccacatagtagaattttgttttccagttcaatcagcagaggtaaaacagtaagaagatcttttagcaacagcctaatttttcagtgtagtaattcttttgaaaattaccttttgttgaatcatcctctattggctgtttgaacaacgtaatatccttgaaagtacacaggaacaagaccaccttttcatgttcatttcttattggtgcaatttgcatataaaaccaaacaggggttcctgtaacagaaagaagttggggaaaggacattagagtgtggcacggccacagcagtggtttggtctcctggcttccttcttccttcagctgccaacagctgtgccaggaatcaacaccaaaacaacagtatattaattactacaaacaatccgtaaacctttaattttgtatcaactaccagttgttcaaatttaataaacacagtatacacgccaaaatatcaaaattctaaagtaaagcacaggctgtcatttcacaatgcaggaacacaaaggcagtcttgctacttaagcaatcccagcaacacctgtaggtctgggtccctcaaccactgctgctctcaccaactttcttctgagagtcttaccaattgtgatcactcctacctgcttctctcgtcatgtcactttgacaagtgtttccaattaactgcaacagccatacctgatcttctaataagcattcctcttggaggaacatctaaaatactgtttctatcccaaggctctctcatcagtcagatagacttatatgatagctctatggctttgacagcatccccacatcagagagagaggatgtcagcaaaacttgatgtccgatgtacacagagctctacctgaaactgttaaggcagcctgaagaaaaatagacgtgtccccagcttttgagatccccaggcatctttttgagccactgctgcctacctccctcacttaaacagcatgaagctggactctatcacctcgttcttcgaaggatggctactgcagactctgccctctaggacagagggtatcaaagtattcaaggcttatcatttggataagtcaggaactggtatataacaaatagaaatatgtgaaggcacaagaaatgccttcaaaggtgtaattatctgttaggtgataaaacactgaagggaagrttccattacaatcaaagagacacatttacattacaatcaaagagacacttttctcattatattctcttcatgccacagtgcagtaaagcccctccaaatattctattttaagacataaaggtttttgtaaggtttaggatttggggagtgaaacgtgcaggtattaatagtctgtaggtaagaccctagccttttactagcttccattaagaaccgaataagaagcacttctattcccatggcctaaaaaaataaaaaataaaaaagtcacctaatgtcaccacaaaggggaatttttcatttagacaggatgagataactaccaggctcaagaagtcagagaattagagaaaggagatttctatgggactattcagctgtgacaatcaggttttctgcaaccccagggggcctatggaaggacgtggccctttccaaaatgatggtagaatgagacagggacctcaaaaataatcacatcatctccccgagaggcttgttcatttttttctgttttcgtattttacacagcgtgaccaggaactgtgagtgatgtgcacggttttacaaatcaccagacccagacgttagtggatacatggcctgtagctattccaacacagtaagcttgaggcagaagggtcataaacaaagagaaaagggcactaaaaaaataagtaattttccaaggtctgttagaaatctgaacagaaagagatgatgttagatttcatgccttgctgtgaaaaccgcaacttttcaaattctggcacagagtctgggctctctttaaaactgctttagatatgaaggtaattgtttttcaactttccaagccacagggtcatatttccccaagtaggctgagtatctgccaagtatgtggtgatagatccttcatattctggatttggggttcagggggctggggagtctgggagggttaagtagaggaacctgctgtggctgaatctcggtgcagtgctccagcattgatgacttggaggagcctcggctatcagttctgcatttgagtacacagaaagagccatatatatatattatatatatattttatatatattatatatattttatatatattatatatatattttatatatattttatatattttatatatattatatattatatatagtatatattatatatatttatatttatatacataatatatatatttatatatttatatttatatatatatatatatttttttttttttgagacggagtctcactctttcgtccaggcccaactgcagtggcactatctcggctcactgcgagctccacctcctgggttcatgccattctcctgcctcagactcctgagtagctgggactacaaggcgcctgccaccacgcccggctaattttttgtatttttagtagagayggggtttcaccgtgttaaccaggatggtctcgatttcctgacctcgtgatccgcccgcctcggccttccaaagtgctgagattacaggtgtcagccaccgcgcccggccagaaagagctatyttaagctcagagctaccatttctttccccacagtagaaacagccccctgctaatcagagcactggacctacagaacagaggctgcaaactaaaatttcaatggtgatgcatattcaatcagatgccgcaattcccccatttgcaaaatggtgtttaacttaattgcttaaaggacgtattgggagaacttggcacataggcattcccaaaacagttttctgcagangtgaatttttctacctaacactttttttaaatcacaaaaatatgcttttctcagctgatgttcaaaacctttcagctatttacaagactttttaaaagctgcatttaaatagcaaaactccattataatacatggataacacctatccttcactaaagaggaaaacaaaagcaaaactcaatgtagatagtgcacagaaaggaggcacaagttttaacttacaatgctatggggtatatatccnattggctataagcaggcacttatctgcatagagagttatctggaaagaaccagataggcctgaacaatgatcagataataatttcaatccattaacataaggcaaaataactaaactaccttggaaagacttctggaaatgtaaaattcaagtaattactaagatgatttaaagtaaataaacagaaattccactaagatattttgttgtggtggttgtcattacagggtcttgctctgtcacccaggctggaatacagtagcatgatcatagctcactgcagcctcgaactcctgggctcaagccatccacctgcctcagcctcctgagtagctgggactataggcatgtgcctccatgcccagctattttttttttcatagaggcagggtcttgctatgtcacctaggcttcacctacatattttttgagaaactcaggaactatggacttgtctttggggctttaaagtcaggcaaatgtttgtttattttgcttaaatgtcagagagtgaatgaccttagttatatagaatattcttaaattatttgctaaacttggagcacatatctaaattattgaaggcttaacaaaccataggaaaatgaaggattttttggtatacaggtctcctacaaattatcaatatgtacttagacttggcaaaaaaagacccagaaagcacctacagtctgccttttctcttgcagaggacagagctgaccattcagaagggattgttttctaggtgacaagctagctgacatttagctatgacttcaaactgaaattctctttgggcttgatgtaaaatgaaaaataagataagccattccttaagtaaaattactaaaaacaaatgtttccattatcaagtgcactactttgaggcaatgtctcacrctgttattcctttgttagtctactaataaaaagagaaatcgaattttaattccaaatattccacagataaaaaatgtttcaagtaaatggagaggataaattatgctccacaagatccaacaggcactgaacatggaacaggcgtttcctgttgaagcgagaatgttttccaaacttgggaagaatttagtaaccatcaatttccatcaaagataatagtagactttgctatcatttsctattaacaataaataaattgactcatcttatgaagtgactgttcatttcaaaaaagaaagcaagaacaatttgaggaaacagcaaaaagataaatgtaagtaaccaygcaaataaagtgaattagaaaggggagttgttgagtatactgttggtttttgtcatgttggttttyttccctccaaactctgatggaaagtctatatcaccagatattatgtcattatataatgcataycttaccacatacaaatctcatcccagagaaaggtcacaacaatcaacacaaatttaccaaacgtgaatgacttgttctgagaacaaygactacttctactaggctttctcacaaaagagtctgaggctggcaaaaggccatattggtagagattcccctcaagtagctaccacatattcacattgcctatgttcgtgtcgaaaggtaattgcatatatccagtgttaacaattaccgttttctttaaccataagaagaaattaatacatgtatctgtcaattttaatcgttgtcacataattataggatctttattataagtattaattacaaaatattttgctgcctgatacaaaagtcatattaagatgcatcacatttttcttccattcctcaaaaggttactttccataggtagaattatttattaattttattatctaatttcaccagcaacctctgcccctgccaagaaaagaagcaacagaaggtttacatgctctctacattttagctccactacgacttaccaaacataatattaataaagagttggcacatcttattaataattgagatacctactgtttttcttgtacagaagaacttcaaagcagtttgattcgtagttgtcaaaagtttgcctgactttctcaatggtcttcttgtcagtcaattccccatacataaaactgggggggaaaaaaaacaaacaatcgatttcacttttgtgttgcctttcaaatgctacaaaaatcatataattgtctttgactagtcaaatgtggctagaaaatataatattgctcctacacagaatagtcaaatcrtgagaggcagttcttgctttacacagttcctgtatgcacagatttcagtcactgtggtttagttaaataacaccagttccacagcacagttcaaatttcagtttccacagtatgttaactgtgagtaattgcacaaagtgcaagctttgccncttgatcttcagtctacaaatcactggaaaataacagatgcaccttcacaaccagtcactgatcacatcacttctttcaaagcctgtcagtattggaaacagcacggctgttactcagttcacgcacagacagaaaagcatgtagtcatattgcctccttttctctcagtgataaacccatatgacattttacaaaaatggataatcaaaagcagtaagtagccaacaaaaactaaagtccaccaaagaaatgaaaaataataatgttggaagtggaattcaaattgaacataaatgaagttataagagaaataggtgaccatggaaatgtcaatactactgccatttgggagactctaaatatgcatccaaaaggacttagtgaaggtgagctcatccatataaatgaagaaagtggttgtgacaaaaaggatgaaggtttcccagaggaggtgacaccagtttaaaaacaaaccaaaaaaaccctccttattaaaggagctctagtacattgatcacaatagtgaaagtggaagaataaaatatttgaaattaattctaacttagaaaggaggrtgacaattttcgagaagatagaaaagatgctctctttatacagaaagttacattctgaaaagccaaagaattgtttaaatgactcataagttttttaagaagaaataaaacacttcctccattctcaacgtttctaatgttcaaaatcacagtacactaaataaatatgagttttactatkatatcatctccctgcattgataaccaacagtaagagagtttttattgttttgacaaacatttttaaagatgctaaaaccatcataatttttattgagtattaagatagtattatgtggtttcagcttgcatggaccttatgttcccatactatcattaaaaaagtgaggattgcatatgatacatataatgcattgacattctcatcatttcagggaattttcttaagataggtacaagtgtggctaatggaagggaagtaaagatggcatcttgaaggaatcatacattattacagtggttagaggaacatacaaaacatagattaaggagtgaatgtccatattccacaaaaactttctaatgtttgacattctctatttttctaagagaaccttggcaaaagtctgatcatctaaataacaaaacttgcccaagaactacatgtctctaaaactccattctcaatgctttcaaatcatcagttgtacatctggttttagatacacagttctgctgatcggtatgattgtccagaccatttcttccaccaggaaagaaaatgtggcattactaaacaccttaactaagattttgaaagatcaaaagtctgtctttgttattgcttttctttcagttttcaaagagttcacatatttactagaggcagatccaaagtgtggtggaggctgaagcttatacaatttgtgaagccctccttaagaaaaagaatacaaaattataaaacaagattacaaacagagcctcgaaagacatccactcaaatgagggcccctgaaggttcagcttcattataggctcacagaaaatctgcacctgaaaataccaatcaataaaatttacaacctaaaaggcatagtttttcagcaagatccagtaatgacacacaggatccaatagcagcaccacattacaaccagaaattacagggtaactcaagcccaccttctataacaccaacctaagcaactagaattctagaaagtcagaaatgaaagtgggtaaggcagatcaaagattgtccaagcaccgagaaacctgaatccttcatttttaatatatttmatttaaaaaggaaaattttaattgtcattaaaataataaaataagtaaaaggatctcagaataaaatgacagactcttaattccataatcttatatctagactaacacaggaaacctcaaagcacamctgcaagctggcactgaaaagccactgttactgtcaaagctgaaatttcagctcatgagagtttcataaaaattgcttgaaggcattacaattaaattagaattattcagctaaagaacataaagccacttctctcccaaaaaaatattagcttaatattgtmcataatatttttatagacaagtgaaatttttaaatctttttttactaacttttatttttaattaaagaatcttaataaagcagaaacattttaaaattcaagataagggcaattaaactaagtaaatatttgtagtcttaaaagaaagaaagaaaaaccatttcacactgctactaaatgacaggtgtctgtggttcaataaactgaaacataatattcgcaattggtcaacagaaaaacaaaataagaaagaatttatgatataacaagcaactaggataaaaattatcaaaaattaactccaataagatttaaaagtaagttacaactcaaatttaaaaaagaagctctttgagggattggtttaataacaccaacgaagaaaaaatgcaacacaggtctgatgcagctcaacttctgaagagaagataaaaacaaacaagcaatttttaaataaaccataaaaatttcataatacacctccattagttagtccttccaatgctaaaatcacttatcctaggaaaataaaggcacttaagaaaaataatcctatattattaaaatccgaatgcggtttttaaaatagtctttcatttcttacattgttccactcagatttttcatttattataccgcatatttccagtgatagaacatgtatttgaaggggtgacatgtagcagttaaataataagaggtatttcaaaacagactataaagaatgtcagaaatgtactatctatctatcctcccaaggcaagtgttctggaggttaattcaatctctgaaagtattttcagccaaagttgtccaagccatactgataaatcaatgattcccgcattctctgtgggtatggcacatttgtttatttgcttggctttgtcacatatgaatgctgaaatgttttatcacaggttcctgaagcctgactcaggatgactgaagctcaatgcagtctttgaatggttaatcaatttgaggggtcacaaattatagaaatagtaatcaacgggctttagaaaccatatataataattttccatagttttcatatcttctaccaaatatcctcaaggaatatgtaacggaaatatttttaaaatcacaaaacttccacttgctctcttacataggatgccaagctcctccttggtaattataaatgaactactgcactgttactttattgaaaggaaaatagaattggattcacagaagcaatctatctctgttataatattgggcagtcatggtataacagaggacttttgcatttggaggwccacttacaaagtggataatttatggacaagtcgtatatcctctctgacccatagtttcatcagtaaaataaggacaataataatataactcaaagggtgacaaaaggataatgcaaataaagttacaaattataacgtgttacacaatggctgaaatatgactggaatgtacrgatgggactagaatgccccttccccaccccagcctcactccctagcttctccaggattctccaggaaccatgctttccaaaaggcagtgtgtcactgtgtcttaaagggagatgtgcatggttctgtgaatcttctttcttcacaagcccatgaggttgaagcaaacgctcactcagaacctgctcctgtataatctggccacttttcttgtcacacaactgactggtttcatcttgggaataagggataagttgtcttcaggcctggtctaggccatacccagctcgcctaggcmtctggcagttatcgttcatgtgtgtctgacctagaaaactttgaggaacaggtggtttgggcttgtagcaggatttatttattcttggatcccttgctctgctctcaaaatctcacgaacaagcctcattatagtacctagcgtaagaatggctataacgattgacagacttccaaaggagaaaagaatcttacaactctgaagaaaacataacctattcatgagttccaccaacctctcttactctgctaaatgtgcaacggtgtgtctagactaaaatgcaacaaacattcagtcaccataatacagggtaatattatctgcaggctgtagttcatagattagcaaatccttcgtcaaaacaaagcaacacagatagacttaacgcagttggtaaatgtggtctccagctcagaagtggccacaaccatagaatcataaaggttaatgggaggtggactgagatctacagtcgaaggatcaaaaaagataaagcctgagagaggggaagttaaggaggaaaaattaaaaacaagaatacagttttcggcccggcacagtggctcacgcctgtaatcccagcactttgagaggctgaggcgggcagatcaccttaagtcaggagttcgagaccagcctggccagctgaaaccccatctacactaaaaatacaaaattagctaggcatggtggcgggtgcatgtaaccccatcgacttgggaggctgaggcaaaagaatcacttgaacccaggaggcagaggttgcagtgagccaagatcatgcctttgtagtccagcctgggcaaaaagagagaaagtctgtctcaaaaaaaaaaaaaagaaatacagttttcaaaatctgaaagaggtaattttggaataaatcaaagacattcctttatacagaggatcataaccaaaaggtttcacaacccattgatttacatggtcttcaaaggatttcactggagtaaataaatggttgatccatgacatgtaattaaggaaaaacagggatagcactgtatacctgtaatcttcggagtctgacatcaccaagacacctctgcccttcaacacttttcatcagtctcaccatgagaagcacagccctcagccaaatggagccggactgactggcatccatcatgtgtcacatgctcttggtagctgctgagataatcctgtgttcataaaactgctgtgaaatctgcccaataaactgtttcttaatagctctgactcattgtctaacttgatggggttggataagggattgtaaatggtctttcaaaaaaatgtatctgagagcatctatctacccctcaatccaccctacctaaactacctgattgttcttctcacccctctatccaaaacaaaaacaaaaaatgacagcagaataggctcttaaaagtttcaggttaattagaagtaaaatgctaaagtggttcctacctaatctatgacagtatatcccaaatgtcagagcttctacaggtcatgagataagatcatatgcttttaaatgtcattctcccaaagtctataacctcttttaaacatgcgatacttttcatgtcctccaataaacagcaaaacagtgcaaaggcgtggaaaatgcagtgtccacagtaaaatggacaacatttgaaattcctagggatccgaaagtgtcatagtgtcataattttacctaaaacaaaaatgagacaatacctagcacacatcagatattttcagataggaatttcagtaccattatgacatagcaaaaatgtaggaaaaccagaatcctcactaatggctgctgagaatggaaacagaaggctactctgtaacagtcttatagcagttaatttacaaactctgcatatattctattatccagcaatcccatttctggggatagagacagaaaacgtctcacacagggccacaagaagatgtgtaggacgattcttatttccaagttgtttgaggtagcaaagtgtcaaagttagattccaggactactagaatgtataaatagaacgaaggctgtgaagacactacaacattagacaacaatcagacatgatgaatagatcatcatacggtgacacaaagaagtctaaaaacataatggtgaatgaaaagagtaagaaaccataaatattacagtgtggtaggaattaaatagatcttaacaaccaacatatgcaaagcaatatcatttcaagaatacacatatttaattaacaagcagaagacagattagaaagacatacaataaacacactttagaattaataaccataagaggaacaagggggatgggatgaaagggaaaagaaataaaaggaaaaaaataaaataaaataaagagagaccttgcttagagagagcaaaatgacaatattgtgacaaactgaggagtatgtttaatttgattctgtgtgtctggtccaatgtgggaggggttgagaaggacaaagaagaaaaaagataagaaaacagaagaaaraaatattagcctcttgatattataaaaacacaaattaatgtgtttttattttaccataaaacaattcacttttgaacattcaaaactgtggcatgtaatcatttacctagttgccactttaaccctatagactttaattcatctaatgcaagttggatacaaaaatgattcttttttctgagatatatagtgtcaaagcttgtattttcccatataaaatgaagctcactgctttgtagcttcttattctcttatgtctgtctaaaaacttataatgataagcaaaatttttaaattatttacaaggatattctcagtgtcaaatacttatctccatattcacttataagtcagtaattccacacactataataacttttagccatcaaccccgtgtttctaaatgtgcacctcattttctttttttctctctctgttattttgtgtctcacacttaaaggcttttctggatttattcaagaaatgggaaaaaagcgatatgtaaaagaatttgagtcatgatgcaaacactgttttataaactgcttggggggtgcttttgggtttgttgttttatttcattttaggcttttttttacttgataatatgttgttagttttttccagtgtcattatccttccagtatatacaacatatgatgtagctaaacttctactactggatattttgattccttccaggtcttcagtcttctaaataatgctacagcaaacataaaatggatatagtttaattttaaaagagaataaggaagtttaaaagaagaacacattaaaataaatcatgcttccaagaaaaactgataaaggtcagatatttgttcatatatcagatgctagtcttcattgttctgtgagggcattaaactggttgcaatttttaggttaacaaaacacatctggcattttatgcaagtaagtaataattgtttacattaagaacatgatcatttgaaaacactgtctctgataagtaaagacaatttggggaaagactcaaacacttttttatacagttaaaaagcatggtataatccaaaactctcccacctcaaatgtcataacacaggatgaaatacaagaaataacagtatgctatccagagcatgtgagacctaggttacggtttattgcaaaacaagccaatccaattcaataaatactgacataagacactgtcttgtgtcctgttgtgcatacaaaagtgagcaagatggagaccctacttttaaggcacttacaatctggtacttgtgttagaagaaaagcagctctttcataggagcaaagagctaatataacacaccagcacttattttcttagtgaatcctttataggaaaaattgtacttgccaaagaaaataggccagggatagggcaaatacatgggacacaagaagggatgagagcaggactgaaaatagatccagatatgaagagtaatacttctcaaaaatggcaacaaaagcaataaagcaataagaataaaaacccaagggataaggcaagttagtttaaggccaaatgatgatgccaacagaaatatacacaagaaactatgaggagtcagagaagggaaaaacctgtcttgcttagggaagcataaataccttcaggtagatgagatctgagataaacctggcatgaagacgggatgtcagcagtccaagaataagaaatgcgagtgtgagtatatctgtgttgcctggaactctctatggacctgttccacaggataacgtctaccatgaaactcagctttttctaacttaaactgccttctgggggataggagaggagcaatgcttaatatggcccaacgatatcagtgctagcaaagggaccctctcaaccagaagccacagattttcatcactcccatttaccaatttccatacctaggaatgaagaatgaatatgagaatgccttcagtagaggcaaaaatgaggatggctagaggagcatagattaaggaagagaatgtttgagcagattatttctcaagcctggataggcaccagaatcatctaagctgttggttaaaaatactgactccctgcttgacccacccacttcagaatcacctactgattctaattcagtaggtttaagcggggtaggaatctgttttgcaaaacctatttaagtgattgctatgtgcagtcaggtttaaactcaatggtataatataaaatatctacatttcatgatgatgaaggatatctagagagggaaagagagagttatcaaccaatcccttctgtataacatggatgactctctctctctgcctttctctctctgtatgtacgtatatatacagatatacatgttcctctgattactcagtacctagattattcttggctcatggtagatggtaggtgatcaaaaaatatttattgaatgaattgattaattcacagatatataaacagttatatacatagagagggagagagtcatacacaggggattggttccaggatccctgcgtatatcaaaatccgtgcacactcaagtcctgcagttataacgccctgtggaacccacatatataaaaagtcagccctctgtacccaagggtttcatatccccttgaatatcatatttttgatctgtatttctctaatactatatttctgatcacatttggttgaaaaaattaacctataagtgacccacactgttcaaaccagtgttgttccagggtcaactgtatatgcatttaaccattttatatatacatatatatatgtatatatataatgcttctcagcatcaatgggtagaaaaaacaaatcactatttctctgggcaagtcccttaacatagctctacctcagttttctcatctgaaaaacagaggatttggcctagaaaaaaaaaaaatcagattccttgtagttctaaaataacttggttcagtgcttagttaaatgagagctttaaagaaaaattaactcacggaaaaaacatcccatctggccttactgaaatattgtgaaaagttttaggttctaaattagttccttatatatagtttccttttcttttttctgatccccttttttcttaatattctctttaagctcacagaaatggcatatttgtttaaagaaccattataataatataaatgtcagattctgttgtacatgagtcaaacaatgtaccattaccaagtacatgtggcttacacaggatataagagctttattttatgttctttacattctcatggaccatgtttaacttggccaggtggtgtttactctgttttattcaagacaatttagttgttccagaggtgctgtagatcacatgccacaagttgttccctgatacaagacgttcctctgattactcagcatctagactattcctggctcatggtaggtcatcaaaaaatatttattgaatgaattgattaactcacagatatatacaaatctttcttttggcaaaagttctcaccagtggctcttaagctatgtgtttccattgataatttagtctccctaatattctaacataatttttaactctayggtttgtatatgggagtccaagtaagcttaagccttttaattacattcagatttttgttaaatttcagaaaagattacttagctattctgttacctacctgcaagtgctgcttttctgcatgacgtcagctcgatgatatccagagagtttacaaaaaccgtcattactataaactacaggccaatccacaatctgggcatttcccagtaagaaacttgattctgaagaagaaaggagaaaaaaggaggttatttagcttaattcaacaatgcacttatttcaagtaatcaaaaaggcaaacttataaagatggacacatacaactatggtttgtaattgtacaaataatataacctgttcttgaaactgacataaccaggtttgcatgatcatgagacctgcaataaatatcgaatttatatacaaactaaaaattccatttaaacgaaaccagtttataataattctttccattcaagtataccctaagctatgaaatcaaagtgtagttagtaataaataatgttaatgactataaattacacctaaaaattggttaatttattaagattagggctatggtcacttccctacaaattgagaatattgaagttgataataaaagaaaattggatgaccccctgcaaaaattatattaatatattgctgacatgatggaacaatttttttgtccattagactaatcttgaaaagtctaatttaaaatagaatttaaaagtcttcctttaaattaaaattattcaaagatattttcaaccacataatacagataatttagaaactatcmgtattccaaataaaagagatatttttgttctattttacacagaaaagtaggtttgcttttgtataaattaatataaaatgattgaaaatccaatcatattaggcagtaactttagcagttttgtaaaccacatgttatatgtcaacattaaaatgaattaaaattaaaataatattaaaatatataagtgaacacatttttaatataaataatttaaaagtaaaaatttttaaagcaataatatgcttcaaaatttcacctaagaaaatttcctttgaactcatactcagggtagtatactaaaaatataacaaattttttagaagactttaaatcctcattcataattggtcttcataaaaataataatgcaatttaacatttattaagtagttgctgtataaaaractgctctgggtcaaacagtgggataaaataaagattagtaaaacacaccctttgctctcaataagtgtgtatgttgaaaacaaatatgtaacaacaaaatacaactgccagaatagatactaaagaagcatgggacaaaatatgaaaagcaaaatctgtttgaagccactaggaagcaacggaaagtaggcacaaactggaaaagataaacccttgaaaaagagaggctttattagctgagatagtcatttaactgtctattccgctgagagcacttgccagtttgggaagttcatggtgtgaaagagctcaagcagaagtgtcttacaagtctaaggagtcaaaggtcacaatttgggggtggcagagcaacttggagttggggaaatcctttaattgatggagtgataaacttcygcataatatacctcaaatccttcttgtggccaaaactgggcaggcatagggtgagacaataaggaatccagcagacagcaatggtaaagggctaaagagatggatagaaatttcaccagctccccgaaggtagaagatgaatttcagagttcaagtcccatcaagctagagaagcttgaaaaacacctcaagccttccatctaaacagagaaggccaygcattaggagtaagaaacaagtcataggatgaacggatatgccctgggactaaaataaaaaatgtagaaattagaccaacacgaaaaataatcttaaaatcaagtctcttcatgatcaaggtcatccatcagtaatttaactgcctgatttttaaaaaaatgtaattctcctcagaggaaaacaatgaaatcccaaatctctacaatgtattgatataatgtcccagaaacaatcaaaaattattagacaggcaagaaatggaaaaccctacaattactatggaaaaaagtaggcagtagaaaaagaagtcaataggtaaacacagaaataatgcaatctctgaaattaaaaatttattggattggtttaacagcagattggacactaaaaaagaaagaacaatttgaaaacacatcaatacaagctattgcaaactgaagtaaaagagaaaaagattgaagacatgttctgtgggacaatatcaagcaatctaaaatatatgtagttgagtctgaaaaaaaaacaaaagagagcacacatgttattggacgatatgatagctaaaatttttccagatagaatgaaaactagcaactcagtaaaccacaagagagataaacataaacaagctacagtaggaatacctttcttggtcttttgttccacatcaaaaagtgttctattttctgcaaattgatctacagattcaatacaatcacaatgaaaatgacaacaggcttttttgaggaaattgaaaaattataaaagtttgtgaaaatgcaaattaaagtagttaaaaataaaatatgaaaaagtagaacaaagttctactatagtaattaagtaaactatagtaattaagtaaactatagtaattaagatggtgtggaaatggagtaaggacagacaagtagaccaataaaacaaaatgagttcagaaacaggccctcacatacaacgtcaacagcttttttgcaaagatgccacgccaactgaataggtaaagtctttttcaatgaattttattgaaacaactagatatccatatgagcaaaaattgaaacatgacccctacctcatacacaaaaataatttgaagtgggtcatagatgtaaatataaaagggaaaattataaaccttctagaagaaaacatagaaggaaatctttgcaatcatgaggaagacaaaaatttcttatataagcctcatatagcaatcaccataaaagaaaatgttgataaattaggcatcatcaaaattactgtcaactactcattcaaggacattctcaagaaaatgaaatggaaacctacagcctgggagaaaatacttttgatacaggtatctgagaaagaactcttatccagaaaatacaaaatattcctacaaaagaacaaacaacccaagtatcaaaataagcaagtaacttaaacagacatttcacacacagaaaagagaaacaacagccaatgagcacaagaacaagatgcttacaatcatcatgcatcaggaaacatgaactgaaagcacaacgatatactgctgctcaattactagagtagttttaaagattagcaatacaacattgttgatgagaatcaagaactagtgctccttataaaatgctagcaagaatgtaaaatggtatgatcactttggaaaacagcttcttgtaaagttaaatatgtatctatgacccagaaatttcacttctaggtatttatgcaagtgaaatgaaaacatatgtttacaaaaagacttggaggaaaatgttcacatcagatttattcacagtagccaaaaattggaaacaatgcaaatgtctattaagaagagaatggattagaaattgtgccatatttacacaaggagtactactcagctctaaaatggaacaaaaaacttctgacacatgcaacaatatgactcaaaaacattataaaacagccactaaagtaggtatactgtttgatttcattaatatgaagcttaaatatagggaaaactaatattatatgatgatagggaccagaacaatgatttctaaagggaatggtggaggaagtgaccgaaaagataaaaagaactttctggcaaatgtaattgttctctatcttgatagaggtatacgttacacaggtgtatacaattgtcaaaattcattgaactgtgcagttaagatctgggcattttgctgcataaaaattttttaaaacacacaaagaggacaatggataactccgtctgaccagagaatcagaagttttagtaaaacaatggtacttgagcttaaccttagttatgaggatggtattactacatttctgtggtacctagggcagttagaaatcaaaatgagctaatttctgcaaaagtacttcagaaagtataaattcctctataaataaatgatgttttcttttatttatagtatcaactataaattttttaatatgaccatcaaaaattgttttctttctcgccttagcccaagccagtttaccctctctaatccataagctgtccacttcatgactagataactgtggcaggccatacagctacatggtatccctgccttaactcattccaatgttcagtcttgtgattaggtgaatgctaaattgtctccctgaaacccttcctgtatcctatcattcttcatccagatcaacaatcccaactgtttatataatcaaatctcaaatcctttccgaggctaacaaagccctctgaaatccagtctcaccttccctacctatacaaacatgtttcccattgttcctaaagtctatactattacagttaggtcagtctcttcattatgttccgaaaatctgctcattcatgctgcccactattcacttgaaatacttttctgacatctctttgcccatcaaaacacttaagaatcatctcaactctacattttctatgccacattcactgaataccactcagcctacatctcctctggctgccaccgtatctgtctccaaccattcacaggacaaactttccacagaagttgtctattctcactgactccatctcctcagctcctgttcactcaactcactcctatttagcttcttccctaccactccaccaagacagccaagtcaccaataacctctccctatcgccaagcccacaggatgcttttcactcatttcataacaattcagaagcgttggtaaccactcccctcttaaaagtctctcaatgcttggctttcacagaacaccattcacttgtttctctgaacattcctctagtttttttgcaggctcaccattctttaccaataagtatacattagagtgccttctttaccaataagtagacattagagtgcctaagtcctctcctttctttactcttatatgcttatctatgtccatagattcagtaactcatgattgtatatctccaaaccaaacctcttctgtaaactctcgatcttgatatccaaacttgacctcttttcttagctatcttaaatgtgcttcagtataacatgatcatgactttttactccttcaaattaggtactttcccactgtttcctgtcttagagaatggggccaccatccatacaattttatcagccagtaatctgggagccatcaatcaacatttatcccattaccctcrtatctaattaattaccaatcgcattacttttatctcctaaaactctttcaaatctctctagttctcttcatctccatgatcatcacccaactccarccctctatcatctctcccctagactactcaggtaactgtctgatttactcagaacctctgtgggagtccttcaatggattttttatactgaagccaaacgagttttttgtttgtttgtttgtttgtttgtttttcaaaaaactaaaattgtatcatgtttcctccctcctttaacatccttcttttggctctcataagacccaaatcctttccatggcccacaatgacttcaaagtctgcctagccttagttctcatcactctgacccttgcccacgatactcgcctacaatagcctcattgacttttcttatattcttgtaaaagccaagttctctcccagcataaggacttyttatttgccatcatctctgcctaaataccattcctttccctcctcaccttgtcaccttcatttatttagatcttaactcaattgacatgacctcagggaatcttkccctgactgctgatgaggttatatccctgttatataattttttgacatgatgtacctctccttcacagccattcacaagtgcagttttacacctatttgtgtcatgacttaattaatgtatatctggccaggcacggtgactcacacttgtaatcccagcactttgggaggcagaggcaggtggatcatgaggtcaggagatcgaggccagcctagccaacatggtgacaccccatctctcctaaaaatataaaattagccgggcataatgatgcacacctgtagtcccagctacccgggagactgaggcaggagaatagctggaacatgggaggtggaggttacagtgagccaagatcatgccactgaactacagcctgggcaacagagcaagactacatctcaaaaaaaaaaaaagaaaaaattaatgtttatctgcctattggattataagctctacagggatagagcccatgtaagtttttgctcacatttgatttctcattgcctagcacagtgcctgacacatagtaaatgctaatttaatggttgattatatgaataagccaatgaactaatacatttttgcagggttctctttttatataattggtattataaaatttattaaataatgtctttctaaatattccatatatgctaactttgtcttttcatataaatcacatattcctcaggattataaattatatgcctagtctgcatacaggaatttcaatataatcatccagacagaaaatcaataatgagacattggacttgaactacactttaaaccaaatggacctgacagatatagatatataaacattccacccaaagacagtaaaatacatattcttctcaagtacagaaagttgaagttctcaacacagaatattctgcaggatagatcaactcttaggccacaaagtaggtcttaacaaatttaagaaaattaaaatcatataaagtatcttttctgaccacaaagttataaagctacaaattaataatatgaagaattttagaaaatttacaaatatgtggaaattgaacaatatactcctaaggaaccaatgggtcaaggaagaaatttgaaagggaaatttaaaaatatcttgagacaggctgggcgtggttgctcatgcctgtgatcccagcactttgggaggctgagccaggcaaatcatgaggtcaggcattcaagaccagcctgcccaatatggtaaaaccctgtctctactaaaaaatacaaaaattagctgggcatggtggcacacgcctgtagttgcagctactcaggaggctgcggcaggagaatcacttgaacccgggaggtagaagttgcagtgaaccgagatcatgccactgcactccagcctgggcaatagagtgagactccatctcaaaaaatatatatatatatatcttgagacaaatgaaaacagaaccacaacataccaaaacttaagggaagcaataaaaatcgtttttagagggaagtttatagcaacaagtgcctacatgagaaaagaagaccctaaataatcaactaatattatagctcagtgaactagaaaaagaagaacaaactaagcccaaagttagtagaaggaaagaaataataaagatttgagcagaaataaatgaaacagagactagaaaaacaactttaaaaggtcagtgaaactacaagttggttttttgaaaagataagcaaaattgacaaacctttagctatactaaggaaagagagagaagactcaaaaaartcagaaatcaaagaggagacaatacaactgataccacagaaatacaaaggatcataactattatgaacaattaaaatccaacaaactgtctaatcttgaagaaataaatttctagacacatagagcctaccaagactaaatcatgaagaaaaagaaaatctgaatagaccaataacaaayaaggagattaatcactaacaaaaattctcccatcaaagaaaagcccagaacctgatactttcactgcttactaattcaatctttctcaaactcttccaaaaaattaaaaaggagagaaaactttcaaactcattttaggaggccagcattaccctgataccagacaaggaagctacgaaaatagaaaattatctgccaatatccctgaagaacatagatgcaaaaatcctcaataaaatattttcaaaccaaattcaacaacacatagaaggataattcaccatgatcaagtggtatttattcctgagatgcaaggattgttcaatatatgcaaatcaataaatatgatagaccacattagcagaatgaaggacaaaaactataatattgattcaatagatttagaaaaggcatttgaaaaattcaacattgtttcatgattaaaaactctcaacatattaggtttagaagtaatgtacctcaacacaataaaggccataacaagctctaacatcatactcaatgacaaaaagttgaaagtttttcctctaaaatcaggaacaagacaaggatcctgttcttaccacttctgttcaatttctagctgaaatcctagccagagcaactggaaagagaaaggaaataaagccttccaaataggaaataaagaggttaaattgactctgtttgcagacaatatgatcttatatgtagaaaaaaactaaagactcaaccaaaaaactgttagaactaataaacaagttcagtaaagttgtaggatatgaaatcaacatatgaaaaacagttctataacaacaagctatccaaataagcaatcaagaaaacaataccatytacaatagtaacaaaaaaaaaaaacagtacttaggaataaatttaaccaagaaggtgaaagatctatacactggaaattgcaaaacattgataaaagaaactgaggaagacacaaataaaaggaaatatatcctgtgttcatggactggaagaattaatattgttaaaacgtccatactacccaaagcaatccacagattcaatgtaattccaaccaaaaccccaaagacatgtttcacagaaayagaaaaaaaaaatcctaaagttcatctggaaccacaaaagaccccaatagccaaagtaattttgaacgaaaagaacaaagccagagtcattatactaccagatatcaaaatctactacaaarttatagtacaaaagcagcacggtactggcataaaaatagacacaaagacaaataaaacataatagagagcccagaaatcaagccacacatttataaaccattgattttcagcaaagataccaaaaacatacaatgaggaaagggcaatctcttcaatcaaggatgttgggaaaactggatatcccacatcagaagaataaaattagaygctcatctcacaccatatatacaaattaactcaaaatggattgaagacttcaacatcaaacctgaaactataaaactgctggaagaaaacatagaaggaaagctacaagacattggtctgagcaaagattttttgggtctgacttcaatagcacaggtaactaaagcagaaattaccaaatgaaattacatcaaactaaaaagctgtacagcaaaggaaacaatcaacagagtgaagagacaaccnatggagtaataaaatatatctacaaaccaaacatataaggggttaatatgcaaaatatataagaaactcaacttgatagtaagaaaacaaataaccagattaaaacatgggcaaaggatatgaatagacattcctcaaaagatgaaatgcaaagagctaacagttacatgaaagaaagcttaacatcactaatcatcagggaaatgcagattaaaaccacaataagatgttacctcatacctactggaatggctattatcaaaaagacaaaagataacagctgaccaagatgccaagaaatgggaactcttctacactgctggtaggaatataaattagtacaaccattatagaaaacagtatggaggttcctcaaaaaattaaaaatagaaccaccatatgattcagcgattccacgactcagtaaatatccaaaggaaattaaatcagcatgtcaaagagctatctgcatgctcatggttattgctccactatttacagtagctaagatatggaatcaacctaagtgccaatcaacagatgaataacgaaaatgtggtatatatgcctaatgaaatattatacagcctttaaaaagaaaggagcattgtcatttgtgacaacatggatgaacctggaggacattattttaagcgaaataagtyagacatagaaaaacaccatatgatcttacttacatgtgcaatgtaaaaaaagtcaaactcatagaaacagagaaaaatggtggctaccaaaggctgaagggtggggacattggggagatgttggtcaagggacaaaaatttcagttagacagaaggaataagtttgagtgatctactatatatcaggttaatgacagttgatagcaatatattgtatatttgaaaatctccaagggagattttaagtgttctcactgcaaaaaataaaagtgacaagtgaggtaatgaatatatgaaatagcttgacttagccattccacaatgtagacatatatcaaagcattatgtttcctagactatctttttaaaaacttcaagttggtttgaaaaaaaaaaaaaaactctgagttgttatgtctgattgactatgtgagcaaatactttagggtatactatacctggcaaatacttgaattgtccatattctatattattgattaaaatgtagatattttgaaaaatgrtattgaagagaaaggcaaagtcttattgtatactataaacatattcaatttttacttgttgattttttaaaaaatttttaagaaaagtattgcaatatagtaattatttattggttgaatgaattgctagtattctaggaaaaaggaccccacaggcttaaaaaagaaagactgtaaacattaagggccggctgatctaacaaatagtgtttttcaaactttttttattaaagctcatagtaagaaataatatttacatagtgactcaagtgtatatacatatgtgcagacatgtatatacacaatacacaattgaaaaaatttctcagactacatttactcactacatgagaggtactctacaatttctaacctatttcaattttggstgcattaatcaagacctgttaaatcaatttcatagcccaatgaaggggtgtaccttacaattttaaaagcatgctttaaacaactctgcaaaggctttacaaacctctctctctctctctctcttataaacagactagttttcaagacatttgttaggatttggatcattctaactatttcatatgaactctgccattaaaaacattaccctgcccccatcataccattttcaacagctctacaatgggaacgttcagactccagctcagcagggtccagctatcactacccatctgttaatatgttatttcacttacacttgagtaactctgtgtagtaacaaaattaataacaaaagcaaccattagtggactcctactctatgctaggtattgggcctgatgttgtacatgttatccctaatcaggaaaacttcatttcttccttyactgatcactcatcaggcaataagtcacagactcacaaagccgcrattcccaaggtcagaagtggcaactagaacacatgttccttaaattctaattcttggctgaaataattgcaaatttaaactcttcctaagtagtctaggaaattctgtctcttttttttgctttagatggaaaagtaggaagactaggaaggaaggaaaagtcctaaagcaactcactgcagggagaactaactcttcctgttagactggaagcagagttgtttagggagaagaacacagaagttagaatcaaaagtaggtaattaagactttgcttttctcttcaatcccatttttcaaaatatctacattttaaccaataatatagaatatggacaattcacatatttgccaggtatatcctaaagtatttgctcacatagtcaattagacctcagacctaacaactcaaagagtgtttttcaaaccaacttaaagtttttaaaaakgtagtctaggaaatatgctctccattcatctttatacttgaagtttaagtccagtaattgagaccatcaaagagttaagwaattggactgtgctcaccagaccttacctcgaggccttaataattgcattttaactatatgcactctgagtttatggaggacaaacatgaaaactgcttttaccatttctgaacgttttataaaaccgtagttgagtaaagcagacatggtgctaagtctactttatatgagatgttatcaagtggtaaacatttctaacaatcaatataccacaaggatccctgacccaaatattctcccttctccgtaccaccaagtaagtttctgcaaaaaagctggtgagttycaattaggctactggttgcctgatatacaaactggtgacagtaatacccaccattctggatagttacggagactaaataaagtaagcagtctttataaactattaaagcaaaaagcatttataagctattactattatgtacaagattaagttactgagttgtatatgcagaggtatcttggtgtgtttgtggcgggggggatgtatgtatgtatgtatgtaagagaagaacctagaaaaaataaactgttaaatgttgacctgcaaaccaaaacctataaaattgtatttatcactaagaactaaactacagaataaaatacttgagaaaaatgagaagaagagagggagacagattttttaattaaggctaaattagatagaaattgctgaatattaacaatccagaggtttctttttgaaatttctctattcattgaaacactctctatgtatatgaaatattcatataactgttgcatttccctgtagtcatgaaaattcttattacaacaaatgaaaaatatattattaataaatattaagaacagaatagcaaattaattaaaattgcttcccagaaaattttaatttcttttagctttaaaacatgttgaggaaaagaaatctgattacagaggaataacttccttgaaaacaaatgagttacaaatctagaaagtaagagggtttagaagttttggaaaagtgatgcctttaaagaaattgcccagaatttcagtgaccatcacccattcttatcaaccaatcttgacagggaaaccagttctggtttgtcctcacagctcttaaaggaccttgagccatgaattctggaaaattgaactttccttgagatccagattgtttcattccttaaagatgtttacaaacattccatctccaaagggatcagacacacaatatggtcctgaatgaggtgcctaagaaccagggcattatccccaccaggaggcaaggatttcagaagctgtaatttcacaagtcagcagattctggaatgcatccacaaggggctaagacttgaaaacaactcattatattcattcaagactatgcagtatcctatcagaggagaacataaaataaaacaagcactttttcttcaagggttagaaggttaaaaacgaatcaaagacccttaattccaaatggtcccctagagattattaccagtgtttctcaatcttgactgcacagytgagtggagtgaaagttgagggagattggagggggccacctaggagttattcatccccgtccccaaatgccaaagattctgttttaattggtcttgagtagaacccaggcatcaatacttattgttaagtctttcaggtagttttaatgtgcagccagggtggagaagcactaatctagagcaataattcctaaatgctggcagctgcaatagaatcttgtcaccagtgtcaaaaatagagattgttaaattctaatgcagatgctctgaaytgactccctcagaggtgaatrtaaaaatacagacatagaggtaagtctcatgctcagccaagtctggcacactttgatccagtgccttgctactcaaagtatgggccagcatcacctgggagtttattggcaatgcagaacctgggacgcaccccagaccttctgagttagaacctgcattttaacaagatcctcaggtgaccccaaaatgcacccatcttctgcttttcctttcttttagggatgggaaaacagaccaggaaaattaaagactcatccaatataggaaaagagtatctagtagggggaaaagagtatctagtaggggaaaaagacaggaccaggcctccctgtctaagactttctattctgtcagactatatttctgaactgctaagtttttgttttattttgttttaatataaggaggcacttcctctttatagagcaatttattcagacaacaggaaaataactacacttaggttaatactactacatattaattcctaaaggagwtcatacacaaatcatgggatcaataatcctggctgataaaaaattctggacaaaggaaggttatattcagtcaataaaggcaatataagagcatgtgggatgtttcctccctttctatagcaattccaggagaaaaaaaatgatttcctcgagctgctccaacatgatcggactggtttttgttttgtttttatgaaaatcatatccttctcggatccagaaatctcatgtacattaacaagggtggtggggaggggaaggaaatgggagaaatcaaaggatacaagctggcagttatgtaggataaataagtctagggatctaatgcacaacatgaggactacagttactaatattgtacttactaatattgtattgtatgttgaaaatttgctaagagagattttagctcttaccacacacatacaaaagggtaaatatggaagatgatgaataggttaatttgctggactgtataatcatttcactatttatatgtatataaaaacaatgttacaggccttatatatatacaatttttaagacgtgtagaaaaaaagggtggaacagctttttaggrggttaagsctctggctccctctcctttttaccttttttatgcaaattacccccagagagaaatatttcagaggactagcagtttttaagtattttaagtaataataataagacacacaaattttagagtactgaggaacaaagaaaatggagaggagttgagaagaaaaaggacttcacaaaaaaaaaaaaaaaactttcactaatttatagatttgccaagatccaggacggcatgtgaagaaagtcagctgcgttttccctctgactgtattcatgtagttctaactttggagaaggacaccacccagaaaccacagctctcgctctcaaagccctcaaaccccggaacacacagctcttccaacagaaacgaagtgcaggcaagactacaaacccagataagggctatttcaagctgctcttccagatcactggggcttcagtgaggaagaatcagtgcaggcagtcgcagcttcaagtatcgacccacccttcacagtgctcccattcaaagaacacacattccaaaaatcgatgcctatgaaggaaaatctgaagcaaaagtgacccattaaaaccatgtagcaatcactaactttttctaaaaggagttggctgcagaggccttttcaacaatgcttattgtcaaatatttattataaagttaggtttagtttggggtttgggttttaytcaaaagtttacttagtttcttatccaaatcagtttcttatcaaaatctgaaactacatgtttctaatccacaagaatgaccagactgtccaagctaattacccggatcttttctgaactctgcaaatggaatgcagaaatcacatctgtacacacttatattgagctaagctgtctttggctgcattattcttttcttcaagggaatgaaaagggagctagatgacagcgatgatgcagatggtctttagagtttcattccaagcgtggccttcttccagtttttcccatctcaaggatatcttccctacctccatctgcacgcaaatgcttgggccaaaaccttgggagtcatccttcacacctcatccatgtcatccaatccattactagatcctaataatkctaccaacaaaacatatctgatacatccatttctccccatttccactactaccatcccaggccagaccaccatcatatcttgcgtcgactacygcaagaccagacctaactggtctcccactctttctcctcctcccctcaacctttacggaagtagcttttgggactatgaggtttttccactgcactaggaataaaacacaaaatctttcccctgaacagccaggcccctaactgtcactcgcccttatctcctgtctttcttctggtttcacccaaggcaatctagctgcgctagtgtttaagcttcacaaacttagccattcattttctttttctccttaggaatgttcacatgctttctctttgcctgaaatattcttcttcccacttatcctcttgttacctctcactgtaggtatcaatttaacactacttctttagaaaggcctcccaattggaattagatcccaatgcacacgatcatcaaaccctccccttttcatccaaaatgcttaccacaatttgtaattatatatttgatgtaggcttggtgaacgcctgcctcccctaccagactctgagttccatgaggtcaggggccrtgtctatttgttcattactgtacactcacaaatgttttatgaatatatcaaataaaaaattctgcttcctatttaaagtcatacagtcagtcaataaatagttataaagcaattcttagacattgttaagaaggtagataaggaccatggcaggtatttttttttttcaakgaattggcaataagttaaagaaaaaaaaggagggggtgggtgttgctaagcagatattcccccgctttgaatggcctctagaaacttgtgaatttaaatcatgcagtctgtattatttttgtttgtttgttttttgctttgagacagaatcttgctctgtcaccaggttggagtgcagtggcgcaatctcagttcactgcaatctccaccttctgggttcaagtgattcccctgcctcagcctccggagtagctgggactacaggcatgcaccaccaaacccrgctaattttttgtattttagtagaggcggggttttaccatgttggtcaggctggtctcgatctcctgacctcgtgatccgcctgcctcggccttccaaagtgctgggattacaggtatgagccacggcacccagcctgtattattttttaaatgtgtcttctggatgaatgatacctatagatctatttaagtttcatagaacagtaatagtggaaaaatctgaagcatatatagcaattgtatttgggttaaataaaatcttggtacagatggctaaacaaaagcacaatcatgcccacatccacaatgttgatttgttgtatgtgcactgcccatttctatgtcaatgacagaatgtaaggctggtctccttcatgttcttacaaaatacacctgtatcctacaacaatcctctagcaatatagcaaatgtgcagacatacttcgtaccttccacaatgacactaattattacccaataatattggcaacattaagcagaccatcactgyaggagtttgaaatatgcaaaaatatctgttaatttattcaaacttgttcaggtgtcatgaaagataaaaatatgcttccactttctatctccttcacgatcaaaggkacattttttaagtgtctgtgtttctttgatggcattaacttcattttttcatccagctacagtggttcaaaatgcatgagatactttaacatatatttctgaaattctagtggtaggaataatagcaactttgctattaaaaaagatttctccacaaaatgtttaacaattcaatgtttctacttttaatagttggtgttttgttcatgaaaaaatgagtttctaaaatgtaaactggtcagaatcattagaagcaaaatataattgcaataatggcctatttgatgcataacatcataatacaacagaaaactttcaccctgatataatgataacattttactaaattatattgcaatgaaatttcttaaaatacctgaagctataagacttatgctagttacataatcttggggaataaaagctaaatcagtcaagatgtatttataagaggaaaaaagtatatatttaatgtttaagcatcattttaaatcctacaaataaagatttttgcaaatggactgcatcttttctgaggagattatatattttctttgaagttaccctttaatggcaattaaacactaatggcaagataaatgatgaaaaacttcaattaaaaagctggtccaacctgcacacatgatagaaaaacacaaagaggcttttctgaatgcattcacaatccagttaattttctaaggctttctcctgtatgtttttaaatttctacactctatgtaacaggagctaattgttcaagaaagagttacagagctacaaattcaattcatttctcctttggcaggatttcactaggatggttataagaagaggctgatgtttctgctttattcctcagtttgtccaagaattatcaggtattgaagtaagcagaactgatacttcttttgctctaggcagtaggtttttgtttggggygaggatggacagaggtgtgttgtttgtttgggtttagtattctctccaaggtaagcccttagtaaattgaactcaaatgcttttaagctcagatccaccagtttctgctgggaaattctcaactacttaatttcttgctttcttcaggttaaaaaaaatctcccctaccttaccttatctagrgtaagtccttactgagatgatccactacatctggggcttcaccaaatcttctgagcaaccctgtaaggtaggtgtcctaattctggagagcctcagtgtgtcaccaggagtaagggctagacaggagtctgtgttgtcaagaactcaacacctttgctctttccatcccagcactgtgcctgatagcacagttgagagcactgctctgtgagccttggaaatgccctcatagagttccagaaagattaccagttaccttgatgatgtttgctctagtacagacagaagctgttttaggaacgagcaaggggaatatgtcacncatgtcattcctccctcttggagacctttagtttctgaggtcagttaatgaggcagctctttccttctgacctgtagttctttctttggtccatcacagttagagacactggctgtatatgatgtcagttatgaacatgcttcatgtcttaagatgagtcagtatagtaaatgggcatgaattaacttactctgcacacagcacttacaggagacacaaaagaaagctaaggactgataatctagttggaaagtaagactaacattatactgaatggaaagtcaaagatgaccctaacacttctagagtaaaaaacaaaaatactaaagacactttgaatagaaacgggagatacaaaaaaaaaaaagtcaatctgagrccaaaagcaaataaattctattctgcctacactgagttttagatgacttttgagtagtacaagaagagaaatcctgtatacctttggaaatacagacctggggcacagagaagataaagtttaaattatggcagaagacaaactttccctgaaaagtaggatggagatgcaagaaagaaagttgaagggagaacttgtgggactactcaactcattctttaggaaggaaaaggagaggagggaggaggagaggaacaaaaagggaagccagtagaaagggcagcagggcttgtaagctcatgatagctataagatgaatggtggagagggtaggggaatatagtttcaaaccttgcaaagtcagaaaaaatatggaccaagaaaagatcttaagatttacgagaagaatgcgcactcataattttctaggaattttcagcattatggaggaggcggaaattagttgaaaagaggtgcagaaggaaatggtgactaagaattaaaaacatcaactatagaaagtgcattcaaatatttaaacaactaaatgataataataactactggcatgatataatgcttatttatgtgccaggcaccgttctccrtacttacatgtactgcctaacttaatcctcactctaaccccataaactaggtactattattacttgtattttatagataaggaaactaggtacaagtaagttaagtcaccgagctagtaagtrtcagagccaggactctaatacaggcctctagaaacttataaatatgcacatgccctccacagaaaaacaggagaaacattgtttttgtcactgtgttcattatgaatccctagtgctagatccctgcctagcacatagtaggtactcaataaaatggtgttgcattaatggataattaactagaaagggcatgagagccaagcaaaaggatcagcgttgtatttcggagtctttattctgagactctttaacccccattgaggaactcctctattttttcaatgcttgtaaatgtataaaaataaamtcattgtgctttaattttcccccaaatttaaaaaataaaaataaatgccagcagaccaaaaagggcttacagaaaagatcaggacaaaggttaacttttcccctcaatccaagtgagttgttcgatttttagttagatatggcaacctgaggctggccctgcagtctctaaaaatctaaaactcattttcctcttctgctgcatactgcacagggctgtaagctgctccccaaggcaaaactcactcagaaggtacttaagcaggtaaggattgattcccagggataaaactcaccatcaataactgctaactgcaaagttgttaaaataatttagttagaatctacaaatttttaagcagttctttctggtattaaatagtccagctttcaagctcttgacaactgaaacaaaaatggtagaaaatatttcagccgcacctcaatttggaataggaagtgaacatgggatccatttcatattcctttctcatcctctcagaagtaccatctgatttgccctatgcagtgtggtttctgttttcagatatatgcattgattaactaaatagtttaaactatgtaattacttattcaagctcacttaatagatttaatcagcattggcttggggaaagaattaattatggtcttggttactttaggagacaaaaatcaaaaaagcatttattcaacgaatacttactgctatgtgctctgcacagtggaggacataaaagtctttttaagatatgacccatatcctcagggagcttagttcatataccaaaattttcatgacttcccaattatatgtccttatatctacaagctgttatgattatgcacataagctcagatctcaaattgcgtatcttttgagatccatatgactttgtacttaatagttatatttctgtaatgggaccagacccaaagagagagggaaatctattttcaataaaatttccaatagctttctaaccacactttctttctaaattactgtgctcattaattttcctcttttttcttttgtcaacctaatatatcacaaaactactatctagaatgtatataaatatgtctctttactaggtaatagtatccacatataaccaaacactaaaatgatgtctaaaatacacactgatctatgtgacaatagttattactgcctccatttgatcaaatatatttcaagactcagcctttctaatatattagtttctatattatataaaataggaatatttaaatgattctttttaattatctttaaatgatgaaaaggactcatgtcatgtattataaagctagactatttagtggaaaatgctgaggatttttttacattctgctttgctattggtaaaggaatttgtttcataaatgtccattttctagaatactttctagaacactactttctttgacctcaatttccacaacaataattgccactggttttggattgtgakttgttatccatgtttatctgattcacaacacgtctcttgtatttataaaagtactttaagacatgtttcaatttttcccattaaaaccaaaattgtgtggaacatttcaaagtatctcttgctatatggtttctaacccaccaaaaagaaaaaagaattgccttaaaccaaaattcagatttactgactaagaggaaacaaaacctcttaaaacagtctactcccaatcctgtcttttggagtttaataatttaaaaaactttgaaaatattatttaataattttaaacaatttagctctgtatttaatttttaaaatttgggtaaaaataaaatactaggattacataacatcctgaggaagtaactataaatctgtaaactatcttttgataaaattaaagcactgttatgaactgattctacttcaccaattcaatataaattatataaagatgtctcatagagaaaaaatctgttgaagtggctcaatatgaagcattatgtacaggtcatttttctgcaagactttatatttcatatactgtatgtatatgaaatgctgaaattgcgtattaccataaaattttatctgctaaagaaaatgctctattagtctaaaatgtatttaaatccatctctttacagaaacaatttttatcagtatcactttcgtgtagttataaaatgttgatcactgtcaactaaaataaattctaataattaatataatacataccttttttcatttaactttcctgcatgtcttacattttagatattttcttccaagagcaccaactaactacattgactccctcccagtcaaatttggggggtggcaagcaaggtgggggaagggggaggtgggagaacaraaaaagagaaaaatattaactacttggttcacctgtgacagaacccagagtgacctcttgtggtaaatactaactacagtactttggtgaacagcacaaccttttcctaggctacactctggagaatgcagaagcattgttcctccaagctaagaaactcggctgtgactcacaaggaaagaaaaagataaacactgactaaactaaagggcttctttaggaaatctactcagtcgctatcaattaaaataatcataactacgcccttctattaaaaataatgtttatatgatccttttagtaagtcagttacaaggtgcctaggtagatggatgtcttacacatcctacttctggaatcaagcaaaagataaacaaagagggcaatttctagtgaagataacagtatcttagaataagcatccctctatcagcaatgtgctgcattcattatataacacagtgtgggaatctaatgcaagggacaatcttgtggcttatgtataaatataatttaggaagtggtcagtataatttcaacctctttgatattttaaatgttaaagtggtacattataagacctgagtaaaccagtgcttcaaaaacactgtgtggttttatcagtatttcctgaatagtgtcttagatattaaagaaaacctttcaagaaaaaatgtcaataactttataacaacaacaaccaaaataatgtccatttgttttccattatttcttttaaattggctaattgtaaaagttattattccttttttgttttgtttacagatcactagttctgcttcctctcttataggtttcttttaagacctcagtttgtacaaatgtcaattcagcatgaaaataattttggacttttctacaagtaagagatagctgagtaaaaaaagtgcttgtgcaaccagctatctcaagcagaatgaaaaattgaggatactgagtttcttctcttgaaaggtaagtggttcataaaatactaccttctctgttttcttctttcctgaaccccttttttccccaaaaagaaaaacacttctagttttccacaaaactaaaataaacttccaatttgtcataaagcttaaaatattaaataataataatttctagttaaaaggtattaatttgtagttaaaattttcaaaatagcaacctagcttactgtcactcaaactaatcatgtctgcctatttgctaaggaattgaagacaacatatgagtaaaatgtgctgcccaaagacaaaatcaggttgaaggtctttgaaatattttttgtcttttgaatctaaattttaacctaaaagtcctaaaaacagttacyttcttccagatacttaacctctacccacaagtttattgctccctagagcccaatttagattaatagtttgcataaataattgaaatttaaataaaggaaggtatcctaataatgttctagacacaaatctagtctgtaagcccttgaggcaggggccttctgggagacattgctcagctgtaatgaactcaccacatagtcctctaaaccttcccttactaatggcttattttgatcgtactagccaaaagtttgtctaagccgtcctatagcatttatactttaaactttacaacttcttagagtaataatgttctctatatttactagaatcacatgctaagaattattataattccttttgtctagaaatgatcttatcttttatctttaaactaaaaagaattccttgcttcttttgagatttggctataaagkgtgtgtgtatccatcctactcaatggccctcattattttattttatagactttgaatcaccagtaacaacttgcaatgctcgcttataacagactgagtcaactaaataaggaaaataaaaatccagtctcaagaggtgtgaaataatagcataggttatagttgccactctggagtacagaatacagtgctggtattctgggaaactgcatctgaggagtttggaactttattaagaaatcctcaggtataaaattgatattcaaatatgccacacttcttgcttttttgtttcacatcatcaaaaaaatgttctggtaaatttgtaactggctgagatttcagttcattggtgatacccatggacaaataaatgtctgacattttctctttgtgtccatttcccttgcatgtcccataatctctctctctctctctcccaccccacccctttctctctgctctgtgtgttttgttttgttttgtttcctacatctctgttttgctccttgtgtgcaagacagagaaaaagagttagattgcttcctctctgtctgtagggtggtggacacactttacagacaaatcctaaaaaagaagaagtaggatattcctcttttcagttttctgggtggatgcctgaccagctgagtgtttacctatgtgactgtgtattatctgggtatctctctatatctatgtctatgtttggctgactctcactgtaagatctgaccttttcataagaagaaaatgrtattgtatcagaaagagcttttcttggggttcaggtaaaaagacaaggccagcctctgtttcttcaattgttaaatagattgggagtgctgggtgctattctttctcttcctgctaaacctctgccaacacttcactttcaatgttgttaagttagtgaataatgaaaccttcaaagtgacaaacctgatccatctgtgagaatcctgaagggaattttctattagtctcaattaaacaatttctcaggataaatttttctatttctctgccaaatcatatagaaatgacaactgcgggatattcccccgtgaatgtgtagaccaatttaataccataattctcaatttctgaggttctgcctataaaagaggtactgagacttttcagtatttatcacacacacctgcatatatactcactacaactatctaacacacttcaaacagttcagggtctttgagtagtggtattcaaagttagccataggcrattagaggtggcatttaagtgccaaaacagataaattttcattttcacttggtattgtccaggaaagaaacatttaaccaatgaaacgattatgaacatgaagtgtaaaaaagataaaatactcattaatttgagtggtagatacaaaatggaggcaacagaaacagacatttctaagccacctaaggtaaatctttatttcatagtatatctacaatttttaaaaattcaaaaaactatctcatagtttcatagtctgcataagaagcttcaaccacagttgctatattaataaagtttagtcaagggattctcatgttctttctctttataaagcagagcaatcgtaaccctgcagattttatgttttaaggccttctctgaaaagttctctcatagaccaaattgcgtgaagttgaaataacccaagaggatgagaaagctgaaagaagacttgtatacttaactaattccaataatccacacattttccccaaactgttttaagagtaatatccccttgtattataggtttagtataatcttaatacaagaaggtaatctataagaataaaaattgcctaccattatgaatttatataactaaaaaatatacaggtatttaaaagaatattaggccagaccctattcrctattttttccgacccaaatacaacactactgctttagacttttattgtttcaggcattggccaaaacgaagaaataaagtttaaaacctcaaattaaaaacaaataacaagtcagatatttggggaaaatactttgaaacacttaaatacagttagtctcaaaatcagaggaaatatttacaagcctagtcttaaaagagattctaatctaagaattagtataatctaatctaccatttagggaaagcattatttatttaattatttgatatttcagtgtacctctgtctttccctgtgcctccaactaggcaaggagcctcttaagaagaggggatgtgtattaattacttttttttaatcccaagaaaccacagagtatctgtggtataaggcacccaaataaatattgtttcaatgaatgaataaacaaggcactatggaactgcatagagtatttccattgctttgttccaagctctactgtactccatatacagaaatgtctttctcattattctccaagcaagagatgtcaaaataacagcctctgaaggaaaaacttaaaaagatattcaacatatcttacttatgaagtttaaaattatacaaaagaattaaaaacaagtagaaaacgcagatttcagtaagatgcaaagtttataaggtcttaaaatgtggaaatatataaccattcccatccaaaatatcttgtaggaaatgaatgtataaatggatggtattttaaagacacactaaggcaagaaaactttaacgccagtagcaaggtaggatggcatctttttgatttttttctagttgcattaaaagcacaatagttactgcttcacttctacgtttctcatgtttaagtcaaacgaaatatatagatgaatgtacagtgaaaaacatagcaagaagaaacttgaagcaccaatttgtccacagtaattggcttcccattttgcaagcactgaactctttcttaggttcaacctcaactactctccccggcacaaagcacctttcccngtgaccacgagggccaaaagcctttccagagatttaaatcttgttaagtagccactttcgcagccattcccaacttgagggaaacctttccactgagattaactcagaatttggtcagtccctgctgctcactttggggaaaaatgtgggagaaggaagaacaagaaagataaaagcaaaactcaactctatgttccagatgtacctacaccctatccaacccctttctttcctccagttctgggctctggacaggtgggagggggtgagtctgtctggtaggaaggggatgcaactaactttcccccaccatctcattgccaccccaccccaccccaaatccagcccaactggtaaatgaaaccaccaggtaaggctgcctgcatcctcctccccccttgggagagggatgggatggggaggatggggggcgcgtgtgggcgggatggaggtgggggtgttctgaactacaactctccttaccactggagcgcctgacgatgttctccaaaaatgtgttctgcggtgccaccagccctctcttgccccccggcatcctgggtctggagagcagcggccaggatccgcggcgggggagggggggatgcaggcaaagaaggtggaggaagaggaggaaaaggtggaagagaagattgagccgaaagaagagggggcgcggcggcggcgacggggtcccctgactgtgtctccagcccgacccggatgagcagctctggggaggaggaccaggcagttcatggtagtagcgctcccccggccgccgctgcccagactgtggcggtgccgcacacggggctcgggaactgcaggctccgcggggcacagtgcgcctgcgccgcccccgctgtcgctgtcccgccggtgctgatgctgaggctgctgctgaggctgctaccgcggcggccggcgcctgggcgcgggctctgcatctctccccctgctggggagcgcaagcgggaactcaagcccccaccctcccaatccccctcagctcagaccgagaccccttccccgcgccttcgtctcccggtctcctcgtccaccccctcgcgcagcgagctccgggctgaacagcgtagcccaacttctgggctgtgcgcctggtggttgctcctctccccggagatcgaggcaagcgatcgctgtccaatcgggccggtggaatgggagaagagggtgccagagagagcagtggccagtcggaggctcacatctcggcgtctcccgctcgggtcccgaatccgggctgctggcgcggacgcggctcccggggcggaggtgcgggcaggctccagctccagccccagccgaggctgagagcagggcagggactggctgggcggcgcgcggggacgcagagcagccacctgacgctgctaccgcccccctccgggctccggcgcctgaaaccttcctgaacactggcgctttccgcaccgcccttaccccaccccggagcgggagcgcgagccctgaagtccgagcgcacagccggcgcccggaatggcccctgcgacccgggccgggcttggcgtctgggggagcgtgcggccgcccaggggagtttcccccaggaccgctgagcgcaggaggcgatccgcgagcccgccaccgctgcaaagttgcgggaaaggttgcacttgatgtgaagagtaggggaagagggtgaataattcacacccgagagagggggagtgaggagggcagtgttagcgatggaaaaacggtaaaggctgtgggggcgaagatgcgccagggtggggcagggcacgaatcacctctaacaaaccccccaatttccaggcgttgagaacggacagcagcggcaccgttacaaacagtccaaaagcctgaatgtgtcacagagaaaggaaaatggcataaatgcgaaaggggtggagagagatggaaaggaaagaggagcccgcactgaggcaccttccttgatctaaggcagtggttctcaaagtggcctggacgggcagcatccgcatctgcaccacctaagaacttgtttataatgcaaattagtggattctaccccagagttagggaaccaggaactctgaggattgggttgactcatctgtttaaacaagccctccaggtaaatatgatacatgtaaggcttcctcttttctctgggggctgcacctgggcctgtcgagaaaggacgattgtgcaaacagggtcaaagagtgggggaccaaaagtgcactgccgcggcgtcagcggttggtggtagagcgaagtcttcagtgttgaaggcgaaaagatagttggatgggtgcgtccccttttgctggggtcagaatgtgctagaggagaggtaattgcgttagaaattatcaaggtcagattaccagaagcagggagaatccccaggcaggggtggaagtacacatctcagcacctgtccccttttggaaccccctagattactaatcactgacctcaagacaggatctctctctctctgtctgtctctgtctctctctctctccctccttgcctcccctcccctcccctcccctcccctcccctccctctctctctccccttctctctcccctttctctctcttcccacctctctctctccccccacctctctctccctttctctcctctccccaactgggtaagcctactgcttgaagcagctaaatgcaaaaccaggatccagcctttaccttggggtcattttttccctctctgaaattttcagagaccaggcagctgagcaaacccagaaggttgacacgaggcaattttattccgctaaaaatctttatgcaaaaaaaaaaaaaaaaaaatcaagagactcggtggaataacactaggctattctagctttccacaggaagtgctgctggccatggagcttatccccttacagttaaaatgtcttttaaatacatcaggtgtgtttagttaaataacaagagactcaggtgcagattggatccgtagtgagcttgccacagcagcactcaagagatacggccaggttacaactccctccctgcagttggtgggaagaactgaaaccaccatcaccacagcagccttaaacacataattgaatttcccactctagcgattcttttgtgacctgtgttcaaatgatcctaaactaatcagtcattcattggctgggttggtgaatagacagacttattttttaaacatgtataattcattgattgctattctagacttctagcatgctataataattccatcatcattaacagagaatatttcaaatctatatgttcttttgcacatcgtcagctgcccacatctcgcctatgggtattgatttaaaatctcaggttctcagcatttcccatctagtatatatattcttgttcctaatcattcctctgtgggtgtattaactcacatttcccaaagaggaaattcttttggactccattaagacacaatcacaaaattactggtagaactttcttattcccatctgcagattcaattaaatgacatttatcctttcttctttgtttctaataactccatagcattataacgtttggattattttaatgatcataaaaaatgtagctgtgtagtgtcaaaaggttacacacttttcttaatcttctagtttaaattttcattttataaaggaagaaaccaagacccagagagatgaaatatcctgtcccagatgacacagtgctttagaacagtctgcactgagactaaaatcaggtctcctgaccctgtagccagagctccttgtaaataatagaaaataacctaatcttaggctagtgtggtaacaaccagcaacatcaaggatctctattgccatcgatgattttgcagcccatgaaagaagagaaacccttggcaacaacttgcaactgttcccaatcaaaatagagtcaaggaaaatagagtagcagcatcatatagattgactggccctaaggaatatgctggccagttgcaacaaggtgctaatacagcattttaaaagtgtgttacagactccgtatgtggggaacaaacctcaagatttaacagatgagagagataggaattagaaagcttcaatgtcacacaaagacaaagcttcgttttgttatattgtcaaaagtccattttaaaacagaatcatttgttcttttcttctgtccctccaggtatggtaattagaccttgtctgtgataaccaagaattccaatccccagaagtgttcactgactcctaaatcacagcagaatggaagctggctgagtgaactgcaggtgtgttctagtctaaccgaaaccaatataaacgagaaggcttagaaaactgatgtaggaagtgatgatttggaattactactgattcactgaaggactcttttatcaaatacccctcctctgaagattttctaatatagtttacttgacagtagctgtaattatatgtaaattttcaaaaatgcattacaaataggtacagttggacttactctttgatcccttttgtgcaaatgatccaagcactactttctcgggaaatttttatcctgtttcctgctttctgtttctgagcaaacctcagtacagctccaagttacaacctgtatgtagatgctaaatgggtggctctgatggagggatgggaagaaggaaaaaaggaaaggggcaaaagtgattccctatcatggcctccaaggttggcctcactagcagcagcatcactccattccatttttaactccctaaacttcactgcgtgcctttccacaaagccctatcccagctctagcagtgaagcatacaaacatcactaaatttctttgcatgcaccaaatctcacatttacacccatatcttctacctttcctcctttctgctccccccaactcaggatcgaagttgagagaaagcagactagagagacctagtgcttggactgtggacccagactacctagaatttaatcttgcctctcccacttactagctatatgacccagggcaggttatttaagcacaacatccctttctataaaatggggataataattacctatttaatagtgctgatatggagattaagttagttcctacttgaaagcaatgcagacaatatctgacaggtaataagcactatgtaagtgtttgaaagtaaatacatgagccttttcctccccttcaactttcatttacagtgaaggctctagatagtggtcactactaaggttcaccaatatccagttgccttttcctgctccttgaaatcagtgtggctatgcaactaatgctggtcaatgaaataggaatggagggaaagggtgttacttccaagtgagcatctaagaaccaggacttattttctcatcttcctcttcccctgcctcagtgactagggaatgccaagaaatacaaggagaacacctgcccaaaagtgttacctagacctcagtagacattatataagcaggaaataaacctttgttgtgtcaagatactgacaatccagcactatttgttactgtgccataacctagtctatctatcctggctggtacaggttattaacttgctttgggaacaggagatcagaggaacaataattctccatcctgactgcacattacagtcacctggagactttgtaagaatcccaaagccacagcccagaccaagtaaatcaaaattccaaaggatgagacacaggcattactatttttttttaaagttccccaggtgatttctttttttcttcttctttttttttttttaaatggagtcttgttctgtcaccaggctggagtgcagtggtgcaatctcggctcactgcaacttccgcctcttgggttcaagcaattctcctgcctcagcctcccaagtagctgggactataggtgcccaccaccaaacccagctaatttttgtatttttagtacaattggggtttcaccatgttggccaggatggtcttgatctcttgacctcatgatcagcccgcctcggcctcccaaagtgctggcattacaggcatgagccactgcacgcggccgtgatttctatatgtatcaaggtttagaaccactgacctagaacaaggctgcatcctatgggaatctctggggtttcaatactgtatgaaaatcctcagctcccaaggatcataccttcagtttcacctctcccacaaaggctctattacatgcagctgtgagtttctgtgtacttgtatctgctgagcagcccagaagagaaccacaaaacctcccagactaatgcaccataaattgaaggcctcctaactcaacttgaccttctcaatacagcccaatccttctgtacatcctgatcagctgcattttccattatctgctgtagctttctcaaagcatcttgtctcttttcacacctcagtcatcactttttcacctcccagtctcagaagatcactcgtagaaaacaggtcatgatgtcaattcttagacttcctgccattgctctctcttccttttcttctttcttccaaacaaatagaaagcaa

SEQ ID NO: 97684 - DNA, 22778 bp, Homo sapiens
gtgtatcaggttctgtgctgaacattactaaaattaagtggaaagtaaggaaagattagtattatacagaagaatgttgctttatggggggaaaatagtttctaaatggaatttatcatatggtaaaatttaggatatctgggtatcattataaaagctgagatttattctagaaaagttagagaaatgaacatttgtctgtaatgacgatttctgtggttagatgaatatagtccatacctaattaggagcttgataatgggatggataatacaatcataggctattcatagactcattctaatgattctgtgattcagtagaatcattagaacagaggaacctcagaagttgatgagcagtcagatggtcagaaccatttgttcaaatcctatagaaaaggtcactctgtgttttagtttttttgtgctgctgtaacaaaatacctcagactgggtaatttacaaagaacagaaattcattttcttacagttctggaggccgagagtccaagatcaaggggctagcaggtttagttgtctggtgagggctgctttctgcttttaagatggcttcttgaatgccgtgtcctcacagagcagaagggcaagaaggcacaaactgcctctgtcaagccctttaataaagacatctaattgaattgatgagggctctgttcccatgacttatcaccctctgaaagccccacctcataatacttttaaattgccagttaagtttcaacatgaattttggacagataaaaattctgtgatacaaaagaaggaaggctgcttctcctgcctgattctcaaggtgttccctccagctcccaggcccttcgggcagagtttcaaaacaactgtctggacgaacccttgctttttatcggcaaggacaccaaggccacggggatgacatgacttgctcaaggtcttacaaccagttagaggaagaggtagggtgggaacccgggttgtccctctttcctgtccccaccagcccatgctgcctccccaggactgtggcacatgtgggtgaagagcacactctgcagtcagactacgggagttcaagtcctggatcctggacactgcttgccgtgatttagctttctctgccaaaatgtgggaggcaatactggtagctaccacagaggcttatggtgataattagaggaaatgacatgtgcaacacacgcagcccagtgcctggcaaatagtcctgcctgctaaatgtcagtggtgatgatggtaatgatgaaaattcgtgttaaagactgttgtccaggccagaggtgaggctcctagtctagtcattagggtgagatgattatattgctcttagctaaaaaagtgacacattttctaattacaaaggatttttttaacctaccttatgtcttcaaaagtgttttttgtttgtttgtttcttttgagacgatctcactctgttgccccaggctggagagcagtggcgtgatctcagctgactgcagcgtcaacctcacaggctcaagcagtcctctcacctcagcttcctgagcagctgtgaccacagatgtgctccaccacacctgactaattttgtttatatttttgtagagacagggtcttactgttatccaggctgtcttgaactcctgggctcaagcaatactcctgcttcgaccttccacggtgctgggattacaggtgtgagccactgtgcctggcaaaagtgttcattttgaaaattatttctacatataccaagaagtatacaaataataacagattaagcatttaaactaaagggtaatcactacttacgtcaaaacatctaaggaagaaacagcaccagtcccacacaaattcttccagagagcagaaaaaagcaaaatacagtatcatccaactcatcccttgaaacacaaccccaacagtaaaacttggctcagataccacaagacaaaaaccatgggcagtctactgcaaaagaatcccaaacaaaatactaacaggccaaattcagttattcccagaagaacaacacttcacagtcaagtggggcctactccaggaatgcaaatttggcccaacacttgaaaatcaattcaccacatcagcaggaccaaaagaaactggatgataatctcaacagatctttctttaaaaaagatcataaaaaattttaaaaagaccaatagatgaattctcatctgctcaacagttatcaagactttgccacatttattcatgctccgtttttctttgtgatatgttttaagggaaatcccaggcttccttgtgacaggagtacagagccatggtggttaaagggatgtgaagggggcttcttgtcagtctaattgcttttctcctctcacttgccctaataacagctatatcttactgtacacaatctatgtgctaaatgctttatgttcataatctcatttcatccacaccatatccccacttatcagtgagggaactggggcctaactaggtttagtgcctcacctcaggtctattaagttaagagacagcttttccacccaagtctctacaaaattaatttttagccactaaataaacttggattgcaagggacaaatctaactcaagcttcttaaggaaaaacaaagaggggtacaggaggaagatactcttcctgaaccattgctcagcactgtctatctgtgcttctctatgcacatcagcttttctctccttggtgaggacatggcagttcctggctcacatactccagagaggcaggaagtttcctctctggcttcaatatagaaaatcctggtgggagatgagttactgtgattggctcattctgggctctgtgcccacctctgtagccagagggatggagatttttacccaaggaaggaggggagggatgctgggcttacaaaacatcaccttccagcttcacagattagagatggtgcaggtggaagaccaagttcctggattaggtactcaaggtgaaggcaagctgccatacttgaaagcaattggaaaaatcaaatctgttgatagagagtacagtgaaccttgtaaatttttcattactgaaaggatttaaaaaaatgtaaagcattagtacagtacctgccacataataaatgcgccataaatggtggcttttatgattcacaattggtgccagttggaatcctgattttcctctcttgccagcctcattcttggcctcattgtgtcagccacgttgcattttcccaaatgtgctgtgcacttttatgcctccatacccttaaagatgctgttcttattacctactgagtagtttatctatggagacatttctatgagtttttaaaaattattataaatagagatggggtctcaccattttgtccagactggtctcaaactcctgggctcaaacgatcctcctacctcagcctccaaaagtgccgagattacaggcatgagccactgctcctggcctctaagatttcgactatattacctgagttctttgagactgagtaaggaaacaagggatgtaatatttaggttttcaaacaataatgacaagattctacaccattggttactaaagaaaatgggaaaatgttttgttaggaatccagatgattggaataaatgggtgatgatctatatggggaagtattaacaatgtggtcatctaagaatgaatgctgagacaggtcatgaaatattggtgtgtgggttaaaaatcatctataaattacctgctgaagcacatggtgaaatctccagacatgctctttacagcagtgaaatgccaaggtgctggagataatcttgggaaatttttattacgaataaagaagaaaaatgacagatgctcttctgtaagggtcactgtaggaaaaacaactgaatatgatgatgtagtgaatggaactacttaataagaacagcatctataagggtatggaggcataagagtgcacagcacatttgggaaaacgcaatgtggctgatgcagtatgaggccaagaatgaggctggcaagagaggaaaagcaggattccaattgggaccaattgtcaatcataaaagccaccatttatggcacatttattatgtggcaggtactgtactaacgctttacaaacttttttgaatcctttcagtaatgaaaaatttacaaggttcactgtatcctgtatcaacaggtttgatgtagtgaatggaattacaggaacaagtctgggagtcgtcatccgtcattccttacccaatacactggtgtatttaaacgagccagtggaatgctgagcatcataaggaagaggattcaaagcaaaacagtaaacaggagggttcctttgaatctcttacttgaactaggcagttgaaaagtgattggcgtcaataagatcctgaagcctttgccaaatattaaagaagtaaaatataggccaggcaagttggctcatgcctgtaatcccagcactttggaaggccgaggtgagaggatcatttgagcctaggagtttgagaacagcctgggcaacatagtgagaccccatctcggcaaactttttttttttttttttcttaattagccaggcatggtggcacgtgcatgagtcccagctacgcaggaggcagagacagggggatcatttgggcccaggaaatcaaggctgcagtgagccgtgatcatgccatgccactgcacttcagccttggcaagagagcaaaaccctgtctcaaaaaaaaaaaaaaaaaaaaagtaaaatgtatgatttcaaatagaaaaaggattgcagagctgtgagcaaactaaggcaggtacaaaggttgaaatatattttaaaattatttgggggaaaatacatataagcacagaaaaaaggatgaaaggcaataatacccccaattttaaactgtatattatttctgggtagtgggattataggtgagtttcatttccttcataaattgtatcttcaaaaattgttttgcaattgataggtgatttccagttacaccaaataattgttttacaattatactcccacccactgaatgggttccctttgttacatagattcatcatcactccgtgtagtcatattttgtagttttgccattctagtggactgtcagaacactacatagactatgggacaattttttgtaatgccaaacgcgaacgaaactaagccgtgttgtttaacgacacattttcatgtggtaataaaacttagaaaataaggaagggtgaatgatttacataaatttaggataattttcttatatccctgaatggggaagggtggggtcctggtgaggatcggatggaaaggcctgcctgaggagattcagtgaatgttggtaaagccctacttcataaattaggtggtatgttcatcatgtttcataatttacatattattccgcaattttctttttttttttcttgacatggagtctcactctgttgcccaggctggagtacaatggcatggtcttgctcactgcaacctctgcctcccgggttcaagcgattctcctgcctcagcttcccaagtagctgggattacaggcgcccgccaccacgtccggctaatttttgtatttttagtagagatgggtttcgccatgttggacaggctggtctggaactcctgacctcaagtgatccgtctgcctcggcctcccaaagtgctgggattacaggtgtgagccactgcgcctagctgcaattttcgattataaacatttaaaacttaaaaactggaaggcaccaggcctcaagtgtactcgcaacccgctccggcggccaaagcaccctgggccagctatttgggcgcgcaatcgccccatgggggcggagcctcgccacccagttcacgcctgcgctctgcgtccagccaatcagcgacgtgtccggatgaggcgggactggcttttctcctgtgcgaatcccagcttgcctcagaagcgtcgcggagaaggggccacctcaggtgaagcgcgcttgtggaggagttgtggaggacgcctgtcgacgaccagtaactggtcctcggccattgcggtgtgtttcaggtgtgagcaggggaggcgtctgtctatcgcaggtgtccaggccagaggctgcccttgaccagtgaggtaaatcttacctcctggcgtcgcctggggcctctgacgagaaaacggaggccgcgaacctgaggacagggccttgagcaggatagggcctagtggaaagcgggcgggctgggctggggctgggccccatcgctacaccctgggaccacttacaggagggacgcggcggggccgggcagggccctacctcgctccgcgcgtctccctcctgcccgctccacgccgagggcgcctttcgtggttcctcgatgtatttgttgtcgaaatcttctgcctgtgttcattttccgagacctaaattgcgggacgtttttattatttgtcttgattattatgagcttatttctggcatcctcatgtcgtgtcccgccagcaactataatttccccgcgtgactgagcgccctgctagagttgcccagatttagccagaatctggcagaggcggccccaaaatttggaactcccaggcctcaggggccacctctccagcactgcgcgcttggagtcggggtggacactgtcattctctctcatcgattgattgattgagacgaagtctcactctgtcgcccaggctggagtgcagtggggccatctcagctcactgcaacctccgcctcccgggttgaagcgattcttctgcctcagcctcctgagtaactgagatcataggcacccgccaccgcgcccggctaattttgtatttttagtagagacggggtttcaccatgttggccaggctggtctcaaactcctgacctcaggtgatccacccacctcggcctcccaaagtgatgggattacaggcatgagccacagcgcccggccatttctgttgttgttttttttttttgagacgaagtttcactcttgtcacccaggctggagtgcagtggctgcgatcttggctcactgtgacctctgtctcccgggttcaagcgattctcctgcctcagcctcctgagcagctgggactacaggcacgtgccaccacgcccggttaattttgtttttttttttcagtagagacggggtttcatcatgttggccaggctggtcttgaactcctgacctcaggtgatctgcctgcctcaaccttccaaagtgctgggatttcaggcgtgagctaccgtgcttggcctatttattttattattttttaacaaatgtcattatcttcttaacttttggccccccaaataaatgaggaaactgttaaaattgtattcaacaatccttgttcgatatctcctttgatatttaaacttttaccagtgtattaaaatgatgtctttgcattcagaaggttaaagaaatttgttttttaaagtcaggaagcatctaaatatggtgtcctccggaaaaaagtattccaggaaatctgggaagccgtctgtggaagatcagtttacgagagcctatgactttgagactgaagataagaaagatctgagtggatcagaggaagatgttattgaaggtgcagtacatctcatkttgggcagtgatgtccttcagttcatttgttttgaacccattgagactatcgtacaacttagtttgtaaagcattttcaggtatggtcttccctcccccggtatttgtggttacagaacctgctgacacggatggccagctgtacttgtgtttctcatttgatccttatattgcagtatcggagttacagaagcttattcggcaactcttgcttttgcagttatttccaaaatatctgatatatagtatgtggcttactgtgacattaacccagggagacttgaaaaattattcctataaaatggtcctgaatcctgatttaatttcacctaacctgcagagaatattgcatttttatgtctgctttgaaactgtatgttggcaaaaagcctaaaaatccccaaatgaagatgtttcattaaaatttaccaaaataacctattcagtttcaaaagctttttttttttttttttaattgtcaatacagggaagactgcagtcattgagaaacgtaggaagaaaaggtcttctgcaggagtagttgaagatatggggtaacgtgttcaaaataatttttgtttcttagataaagcacttcaagaaaagttgctaacaaataatatatgtaaaatacttggcatctggtatttcttccaaaacaagcatggtatgttgtggatcttctaaagtgtttaaaatgtaatttctttccaggggtgaagtgcagaatatgctggaaggagttggaggtaggttttaggagatacttgtatttaaagaaaattgttttaagccatataatttgtataataacaaatgttaataatggactataagactgttatttaatgccttgttctcacatagaagattctgcataagtatttgtgatttagcatcacagattttcatagttaatcttttccatgatgttaagagtgaatggtattttatacatatgtgaatttaatggactatggaattttagaagaaaaatgcacaggaaaagtctttacccttctttgtattcacagactaagtgatacacacacacacacacacacacacacacacacatatacatacatacatatatttgtatataagtttttcattttttcagtttagttattttctgacttcctatgctattttctttagggaggacagtgtaaattaagcctctaaaataactctttttacattaataaactatgtagttgatactaaagacaattttgctagatagagttttataattaggttcaaaaattctcaagttttaaataatatattaagtatcaataatatgagctttgttagagattagttatcttaaaaaagagttaatatttagctcctctaaatggattgttcayacagtcaamtcttttttgaaacctttgctctgtccggtggtgaaacagtgcttgttttataaatttattatagataatactgaaagtataaaatatttatgtaatagtgcagctacagcatgattactgaaagatacctatttatggtagatccataagataaaggcttatgtttagcaaagcattatttgaagtagtaaacattttatgaaatgcagttcttatgggtaaaaatgcccaataaagagctccacaaaagcatttaaaactgatcttattcacctatttctcattgaaaaataaagtgatcttaatttatctagaaatttacttaaactaagatttttttctgtccttggtcyttgtctcttagtaaaaaatgtatttaaaagtatcattgatggccaggcacaggggctcacacctgtaattccagcactttggaaggccaaggcaggaggattgcttgaggccaggagttcaagaccagcttggtcaacatagtgagacccccgtgtctttaaaaaaaaaaaaawatatatatatatatatataaaattgattatattaaaaatagttttcttctttaactatttttatcctttttggattctttctaatagagtacttttacatattttctataatgagttctaacaataattcattgaaatgtgtccttttaattggggtgtattttataaatttagataaatttagcctttttaaaaatttttttttatttttgagacggagtctcactctgtccccaggctggagtgcagtggtgcaatctcagctcactgcaacctctgcctcccgggttcaagcgattctcctgcctcagtctgccaagtagttgtgactacaggtgtgcgccaccacgcccagctaatttttgtatttttagtagagacaggctttcaccacgttggtcaggatggtctcgatcttttgaccttgtgatctgcctgcctcagactcccaaagtgctgggattacaggtgtgagccaccgcgtctggcctacatttagcctttattaacagtgttttctcatggggaaatttaaagtctgtccttgacacattgttttgtttattagctcttttttattgttcctaagttaaaaaattatctccagttaggaaaatcagaatttgggtgctagtagctgagagttttctcagaaaaaaaaagtaagcaaacaattctgcattttgaaattatgcctatttctaaatttaagtttaaatgtctttccaatattgttgaaccaaccttacccatatttacttgaatatgtgggaacaaaatacttttttcaacattaaattttaatgaatttttattttcaatctagttgacattaacaaggctcttcttgccaagagaaagagactagaaatgtataccaaggcttctctcaaaactagtaaccagaaaattgaacatgtttggaaaacacaacaagatcaaaggtaaggtggttgctttttttttagagccacatttcttagtatttactggtataaattacttatgaaaaatactattctaggatcggcacggtggctcatgccagtaatcccagcactttgggaggccaaggcaggcagatcacttgaggtcaggagttagagaccagcctggccaacatggtgaaactccatctctactaaaaatacaaaaattaaccaggcgtgctygcttgaacctaggaggcagaggttacagtgagccaaggtcgtgacactgcactctagcctgggcaacagagtgagactctgtcaaaaaaaacaagaaaagaaaaatactattctagttactggggtttctagtgaaaatgtatttggcttgatttttctctaagtatgatagtcctgtagccctataacctcactccttcatagaattgacattatttcctaaaaaatcaataaagatcacttttttccttttaggtaacaagtgaggttataaaagtaatttcgttttttgttgttgttttatgagatgggggtctcattatgttgcccaggctggtcttgaactcctaggctcaagcgatcctctcacctcagcctcccaagtgctgggattataggcatgaaccaccatgcccagcctaaaagtaatttatgttcattctagaaatacactagttgaataaaaggtaaatgtcataaaaaccgttagtcttatgatggtgaattatgttcaacaatgtagaagaacaccaatcttgtatcgtatataatttgtatgttttagctgacttaactcttcttttgtataaaatcttttgttaagccaaaatagggaaaaaaattaagcgaactatttctatttagaaatcttataggataaatacaatcaccttatttaatgtatttgttatatcagaatctatattcaataggaaaaaaatgaaaaataaactgcttagagatcagatgaatttctttttgaaaatttatatatacaataaaacttccttagttttcaagagctaaagcttgtgacagggcttttcttctattagtttgttagaaaaaaaatacttctggaatcagtgtaaatcataattttactttttggtttcccatcagaagacttaagctgcaggtatttccttttcttatatagtataactgtgtcaactcagttttgttttaaattctttttatattggtatgaaatatgacaataattcatcattatgttttacaggcagaagcttaaccaagaatattctcagcagtttctgactttgtttcagcagtgggatttagatatgcagaaagctgaggaacaagaagaaaaaatacttgttggtatcatgattaggtttataatcaaccaagtctcaagtaggaatggacaacctagccttttattgtgaccagtggaactgagccagktttcattaaccattgctggccatgtgttttaaacctactgaactgtaaaccacagacgtataggcacataccatactcataaaaggcatttatattgtttggggttcctgcatttccaagtgacagaaatttgtcaaagtacaaaagaaggatcattggtttatgtaaaagaagtcggggcagtttagcttcaggcatagccagatgggaacagggagggggttgctcatgtagtgtcatctgggttctgtcatcagtacttagtaaggtgtcttgatgtagtaagcaagatagtttttacagtcctaggcttattacaagtttagtaaccccagtggactgagaaaatctttctcaatagctctggcaaaaaattcctctgggaaaatatgactgatgggagtttggatcatttgcccattcttgaaccaatcattgtatagttagccctctgtatataagggttccgcatctgtgtattcaaccaatcgtggatgaaaaatatttggaaaaggctgggcgtggtggtggttcatgcctgtaatcccagcactttgggaggccgaggcgggtggatcacctgaggttgggagtttgagaccagcctgaccaatatggtgaaaacccatctctactagaaatacaaaaattagccgggctgtgatggcgtgtgcctataatccaagttactcaggaggctgaggcgggagaatcacttgaacctgggaggcggaggctgcagtgagccgagattgtgccactgcactccagcctgggtgacagagggagaccctttcttgaaaaaaaaaaaaaaagaaaaaagaaaaaatgcaaattggaaaaataatccagtgttacaactatacagcatttacattgtgttaggtattataagagatctagaaatgatttaaagtatgtggaaggatgtgcattggttatatgcaaatatgatgccattttgtaacaggaactcgagcatctgcacattttggtctcctgaggggttgggtgtcctggaactggtccccccaggatacctaaggatgtctgtagtcagaacattgttgacttttaatggccagacttgtgttacctgcaagtgaggatattgggggtagggatgacagtgtaaaatagataggatggatttgtggcactgatagattattgagctgtagtactaaaaagagtaagttagaatggtaaagaagtagtggttaaatactaggatagacagagaaacagtatgtataatggttagagcctggatgccagcaacaatactgttttggatcaaattcttgtttgagcaattgtagctgtgaaaccatggacagattatgcctcagtttactcatctatgaaaggggaatgctgagtatctatctcttagaaagtttaccattactaatactgtgtagtggttagaattattagtaatgacaaaatctagggtgggagtatgtaagtcaatggctaaagtagggtagaggccaaaatcattgagaaacaggtcacgaaacggaaaaccattattattggaaggatcatctgtgtggacattgaaatcaccaagaattaagacatgacttgattattgttaaaatttcccattcagcaactggtagaattaatatattgttacatattagtggtgaacataaattatctaaatgtggtcataatagttgttaaaattttaaaagcattgatttttaacactttcttttaagtttaatgtagaattattttttctaaatttaaaattttacccaaattgttattacacagttttttttcttttatatttgtagaatatgtttcgacagcaacaaaagattcttcaacaatctagaattgttcagagccagagattgaaaacaattaaacagttatatgagcagttcataaaggtttgttgtatgtggtaacacaatacatcgttataaaacataatatatttatggaagtagaagataattctttctaagtttatgggaaaaaacattttagactttaactacttttccattttgaattcattgtttctgatttaagtgataaatatatttttacttgaggattcaaatggttttgttgggattattcaagacaggaaatggtaaattgggaattttacttagaaatatacttatcatgcataaaatycatactttaataacacttcagtcatagttctctgtttaagtgaaaatagactctataataatcatttttaggttgtattttacttgtttttttatccccagtgtttgttaaatagaaagtacccaaattattgaattctcttgttttcaaatgtattatagaagtattttatggcacatttgcttttagaattattacagtgaccaaaaatgaatttatatccaacataaaataacagatataatagacatctgaggattaaaagtctgtggattgataattatctactgacacatacatattagcaaattgtagtctgtacccctcttgttcaggcagaaatatactttttagtaactattcatagaagctcaatggaatcttgcatatactttttttcagtggtggttcctttagatagtcttgtgcaaatacatgttaaaataacattaaaggaattgggatgctctaagtaaactagcaaaattgttttaaaataaatatttcagaataactttaatatatatggccgagcacagtggctgacactttgggatgccaaggcgagatcactcgagcccagggtttcaagaccagcctgagcaacatgacaaaaccccatctctattaagaacaaacaaacaaacaaaaatagctgggcatggtggcactcacctgtagtcccagctactgggaaggctgaggtgggaggatcacttgagccctggaggcaaaggttgcagtgagctgaaatcgtactactgtactccagcctgggcgacagcgagaccctgcctcaaaaaaaaaaaaaaaaaaaaaattatacacacacatgttattttaaaaagtatttccaagtggaaaacttgttgtcttgttccaatgctctgagaaccatttggtagttggtgtgaagttttgataaagtactagataaagatttcttctaaatgttatcactaaatgttactatttaggataggaactatagtataacctttgactcttccatctcctttctctgtcacatccagttattactaggccctgtaatttttacttctgcagtggttctttcttttaatgcccactgctactaccctagtttaggacctcattattatttgcttgtaccattaaaattcttaactgatgtctctgttctccaatmtatccctcctagatctgccatattatcttttaaaaatatatctcttccctcttgaaaaactgtcagtagcctcctgttctaaattcttaggtattgaagatccccctatgacatgaccctctttttaagcttcatttactacatttgttcattaccccacccctccacataactgctttctctcagctcactatgtacttccatgcttctgcttatgcccttcccctagaatatatttaactcctttttctttatctattgaaatcttagtattttgcccactaaattggaattaatccccattttccactatatcaccacagcaagttgtgcttccattcctattataaaatttttgttttgttcctatgtttttttctcattgccatcaggaagcaatcatgtattattgttttttaatttctctacagcacttaatacacaccttttacatagtaggcaccagattaactgtttgttgaatgaataataaagacgtaagacataatttttatttttcataatgtgaaagaggttgtactatagattattttattccctctagtgaattcatggcacactattagtcataagtagattattgcttgatatttggaaagcttaatagaaatggtttttactgatgtgggacttccagtcttttttatcttgaccttaacagttcaggaaacccattgtgggcaaagtatactacattgtacttcctataacattttattcatgtcttatattttttcttttttagtaggtattttggtattcatgtattacttagaatatttttatttcaaatagatgagcatttgaatattcaaaaattactacttttgaaaattaattgtacaagtttagaacctgagatgaaaagtggtcctttgtaacttaacttgtcttttgtgtttttagagtatggaagagttggagaagaatcatgataatctacttactggtgcacaaaatgaatttaaaaaagaaatggctatgttgcaaaaaaaaattatgatggaaactgtaagtgatcatattgaaattgaaaaaataaggattaatataagcaatgaaatattttatttgctgaaataggtataacacttaaataaaaattaaacaaatgtttaatatctccttccatgaaacagcagcagcaagagatagcaagtgttcggaagtctcttcaatccatgttattctgatgactctttgaagaaagaacttgaacctaagtaatatgatacaattataacgttagctaagaagcatattgtaagtctttagaatagtttaattgtaacatctttaatcataaacctgtttcattgtaagacctccctttctgttaagtcaaatctaaatagttatgagttagttagcaactattcctaaagaatatgtattaagctttcagctctttagtaatgatagtgaatttttctctctaacactgtcaattaaataaagacgatttaattttaggtttggcttcattgtatctctatcaatcccaaaaggtagaaaaccaagtatagaaggttatgttctttaaggaaaaaacggaatacaaaatctattttacatgtacatccttttctatatacttaagttgtacaaccgattctaatgacaataagatgcatttaaatttgtgttctggaataaattgctaaaatcattaacctctgaacattaaatcactagcaatagaacaatatataaataacagttttaagacatggatttgtgaatatgtcattgccacaaagacataatgtcacttcattgggcttggtctgcaattaaattaagagcacatcattaacatacctaatttcttatggtttatatatatcacatctgcgtttatttattttttgagatggagtctcactctgtcaccccagctggagtgcagtggagtaatctcagctcactgcaacctccgcctcccaggttcaagcgattttcctgcctcagcttcccaagtagctgggactacaggcacttgccaccacgcccagcttatttttgtatttttagtagagacggggtttcgccatgttggccaggctggtctcgaactcctgacttcaaatgatctgcccgcctcggcctcccaaagtgctgggattacaggtgtgagccaccatgcctggcctcctgcttttctatgttttaaattctaatttttgcctgtataactcacccttatcttagttataataaggttttccaagttttaaaaaaacaggtgcctacagataaactttttctaattgtgacaacctacttgtacaggaagaaattagtcttccaccattaacgaatatttgacattatttcctaaatttttgaactttgtaaaggattttccttttaagccaaagtatatattattagaatataaatcataagtactattcatccttgtaagaaagtccttatttgggaagttttaccaatagttagttagaggcaaaataagtactccagtgttttctgtgtacttaattcccataagtatgtttttttgcttttaaggaatatcatctttcactgttttcttcaatatacctttttcttgcctaaaacagatgtagtacacaaattactccttttttttttttttgattacttcatcatatgacatatggtctgttgaactattatataaaattaaaaataaatagggtcagatgggaatctgaagatttggatccccagagatctttgtgatagttctagtagtattcataatgagtaatctaaatacatttcaattagagtggaaagataagtatcagtacctaatgtacttagtggttgaataacttttacttattttatcccttatcacctcaaatgagtcagtgtgtacttaaagtaaacttttgtattctaaaaggaagattttttttaccaagtaagtttttctaagttactaattttcttacatgtcaactgactcttagctactgttttcatttttcatgaaagggaatatttaacatccacttttcagtgacagtgaaattttaactcaaaatatcaaggaacaagttaccttcagtataaagattcgtatgtttttctgaactggtacaacaaattccttttattaaatacaaattttatttaaaaaattcctgtagcccttttaaattctagtatactaaaagcaagtattttataacatactaatatgcctcttgaaaaatgattagtataaaaaatttcttagaacataacttgattcaataattacattataagccatgcacttaagcagtattgaatcacttttcagtttttagcagtcaaagtaagcaccctcaagatggctaaaatcctttatgttctgaatatttatgtaatcctttggcagtgaaaaccctgtgtctgataagtctcagagacaaactgctacttagaattacaggggttcactgttgtcctcaggattgacatttctttagtcttgtttctaattaatatgtagacaattctgagaacatctgtgataaaaaatgatgatacaacgggggcttcataactgaaataagacacaatgaaatctacagggtttatgttttatattcaaatataaccttattgatggtatactagcctcctgcacagggggatttccttcactcatagattcccctaacttcatctcctcttttccttgggctattagtcagtcaatatgcttgtgaacctgttcaggtgcttgatgacatgcagtcttgaatatatttagatgaaggtgtcttgaaatttgcaggcacaaagcactaaagtatatcaccatatcaaatgaagaaatcacctttagaagcaaaaaagaaaatataaaatcgattatgatctatcttttctcaagtagcactattctgtttctcccccaaatatcaaaccttaacctaaaattcttcaccaaaaatactacattttaaagcactttaatacatttcaaatttggacctcactgtagtcctctggaaaatgcaggttatttcacagttatagacactgaggctcagaggtaaaaaagacgactaaaatacagaaactagaaagtaacagaacccaactctcctgactccacattgtttcaacttcctgctgtgccacgaagctgcaaatttccttctagaagaagttatcagtcatcttataatgaattaattccatcatatacatttctgtttctttgaggttagttgtaagaaggtaaaaggtctagaaaagataccatacttgaagcatatacagaattgtgtttacaaatttaaagatggcctctatttagaaactttgcccagagtctacagtcaaatgcttctcttcagaaaatgaaacccaggagaaaaaggagactcatagctctgcccttggagagggaattctcacccatgaggggaaaatctctatcatttatgttaaaagcttacttgaaaagtaccacattgtgtgtgtggctttttttttttttttttgtcatccacatagtgttttaaataaaaattgaatttgacttcctcagtttaccagtctccatcacaggtgtaaaccaggccaattactcgttacgacagatgattgatttttttaacacctggtattttaattcagcaattccacttggtaatacatacctaagttcactaaaagaaaacttacattgagtttttagatattttgattaattatcccctattttttaaactggattgtttgggagccctaaaaatatttatagtggataccaaattaaaggacattattctgatttttaaacatttttttttttaattttgcctgaaaacgttcattgtccacctcaaagaattaagtatatctcactgccaccataggaagaatgaagacttctgaatggactatgaatgaatattacgttattaagttactccagaaaaagcatactacacaacctagtaagggaccattagatgtactcctgtaatccatgcacagaatagatacagatttttttaaatatccaaatctaacaaatacggtgagattatttgaattatcaaaagattcactgcagggttttggggggttttgttttggtgtacttcggtatatttatatatcactatgaatttggtgacaaccagtgggtccagagatagaaatacaagaaaactattcaaagccaccattaattggagaccaaccataaagatatgtctcaatagaaaaaaaatgtaataatgctccatttatccaactttgtaattgaagtgttaccaatattgattttcttttccttagatggctaacgtgtctctctcaagcactatattctgtattttataatcattttgaatagaaattatgtcatccacgtcgtttccttaagcaggatataatcaaagcgaatttaatttaattgatgactgagtcatcattaatacaaattatacactatcctcaagggccatacacataaaaagggttccttacatctagcataaaatggtctgagaatcctgtatttagtagcactgtctattctgttttgtttcctcaatattagctgacaattctcgatgcaataaagtgcccacctttgctagtactaaccccatctaattttcctgttacttgctgtaaactgggaataaagtctttgggcagagtaaagtggtttttggcatctttgtactggtattttgggggagaaaaatatagctatttttaggtacacagttgtgtttccaagaatccaggttgttggaaacctggcctatagatatgtggccatttctacacacaatataatattattcacagcttagaagaagtaattttaaatactcagaaacatttattgtatatattgtatagactagatcttttttttttttttttgagacacagtctcgctgtgtcacccaggctggagtgcagtggcatgatctcggctcaccgcaacctctgcctcccaggttcaagtgatttgcctgcctcagcctcctgagtagctgggattacagggatgcaccaccacgcctggctaattttttgtattttttggtacagacagagttttaccatgttggccaggttggtctcaaactcttgacctcaaatgatccgtccaccttggcctcccaaagtgctgggattacaggcgtgagtcaccacgcctggcctagactagatcttgaggctactgatagctcactgaaatagctcttaagcattgttaaaaaataaataaaatggagaaaaatacttaccattgccatccatagaacaacatattcgtctataaagttattaaagtactggtctaaaaacaaaagacctggccccaaaaagacagtgtcttgaagatatagttcacttttggtcatgtgagctacctataaaaaaattaaacaaaataattttactattaagttttaaatgtgttagcttttacgacagaattaattataactttaattcagtattaaaacagaccatttaatctcacatttaagaatacttttctacaccttctcaaattcacaactgggtagcttattaaagtttccagtgtttaaatttcttgatatcagaaagttgtaaatgataactacagctaaacaatttaactgaatataactcttatcacagttttgcttggagcacaaatagctaattattatgattttacactacaaaagaaaacctatacattttatgaaataatttccagctttgtgtttgacgactaagtatattatttatatcatgaataataaaaatttcttaccactaatttttgtgagactttagcaaagacacatccaaacattaggatataaagacaaggatgcttttcaaacacatcagttgctgactttttatagatcattattgccagtataataattagtcctatgtggagtccaggtgacaagacactggtgccctaagggataaagcagaaaatcagtatcacattttaacactgcatttattacaatgtagacattttctgaccatctattttgtgcaagaggcctaaagaacagtgtgatgtagtgtatggcctacaggagtatacaaacctgagttgtgctttccaaggtttcatagaacctgagggtgacagagacataatacagtgccacagatgtctgattccagtttgatattcacacacgttttaaactggctaaaaattaatgcagtttattctatatcaacttttactacatcgaaggcagtccacatgtggattgccaaattaacataattttgtggagatactgaaatagagcttattctgccaattctacaaaatatcactgatgaagaagagtaagaatagtttagttctattcaggtttccttcttttttcctattttctttttttttttttttttttaattttttgtgtttttagtagagacagggtttccccatgttgcccaggccagtctcaaact

SEQ ID NO: 97685 - DNA, 14202 bp, Homo sapiens
tgaaatccggtcactcacgtccacggttctattcagaaaacagtttcaaaataagttaacctctgtagggcatttttccccctcccctttaaattgtccccccttccccctccttcttctcatttgagtctgttttatgttcccctgcgttgtgccaactattttatctttattccttctctttctctcttgccattcattgctttttttgtgtgtgtggcttctccggctgatgtgcggctcgttaccacccactgcacacttgctcctgtagctgaggtgtttctatacaaactccagcgtccagttgtcatattaattattacactgagtaatgactgaaatggtcaaaataaggggagactcaagagcgctttttcttgcggctcaaagattcagcaaagaagccgtacaacaaagcactaattggtccccagaaacactctgacaaggcatggaagataggtttcatagagcccttcgattgtgaaggggggagagctctgaatggactccacgcttcttttctaaactctcttgctgagcaaaaaatggacctctgtttgaatactgccctgatccttgaatactacacccagcagagaaaaaaatgcaccatttattgtaagttttttttttcttctccagctattcaggggttctctgtgaagaatcagctggttttgtttaccatgaaagacctttactttattttcattcttggaggaggtggggaggaggagggaaggaaagccatgtgcctagacagagaggagctggcctactgtaacaaaatagagtgtaacaaatcctacaaaagtttagaatgtattgattctttggagagctatatagattaacgactttctttatgctcatccaaggaaggtatttaatcataatgtaaatggggctttagaaaaaaataaagacttagcgttacttctccttatttggagaacttcaaaaggacttgtgagggtggctgcaaattacctcctcaccccaccccacattccctccttatcccaaaagccacaataaaatatagtttgtgctttttttgttttgttttttcaaacttttttctttttaaagcatattgaaaaagtgaatagatttgttagaaggctgaattccttaatgcaggtgcaagcctggctgctgtgaccaggaagctgagccaagccaaatacatggtttgtgctattctgccccctgagcaggccctccaaggctggtgcagagtcaatgcaggctgggcagcaatcctttctgaaattaccttgggtagggtattcttagaggcagtagattgtgcagtaaagtccttttcattttccctgggtaggacagtgtctagcacagccttagaacagcagacaccccagcaggacagaggccctgtattaattatagctcctggaagatgaatattggctatgaatgccaagcacactcacttttctcaaagcatccattgcttctggaactcaagtcacccccaaattgaggattacacttaaaatcctgtaacaaaatccagaatccaagacttgtgttcatctttgtattccctttgcccctgattcagaatctaactaaagttaaaaatataactttattaaattatttgtccaatgaaaatcctagtttcacttttaatatcaatccctctccccaaagagaaagcataaattggttttcaaagagatgagtcatatcttctttttacagagagacaacacacaatcaagagaacatacataggtcttgagcttcagcaaaggtggtactggcctggccttcagctgtgaatggaaattaaggtggcaggagactcagggcacagggtctctgatctcagggcagcagacccctttggccactaggaaagccatctccccctacagatcctgatgctgaatgaagataaagtctaatctgaagtatggttcagctccagagtgttctgatataggaaaggggtctgaaggtgcagaaattaagtcccttattgtattggaggagaaagagaagccttcttatctttctgcaatgtctgtactctgggtgatactcaccaaaggggatcagtgctttgtccttcccactcccccaccctcatgacaagacagaacactgaatgctgctattcggaaaaagtgaaaaggcaatctctgatatgtggagagacttgcaaagcaaattacccaacaacatctgatttaattctcataacacccttgacatacaggcaaagggagtactaccacctcatttatgaatgaaggtatcaaaccttccttttgtgagttgtttacttctcccttcatgtgaagataaatgggacattgttcaagtgtcttagccaactaaagccctaaggacttgctcagaatcaggcccactgtgtggcaagggagccaagaaagcagggcccagtggctctgctgaagccccttgcatgtggaggccacagaacatctctatagtctatcttacttgctacttttcatgtctaaaaatcgggttactatctccatcatcttaatatgccagtatcaccaccatttctcaaaaatgacaggaatgactcacccctaggtgctgggacagtgagacagagtggcactggatctccattggctggagtgatgatcacagagtggttccaggaagccaagtgctgaggctcctcctgccacacaccctttcctgggtgggttgtgtgagcatgactttcttattaatccctttctctttagacctgggctagagtgctctacatacatatcattgaagtctcacaactcttggaggtagatactataattactggcataggtgaaatagagacccctagagtgtctcagggtcacacagctctcaggtaaaggggcctagataccaagtcaaatcagcctgctttatctggaattccatgggcctaggagagcagaacatgtggccagttctctcaggtcgggaggagggattataatctaggtcacacagtcagaggcaggattctaattttggctcctgagcctcccatcttttgcttcacactggtgaaaacaaccagaaagccaatatcaatggaaaactctcttggtagaatccccaaggatagaaatgcaaacctctaaagaaaaattatagactgttctaccctagggttggaggagaaagtggagatgacagtgttgaggtgcaaactccaggtttacttgagtggggggaggagaacgcctcggttcttggaaggctttgcaaagcatgtaaggaagaaaacttagcatactagggtgagaagagtgaggtcaggctcagggctggcatagggagaatagagacaaatgttctggcggttttggccagaaggatcccagcaacgactgtccttcctcctggcctgaggccaatgagtaaggccactacaagacaaggcttcttcactacaatgcacttccactccatttgggcacccatttcatggtgtgtgtaggggggaggaggagaggaggttctgtcctctacttccctggtattgagatctctgtgtatgcatcctggaaaaggaaacacgtgctggctaccagcaaattttctaagctgttagatacaagtttcaaaattagctactgtacatcccttgtgtgtagatcagaaaactgaggccagtagaggcagagggacttgttcaaggttataaggcaccattgtggtagagctcagactcgggacctttgtgaagtgagtccaagttagtagggagtttggggctcatgtttcagcttaatgtaaaagaaaacacatctagatgcttccacatttgcgacactccctcccacccccaacactcaactatttggctgaaatagagtgaatggggcattaggacacagctgggtcatgtgggaggtgggtaaggagtgcctgaataattcctatttctgcaagtggtctgaggcttactctggctgggaggtgcagggtgcccaggctgtgttgtgactctgcttttgggtgctcacctcctatacttccagagacctcttaggccctttccttggtcagggatgtggagaaaggcctgaggtgtgaatcccacggggttcagccagtcctgtgaggccatcaagccacaggttaccatggggagaaggggctgtgtggctgggaaaggttacagaattgacctctgttggcacgatttggtcctatacctctgaagcctacctattctgcaaagatgaaactgaggtagagaagagaggtgattcacttcgggagccgcccgtcattactgcccaccatcatcactattgttccagaaacactcagccagcccacataccaagagcagctccctgggtcatccccttggccctttagaaagatccacctccacaaaggggagttcaattagaaccaattatccggataattcaccacaatcattcctgcacccagatctcggattatttctactggaaaatcaaatggatgattgccctccacttcgttctgcctatgtagacaagacctgagacatgccccagcctctctccggaccagatccttaaagagatggggcctattgcttggtctgctttctccgcagcgccgcgtccccagacgtcctgaagctggacggggttctggccagagagcgccagggccgaaggcccaggaaggacgcctgggcaggcgctgtccaagcggtcgagcgacggctgcaagcgcctccccctccctctcggcgccagcacgcggccccgccgggctccgctcccagtcgcctgccaccgggccgccgggcacacgcctggggcgggatggtggctgcgccaaggccgccgaggtgcccgcggcggcgccgaagaaccaggaatccccaccagtgccctaagcgccatcactcaacccccgccccgcatctttcttctccgagggtctgggagtatcccagagcactcccttctttatgatatccgctaagctggtccggaaataatctttatggggagggggtggcggtagggggcgatggtacagggggccagaggtcatcctagggggacgtccctgccatatacacccacctacaggacggctcacaaccactcctcggtgtcgcttccccgcggccccccacacacttgctcagttatggggagcacatcctagtttttagagctgaatgggacattagagaccatattctgtggctgcagacgaggaagcgaaggctcagagaggatgccacttcgaggagccacagagcattgagaggacgccttgggactagaacccacgttttcacatagtccagcactttttttcactgttctggacggagtccctcccccaaccatgtttctaaacttcaatcgtaatttgctccaatttctagggtcaccgaggaacccgaagagaataacagtgaggagagagagaaaacaggaaaagtcgagccccactccctcctcacctccacaccgttcctgtgccattttttctgcccaaacccttccctgcgctttgcttcaagttcttagtagaatccaagagagcttcaccccaagtctttccacctatacacctcaattcctagagccatttgtccctcctgtgacgccccccacccccttcctaaagccacccccggcagcagcccgccccgagcgcgccgcctgtttattcagccgggagtccggcacgcgccaggcgcacgcactgcaacaacaaacccagctgaatggagagtttgcaaggagcgggagaaaggaacgggagggggggagaggagaggaggagggggagtttagggagtgggtgggaggaagaggtaagaggaggggggggagtgggggctgcagccgctcgctgcagcagcggggagtggggggcgaggcggggccagggctgcgcgtggggctgggtgtcccattgaaaaggcggacgcactccggcagcccagcactctctcacttctggccagggaacgtggaaggcgcaccgacagggatccggccagggagggcgagtgaaagaaggaaatcagaaaggaagggagttaacaaaataataaaaacagcctgagccacggctggagagaccgagacccggcgcaagagagcgcagccttagtaggagaggaacgcgagacgcggcagagcgcgttcagcactgacttttgctgctgcttctgcttttttttttyttagaaacaagaaggcgccagcggcagcctcacacgcgagcgccacgcgaggctcccgaagccaacccgcgaagggaggaggggagggaggaggaggcggcgtgcagggaggagaaaaagcattttcacyttttttgctcccactctaagaagtctcccggggattttgtatatattttttaacttccgtcagggctcccgcttcatatttccttttytttccctctctgttcctgcacccaagttctctctgtgtccccctcgcgggccccgcacctcgcgtcccggatcgctctgattccgcgactccttggccgccgctgcgcatggaaagctctgccaagatggagagcggcggcgccggccagcagccccagccgcagccccagcagcccttcctgccgcccgcagcctgtttctttgccacggccgcagccgcggcggccgcagccgccgcagcggcagcgcagascgcgcagcagcagcagcagcagcagcagcagcagcagcaggcgccgcagctgagaccggcggccgacggccagccctcagggggcggtcacaagtcagcgcccaagcaagtcaagcgacagcgctcgtcttcgcccgaactgatgcgctgcaaacgccggctcaacttcagcggctttggctacagcctgccgcagcagcagccggccgccgtggcgcgccgcaacgagcgcgagcgcaaccgcgtcaagttggtcaacctgggctttgccacccttcgggagcacgtccccaacggcgcggccaacaagaagatgagtaaggtggrgacactgcgctcggcggtcgagtacatccgcgcgctgcagcagctgctggacgagcatgacgcggtgagcgccgccttccaggcaggcgtcctgtcgcccaccatctcccccaactactccaacgacttgaactccatggccggctcgccggtstcatcctactcgtcggacgagggctcttacgacccgctcagccccgaggagcaggagcttctcgacttcaccaactggttctgaggggctcggcctggtcaggccctggtgcgaatggactttggaagcaggtaggttgcattttggggtgggcaggggggtattcttgccttcgtcctccctctgagtgtctgtggaagtggggatgtctccaaggagataaggggatttttatttaaagaatttgtgaaagttggtcgatttcaagtcctagtttgttagtttcagcactggcctctgaaaatggccttgcccaggtctccaaggagtgaagggtagtagtgaggtgcagagatactggtgaaccgaatactgggacatgttaaaagagatgtctacctgacagactctttccccagacctccatctccctctaccactagcctacacgttcaaattaacctctcctgttcttttccttatgttatagggtgatcgcacaacctgcatctttagtgctttcttgtcagtggcgttgggagggggagaaaaggaaaagaaaaaaaaagaagaagaagaagaaaagagaagaagaaaaaaacgaaaacagtcaaccaaccccatcgccaactaagcgaggcatgcctgagagacatggctttcagaaaacgggaagcgctcagaacagtatctttgcactccaatcattcacggagatatgaagagcaactgggacctgagtcaatgcgcaaaatgcagcttgtgtgcaaaagcagtgggctcctggcagaagggagcagcacacgcgttatagtaactcccatcacctctaacacgcacagctgaaagttcttgctcgggtcccttcacctccycgccctttcttaragtgcagttcttagccctctagaaacgagttggtgtctttcgtctcagtagcccccaccccaataagctgtagacattggtttacagtgaaactatgctattctcagccctttgaaactctgcttctcctccagggcccgattcccaaaccccatggcttccctcacactgtcttttctaccattttcattatagaatgcttccaatcttttgtgaattttttattataaaaaatctatttgtatctatcctaaccagttcggggatatattaagatatttttgtacataagagagaaagagagagaaaaatttatagaagttttgtacaaatggtttaaaatgtgtatatcttgatactttaacatgtaatgctattacctctgcatattttagatgtgtagttcaccttacaactgcaattttccctatgtggttttgtaaagaactctcctcataggtgagatcaagaggccaccagttgtacttcagcaccaatgtgtcttactttatagaaatgttgttaatgtattaatgatgttattaaatactgttcaagaagaacaaagtttatgcagctactgtccaaactcaaagtggcagccagttggttttgataggttgccttttggagatttctattactgcctttttttttcttactgttttattacaaacttacaaaaatatgtataaccctgttttatacaaactagtttcgtaataaaactttttcctttttttaaaatgaaaataatcagctgactctaagctttctttgactctgatgcccctggtccagttttatgaaaatgtcaaagggaagaggtggatggagaagaaaatgttgcaaaacatgctaagtggcagaaatgacaatgataagtgctatggccagtcccatccaaatggtttctttatgatgaatgagtgtgtgtttgtgtgtgtgtgtgtgtgtgtgtgtatgtacatgtatatatgttttctttctatcctatgctgcaaatgtacatgcccaccaaaaagaatagatggctgcattatcctttgatcaaaatttaaaatcccccaaaaaagtgaaccagaaagagagggtcctccaccattttccaattctcaactccattctgagtttctccctgtgaaactatggtggggctggatgaaataatggagactaggtctgggtggggaggatggtggttctgggatgggggttggagaggcatccctctccacatacaagctcctagtggtgagtatgtttctcttccctcacttccaggcatacattttctactcattttctccaatacacctacttgctatattgattttaagtaagaggcatatatgatatgaattcattccaaacggattgagattttaattaaaaaaacgcattagaaatgtgtggtcgctttgagacactggtctatctaagcttgtgactctatccgaatagcgtgagctgcgtgtaaaagtacccaattaccaagattcaaaaagaaattggtgggtttttggctggcttgcttcttgtcagttagcaaggacgtgattagaatcctactcggcctctcgccggctcctcgctcgccgcctgcattacttgcagattcagtttgcgtgtctccagccaagcggaaagccgagcgcaaaatgcatcttacaaaacccaacaaagaacgggtagccagcacgtcttccagagttaaaaatctagtctgtgttggtacatctataccatttagtggcacagaataatcattttttaaagccacgatgcgcggagcacgccacagcgtctgatgtcattttgctaaatgaccctctatagaatgcacattgaggcttcagtccctttcaaagagatgagcgtaattaaggaaaaaaaatcagtaaattcctcatcgccataaataatcggactttctgccagcagtgggccaatttagagcttacttgagagaagtaatgcttttgtgatgcctgcttttatttttatcttctcatttggaggaccagagatgggctccacccccactctccatttctctttcctttaatttagctcctttgcaagattccagataaggtatgcaaagaaagtgtagcaagtcatttatggctatgaatataacattaggataatgtttcagcccccacaaagggggatttttttttccttctcctgtgaggacaggtgttctttactcacttctgaatgggaaatatccagtctcgttaaactcgaggcaaagttagtcgttgtttgccacaatgcgaaggcaaactcgaaaaattcacaaaaacacacacaattttgcctaagctaggaaagggcaaagcgaggattgggcaaaatctcattacatctgctctaatcgcttagcaacacaaagccggggcttgtgcggcgaagggaagccattcacagagctctgacaggccgcattcagcgcgcgttagtcagctccataaatcaccgctgcccattggctgcgcggcgggctttggagcggccctgggctgtcagcgaaatacaaaatgtagaccccagaggctagcaatagtagcctctcccccgtcttagcccccacccatttttcttttctttctttctttctttctttctttctttctttctttctttctttctttcttccttcctttctttctctttctttctttctttctttctttctttcttctttctctttctttctttctttttctttctttcttttctttctttcttcttttttcctttttttcttctgtcttctttcttttttcctttttttcttctttctttcttttttgagagaaagaggaggggaagaatgctgaggtagaaaactgcgttgactttattgactgagaaatcttacctattcaacaaaggcttggagaccaccgagttaagactgaagacacgcccgaaatcgacgaggaggagcggggagtgcgggagagaaagaaaaaacagacctgccgcgagctgcagagctgttgaatggcacacatcatcagaggctgggagaaagctattggtgcacaggtttcacctctctgacacagttattttaacattttaaattgagagtaggaggagatgcatcaagaagaatctatctcgagttcacatcaggcaggacccaccaaggaagagagaagaaactattctgtggtttgcaaagaacttcaaaggagtaagactgagatgtcttaagaaagagcaatagaacgtgcctttccacttcaccgttcttgcagtgctggggatgtttaaacacagaagtaacagcccagttccttgatatacacaggagctaggtgaagccatgcaaaggagttaagaaaaggcttgatggcagagattacaagctatatgtaaatgttatcccctgctgttgttgctattcttatcttccagtcctttatctcattttcctggggactggtcagatgcatctagatcacagcccaaattggattcttacccacaaaccacgtagaaaaaccctgatagtagatgtggaatcaagggagatttttctaagaagcccagattgccttaactcaagtgccacctcctccaagaagcttttcctgaccaccctctttaaagcagctctccatctgctacaatcagtccattaatcctgttgttccttcctggcatttaccactatctgaaaatgctgtatctttgtttggttatatgattattgtcaattatcccctactacatggtaacctccctgaagctagggaccttacttgtcttgtcttgtcttccctgcccctggtaagataggtatttgttgactaaatggacaaatggggatggttttctctgcttcactgaaagttgtttcttattcttcctttcccctccacttgcactctccacccttctctgctcttctctctgtctcaggaggcaggcttatctttatggatttcatcacaagagttgtgtgtccttctggcttcttcttgggtttggccagtgggagacaccagcaggagttggcaaagtaggaggggatataggttgggatatttttatccctgctccatccctgcctaggccctattgctttgcctgtagctctactccttgtcctaaggctagggctgttgtcaggaggcttctctcccgcagatacacctcttgctgaagtccagtaacaactcccttctcttgccctttaataaggcccagaggtggtaacagctctcccttgttcctagtctccgggtgcagcatcatttttgttaacctcaccaacatctctgtctttctgttaaactttttcatttacccttgtgccatcatctctctttccgactctgctacacaggccgtttccccataggatctcatggatatactagttttgtttaagatttttcagggactcttggggttatgagtaagaaaaatcctagagtatgggtgaacccaactccatataacatgtaactctagaaacattacttcatctttttgagacaggagtgaagtcaattacagttttctcttctggaaaaacgagaaaaatgataccttcctttgcatagatcaccagatgaacagaaaatgaaagggctttagagcaactaatgactatatcaatgcaagagatacgtgcttcttaagatctttctgaaccaggtagtggggtggtactgggtcttgccgttaagatcagcaaagctgctgctgctgttggaagccacccctactttctttcgcccattcattcgctctgcaatttatgcactcacttcaaaggggagggacaaattattaaatctggtcaacatttctagaacttagttgtgttaatttgtattttctagagagtgctctccaagaagcatcagttattgcaacttcttaaaaaaaaaaaaaagcaacactgtggatgcttttgtggtgtaataatcgtcctcaacctcaggtccttttacttattgctgaaaagcctctgaactcctttctccctctctccactcctgagccaagaaataattctttccggacttcccgagaagctccaggttatccggagtcaacggtaaggagggaagtggattcggtgacactaaggttgtttacccactgcgaaagcgaatggcttggatctagcgcaggtcgaagttatattccttcttcctttgtatgcaagattaggttgttacaaaagagggtgtgtaggttaatggcaggaagcaagttgcagcgcggagcgcgggccctgagcgcgtgtcaggcttaatgatttattcaagctgcagcgcatccgggcgttgattggctgcaggcatgcgtccgctgtcagctgcgcgcgccgggaactctccaggctacctgaagctggggggaggaagaggaggcgtggggacccgaggggagaggtgtgaaaaggaggaacaggtaggagtagggggtgagagagagaaacagggatagagcaagagagacatagagagagaggaggagagaaggcaaggaaggaaggagaagagagaagggaagagaaactcaagcgtaggttgcgggggtgggagagaggagagaggaaaagatggagaaagcagacgagaaaaacaagagggagaaagagagaataaaggagaggcgaggataggagaataaatgagagagagcatagagagaggctggagacaggagtgggacgcgctcccagaacgtcccgcgtgcgcccccctctaggcagccagcgggcggccgcttacaaagccgcctttgatgctctggctaccagggctattttggggacgagatgggggaaagccgccaacccacactccttggagggagtcactttctgcaaagtgcgttggagaggactgggccctgggtccgggctgtcgaagcaggaagtggatgtaggggacaaaagctccgcacctgccaaatgcgagaccttagagagagcctccccctcgccgctccctgctcccccgcgggcccgggaagcttgcactaccgggctcagcgcagccagccccaccgcctccggactcgaccccaccatagccccgccgtccgaatcgtctctgaaccaaactacttctgcctgcctttctt

SEQ ID NO: 97686 - DNA, 33319 bp, Homo sapiens
gctgattggctgcggggctcgcgggtggcggttggctgctccttgcacctccccctcgtgccgctaccgctgccactgagaggagccaccggcgacgccagagccaggaatacgggtgagtcggggccctgggtctaagatactcctggcgtccagtgagactcacgacgaactgcccttttcgactttttctcctcgccgggtttctttggtgctccaagcactctgtcacatgggagttgtagtctgccttgtactgtcggctatgggccgaagacgtgagaagactacggttcccagcaggaactgcgactagccggtcaacaaacgttcgggccacgccttctacctccgttcattggacaacccgtcccttagcccctcctcctttcatttcattggctactgtccctcacagaggctgggttccggcctaggctgcatggcgactgggtactgtatttgtcatttggaactaagacggcctgcaattggacacgactggtgtccttcacttgttgtagggtagggccctaggcagatcaggcagtcgtaggctcaggttggtgtcggtcccggagggaggccggtcttggactttggccccgccccctagcgctgcccgatgggcccaattggtcgccgcgagcgtcgctcgtcgtcgagaggcggagccgaccagtctgcggatatctattggtctaggctggcgccggtcagtggggttgtgatcgctgattggctggctgctccagctgttgcaggtccattcaccattttgtgtgttggagtaaaaaaaaaagggagaatcgagagggagagccggagggggggcggggagggaccggaccggaccgagccggggccacggccccccgccccgaaaccccgccgagcccaaggtgaggggcggggccagggctgacacaggaaaggggggtccggggggctgggggccgagaggggacaggtggcagggacggggagggggtacagggggaaaggggtgggcggaatggtgggaagggaggagggagtggaggaagtggtgggggtttgacagaaaaagggtaactgggggagggggtggtgggcaaagaagggtaacaggaatggaggggtgacaggactagatcagggtgacagggagagggaggggacagagttggagagtgtgacaaggagaggtgatggggagagaaggtgacaggtccggagatggctgacaggacagtgactgggaggaataggtgacagagataaatgggggtgacaaggagggggtgacaggagggggcctagggcattttaaccgagaggtagagatagaggtagtgacaggatgagagagagagtgtcagagaagctggtgccaggagggctaatgggaacagagggtatgagaccccaaagagccagggcctgggctggcctgggctccgggagttactactcagatctgaggaaggtgagggcccccggggcttgggtgggagttattcagacagggtggacaggaagagagtaggccctaggggaaagaaagcagctctggggcgaagagaggctgggccaggcagcaaggtctaggggtccaggcggcatagttgtaggccctgggtggggtatgcaaaggtttgtgcttggaaaaaactggagccagatctcagtccccaacatggtagtctagtgggtcagcgggtattaggtggtgatggctgcccaacttctgggcatttgggtgccagccccgggacgccctccaggctctgcctgtgaggaccccaggattggcccaagaaagggcaggcctgggactccagggtccacaggaggagcaggcccctagtgagagagcatgaggtcaagggtcccccagtagctggaagactgagtcggggttgcctctcattgtgtttggcttatggttctgggtcccccaaccctcctagaggcctctgttttggcctctcaggttctcttagtcacttcagagtaaagttttttccccttttcttttctcagggcagctcgaaagggggcgggcagtaatgactgttcaggaagtgggtgaggttggcctgttgggcttgtcctgctttctttgaccttatcccacctatccccacttggagttggagggcatatttgggggcctgcggggggctagccgactcagccaccctgccagagccagcccagccagggcggggatgcatgcaggcaagaagaggggggctgggcttgcgggtatcacgctgggtgctgtggggggaggagcaggctcccatccagtgggacagagaaaccctggggtgtagctctgtgtcccactgtgtgatgacgtgtgcgtgcttctgtgcgtgtgtgtgtgtttgtgcgcgtgcgtgtgctcatgcacggccccgtggcagtgctgggtatgagctcttgccccagacatgcccctgcctgctccctgccaggatctggggagatggctgtacctggcagccctagggtgcagagcagagtgggcagccgtccctcgggactctcagctgcccacttcttcccacagtgcctggccatgccaggctgcccagaggggcagagggagggtgggggggtggagaaaggctcatatcacagcccagtcaccaccctttttgtgacttggtacttgtgcatgtgtgtgtgtgtctgagtgcatgtactctctgcatggtgacagtgcgagtaaatgtgccctctggatcatgtgacaggcagcacactgaaatggtcaggagcacggactctggagccagagagcctgggttcagaccctagcactgctgtttcccacctggatgatcttggacaagttgtctcatctttttgtggctcagtttcctcaggtgtgaaatgaggccgatagtagcacctgcttttagggctgttgtgaggatgaaacaggttaataaaggcaagcttagcatggagttcaggacacagggagtgctccataggtgtgaactgttagtgcttttgatgtccccttggggcattcagagcatgtgctctgtgtcctttgcagagccagcaggtgtctgttccccaaggagccagagtgtgtatactcaggggactcaggtgctcacctgtgcctggtgctgactgaggtatcacatgagttgacagcagccagagaggaggccttggggatggtgggatggagacagtagactcagcaagtgggaaatcttagggtacactggctctggagaggttcctgagttgctccgcgtaatcctccgctctcccaccctgcaggtggacaaaaatgaagccaatgaagaaggcatgcactggcctttcaggtcctggcagtggcagcaagtcccccccagccaccagggccaaggctctgaggcggcgaggggctggggagggtgacaagccagaggaggaggatgacgaggcacagcagccgcaaccacagtccgggcccgaagaggctgaggaaggggaggaggaggaggctgagcggggccctggggctgaaggtcctccactggagctgcaccctggcgacccggctccaggcccagcagaggaccccaaaggggatggggaggcaggccgctgggagccctcactcagccgcaagacagccacgttcaagtctcgagcgcccaagaagaagtatgtggaggagcacggagctggcagcagtggggtggctggggcccctgaagagcgggtgcggacccctgaggaggccagtggcctgggggtgcctccacggccacccacctccactcgttcctcctccactgacacagccagcgagcactcggcggacctggaggatgagccggctgaggcttgtggtccaggcccttggccccctggcagcaccagtggcagctatgacctgcggcagctgcggtcccagcgggtgctggctcggcgtggtgatggccttttcctgccggctgtggtgcgccaggtgcgccgaagccaggacctgggcgtgcagttccctggtgaccgagccctgactttctatgagggggtgccaggcgctggtgtggatgtagttttggatgccacacccccaccaggtgccctggtggtgggcacagctgtctgtacctgtgtggagcccggcgtggctgcctaccgggaaggtgtggtggtggaggtggccaccaagccagctgcctacaaggtccgtctcagccctggccccagctcccagccaggcctaccaggcagcctcccgcagcccccacagccactgcaccgtgagccagaggaggctgtgtgggtggcccgctccagcctacgcctgctgcgccccccctgggaacctgagaccatgctgaggaagccccctacaggccctgaggaagagcaggcagagcctggggccaccctgccaccctgccctgctgccctggaccccaaacagcccgaggatgctgaggtctctaagatcagctttggtggcaacctgggtactcactgtgaggagggcgaggagaagcaccctccagccctgggtaccccagccctgctcccactgcccccaccccagctcctgtcaccaccacccaagtctccagcctttgtgggccccggccgccctggcgagcagccctcgccctgccaggaggggagccagggcggcagccgcagcagcagcgtggcctccctggaaaaggggacagcaccggcagcccgggcccgcacgccactgacagccgcccagcagaagtacaagaagggcgatgtggtctgcacacccagcggaatacgaaagaagttcaacggcaagcagtggcgccggctgtgctcacgagatggctgcatgaaggagtcacagcggcgaggctactgctcacgccacctgtccatgcgaaccaaagagatggaaggcctggcagacagtgggcctggcggggcgggccggcccgcggccgtggcagcccgtgagggcagcacggagtttgactggggtgatgagacgtcgagggacagtgaggccagcagtgtggcggctcgtggagactcacggccacgcctggtggcccctgctgacttgtcacgctttgagttcgacgagtgtgaggcggccgtgatgctggtgtcgctgggcagctcgcgctcaggcacgccctccttctcacccgtctccactcaatcgcccttctcgccagccccatcaccctcaccctcaccactcttcggcttccgccctgccaactttagccccatcaatgcctcaccagtcatccagcgcactgcagtccgcagtcgccacctgagcgccagcacccctaaggcaggcgtgctgacgccaccagacctgggcccccacccaccgccacctgccccccgagagcgccactcctctggaatcctacccaccttccagaccaacctgaccttcaccgtgcccatcagccctgggcgacggaagacagagctgttgccgcatccaggggccttgggggcccctggcgcagggggtggaggagccgccccagactttcccaagagtgacagcttagactctggtgtggactcagtgtcccacacacctacaccctccacgccggctggcttccgggccgtgtcccctgctgtgcccttctctcgctcccgccagccctcaccattgctgctgttgccaccccctgccggcctgacctcggatccagggccctctgtgcgcagggtgcctgctgtgcagcgggactcacctgttattgtccgcaaccctgatgtgccactgccctccaaattccctggggaggtgggcactgctggtgaggtgcgggctgggggacctgggcggggctgccgtgaaaccccagtgccccctggggtggccagtgggaagcctggcctgcccccacctctgccagcccccgtgcccatcaccgtgcctccagctgcaccaactgccgtggcccagccgatgcccgcctttggcctggcttcttcaccctttcagcctgtggccttccacccctcacctgctgccctgttgcccgttttggtgcccagcagctataccagccaccctgcccccaagaaggaagtcatcatgggccggcctggaacaggtaagaggtggaagtggatgggctgcgccaggctcacctcgtagagggcctcttgcaagctgaactcttgagaggtgagctcctcaccttgggagggcttcaaggggaggccggcctcctctctgcacagatgttgctgttggaattcacatgtcaggaaagggattggacttttaaggctcaaggcaccgtttccagaggcctcctgtcagagaacgtggtctcaagaggtctatcagtcagcaaacctttcttgagtgcagactgagtcaggtctccatggagctgatgggataagagaatgataattgtggcaacagcttccacatcttgggggactgggcgagggcattgccatggtaagcactgcgtgtaggtgagcttgccaaattttcacatccacctcatagagcacttaccacctgttctaaagacccttttcaaatattagctcattttatcttcacaaccaccctaacaggaaagtgctatgattatgcttctttagaggaaactaaggccagggtcataatttgtccagggttacatggctagtcaatcctggagcagccctcaaacccaggcaggctggcccgtgaccacgtggtcatagtgctggattacagatgggcagatggaggctctaacaggtccttcccaggaggtggcaggaccaggactggagccctcatctttaccactgtgtccagtaaacatcacaggcacggccatggaaggcagcgggggtgtgctgggcacttctccaggtgtgaatctagcctggctacactgaggacagggcgtgtaagccaggagttgaaggatgagtgggaacctgcaaccgtggggtggaagagcctcctgggaggagggcgatgggacagccccaaggccagaaggagcacagcctaggaggggaagagggaaggccagggtggctggagagctgaggctgggggtggaagagtggcatttctgagatggtgctgaacagccacggacccaggctaggctgggccttgtaggagcaacacagagagggtgacagacctgtcggaagctccttcctagcatttctttcttatttgtttatttatgtatatatttttttatttttatagagatggggtcttgctgtattgcccaggctggtctcgaattcctgggctcaagcagtcttcctgtcttggcctcccaaaatgctgggattacaggtgtgagccactgcacctggccttatttatttttatttatttattaatctactgttgattcagggcctggccctgtgctgtgcctggccctgtgctggatggtgctgaggacacagccctacttacacagggctcacagcctctggaaaagacagacccctccctagacagtaacagtctggggtggtcagggatggggtggaggaagccaggaggccgtgggagcccagagaagatgcctgtccagcctgagaagtcagagaaggcttcttggaagaagggccagatgcctatgaactgaaacctgaagggtgtgcagatgtgagcccggcagggtaggcaggaaggatcttcaggcagaggaaagagtttgtgcaaaggccttaaggcaaaagcagatatttgtaagatgttgaatctggaaagtcaaagactctaaatggcaggtgagtgttggggatgtgtggctggattggtgagcaagggtcagatcagagaggacccttaagtaagatcattatgaactgtatcctgagggtactagggagtcatggaaggttttgagcagattcaaccactgctgcaccatagagggtgtgtttgagtctctgaggccagaagcagggagaccagggaggaaggaggctgggtgtggatgtgggtaggagccgctgtggcttgggcttggggcaagagccctttcaggaaggagcactggcctggcccttcccttttggggctccagcccaggccagtcccgagggacagggcacagggacacgggttatgcctgcccctgatgttcatatacagaactgaggctgtgagctgtgtgtttcaccctgacaccaacattttttacatttgttgttataggtggtacaagcaaaatttcacagcagggatttctgtccttaggtaatgaagaaactaaatcagagggtctctaaccactcccctacccttcacccccccatatgcccacaacccccaacatggcccctacagcattgtctcatgtggccactcctgctgtgtggggaggaatggctctggtgcaggggatgctgaggcttaccagagtaggcccagcagggctcttgttaccattttccagatgaggaaaagtgaggccctgacaaatggagagtcttgattgaggccagccagccagtgaggggcaggatgagagctttgagtcatctcccaacctctagactgtgggactctcactaccaaaagtggcagtaataataactcaccgagcagcactggtgatgcacgtgcctggcacacttcaatgagtcctgctgagcctttactccctgaatcctcacaatgccccaggctagtaccatgattattagttccattggacagaggaggaaaccgtagcctgaaaggctaagtgacttgcccgggtcctccagctaggaagagagagagccaggattttgagacagagtctggctctgtcacccaggctgcagtgcagtagcgcaatcttggttcattgcaacctctgcctcctgggttcaagcgattctcccgcctcagcctcccgaatagctgggattacaggagtgtgccaccacgcccggctaatttttgtatttttagtagagccgaggtttcaccatgttggccaggctggtcttcaactcctgacctcaggtggtcctcctaccttggcctcccaaagtgctgggattacaggcttgggtcaccacaccgagctgtcaagagccaggatttgaactcagactgtgcggctccagatcccaggcccttaagcactttcaataataacaatgataacaataatacctactctactgagcraagactgtgtgcctaaccccgggcttggggccgtttcatcagctccgcctgatgctgtgaagtagattgccaggcctgttgtccaggggtagactgaggatcagagaagggaggccccttgctgggggccacctggttgtcataacttgtccagtgcctatcctggcagttctgaggagcgcctccctaacaacacccatgctgaggtatccaggctgccttcaggttcctgaacagcctgccctttcattcttctcccagaggcctccctaagcccttgggaggtaggcagcttggagccttctccccatggggcccagatagggcagaccgtgttcagtggtatagtgaggttgcaggcctggtcccttctgctggcccatgccagggcctgaccctccatcagagggcagcaggtgtgagggggcggcccagggcagcctgcctgctcctgcccccagccaggcatttgcttccgctgggggacttgctggggcaggcggctggcattctccacattctgtgcatggcatggccagccagctgccgttgccacctccctctgaatcttcccgcctgctccccaggagaggatcccgccccagggcctgcagccccagtccaggaggccagatgtctcagccccattcctggtatggcctccctcccagctcccagcttcctgcctggcttccccttgttgacaggcgttgctccttctcctgggcctctgtctggcggtctggctctgtctgtcttatccttggcttcctatatctctctggtctcctatttctaggtctatacgtgtgtctctctttggacctctgtctgtctgactcttctttgagtctgggggctccctgtgccttcctgggtttgtccctctctggacttcagtcctcgtctgagctttcagcccaccctctttctgttttggctgccagctggcatcctgtgtctctgagccagccttggcctctctttggccctcctactcccactctttagatggacttgctgcccccatgccagcctcccagccccaccctgtgcatatcaggtgttctgttcttttaagacagtgggcagttgccaagcaccaggtctcctacttccttcttggggagtgttgggaggttgtccaggccagggagccccctcatgctctttgacaaattaactgcctactactgtccctgaaatctgctgagaagtgctgagatccatcctgcagacccatccaccatccaagcacctgttcccaagacaggcaggaaagcgggggctgtatggaccaagctaggagatccggctgtagggggcggcaggaaagaagcttcagtgcccacccacctgccagagggcatgacccaggtcatcctacctccccctttaccccttgcctttcatttgatgccagcttcattgaaaggagtcccagatatagtgcaccccaatgggtagggcctcagagacgaggcagtacccaccaactatgcttgggcaggtggggaaaaagaggggccaaaggggttaagcctgggtctcctgactccccagatccagatactgcccaccataatttccattttgtttcaaacagtgaaccctatctccaccagcagaagccagctccctcctcatccctctgccaggcccagggctgagcagtcctggggcaggtgggtgaggaaggcagatgtggatgcaggcacaggcaaggatgagcccagggaggtactgagtctggggaagccaaggggcagggacaactcagtggttcatgggggctgataagggaggatcrggtaggtttctcactggaggtgacatttgagctgaagtatgaggaatgagtagatttcagaatagtcaaagaaaggaaaaggcaattccacctgaaacagctgcatgagcaaagaccaggaagagtgaaagtgcatgaactccgagtggctagttgaggctggagctgacaccagagtccaggcttagcagaagggtgccgtggacgacaggcccagcttgaatgccaggctgagaagctggggctctacgcgggccagtaaagagtcaagaaggcatttagagcaggggagggaaaatgttggatctaggtgtcagagacccctggagaccgccctggaaaggcaggagttgggaagaagatggcttggggaagaggaggagaggaggaagagcttgtgaaggtgcaggagtgagtcttggtaactgtagaagagaccccagctcccccagcttagcagcccccagcaccaggagctgcgaggcgtcaggctgcctcctggcggcaggcggcggcgggacagcaggcgcgcgcatgcgcggcagagggggttggggggtacgtcccggagcccccggtgcccgggtattaatggctccattagtggccgggagggaggcgcattagcggcggcgacggcgtctggctcccattaccaccggcggcagcggctgcaccgcaggcggctggaccctagcccgccgcgccgcctcctccacccccaccctatcccctgttcccgctccccacgagggcccgggcagggaactcccgtccccctatttcagcggaaaagctgattgtgaagccagatagatttgggttcaaatcccggccgtgccacctcgcggctgcaagatgctatcccccctctgagcctgtttcttgcgaagtagtcggggaaaccgggtgctccgggggctgtgtagaagcggactggcacccagcgagggccgcgcccagcccccgctggcacctaggggtgtgggttcccgcgcgcccctgggtgcagacctcctgtgtcgggcctccgtccttctcattggctgccgtctcgcccgctgaccgctgattggccgagacctgcttctccgcccctgagcgattaacccctgcgctgccgcgtcctcgggctgggtggggtaccctccctcccaccgcagacagctcgggtgccagctggccggcgccccgccgcggcccgcgtgggtgtcaggccggccgggcacccgtccgccctccctgcacaaagcggctttgtggagcctgccgggggttggctgggggccaggcggcgagtggaaaatctcgtgagcgcggggaggggaggggaacgcagggcggcgccccctcctctgctcgggccttggcgcctccctcagcccgcgccgaccaaccctcccagcccaagcgcctgtacacccctttcccgcccccgcaccttcccttccccaaacccacgtctctcaacccccccacccccgcatcccacccatctcccaatccctggggaccatcccccacacactctccccagtctctcttttcctcctggtccccctgcctaccccagccccactcacactgactcaccccggcgctatttttagccccccatccttgccgagccgcgccagcccaatcctgggctcgttccccaggcaaccctggccgtcgccgacgccgcccggggtgggtgggtgggtgtgtatgtggaaagcgggtgaggggagctggggacaccggggtggtgagctgaggcggggacccgggcctggagagcagggtggggagccgcaggcggccggcaggggtgcggtgcctcgcgggctcaataaatgggccccatgagtttagagtgcgcgtctgcctgtccctcggtctgtcagcatccctggctgctcgccccaggcctctgggcaggcctcagcctgtaccgcccgcccgggtggctgttgatgtcttcgtctgggttccctgtccccaggcctgggtgtggtggcacagtgggggctgtttaggggcagtccttctgtggagttggttaggggttggtgcagggggtggctgccatcacagtcctgctcagtacctttttccaactagggaggccccaattagggttggggatggcaagagagtgggagctgtctagggataggacctgctccctcccctctgctcctaatccacccccacccagggttcctccaccctgaacaatagaagctaagtatagggctggcccagcgcccagggcaggggggcccttcccgcccggattcccgcccctccctgccaggctaggcccccacttggttgtaccctgccccggacggggcctcttcccatctctcctccgtgggcactgtgtattctaccagatgtgcacccctcccagatgtgtggggccctctttccctcctgtgccatgcctggctctttttctcaaccaacagaagtcggggatctggggggcagagctcctctgagctctgtccttggactgcattgcagtagagaaggggttaacttgccagtaggtgactcactcaccggtggggagaggagggggcagtggtaggggcagtggtggggagatagcaggccacattgatttcagcctcaattcgtgcctcacattgcagtccctggggcagtgaagtaatggagggtctgagtctggggctgcataggaaggagggggcagtcacctaatagtccctctggttgcccctccaggctcacagccaagtgtctggccctgcagtctctggaggtcagagggctacagaccttcccttcccttttgggctcaggttacccagtttttgccccctctccattccttcagctctgtcagtggatgaggcaggttggggaaagggctcgtctgctcctgttgaccatccaacctgtgtaagagcccagtcttggtccatctgagcctgtgcaacctttacgtgcccaagtgtgtgaccccagtcctgtgcctttactgggtatggctccagggcccctcttgggtgatccagggcctctgggtctctgccagatgggctccacatccttgcctgtgtctttgtgtgagcccccctcgcctttctgtggtccacgtggctctgtatcattgtctaactatattccccagcctctgtttggagttccctccctgggtccaccctgaggttaagccttgagtaatggaaacagcacttgagttagagctctgggctggtacatcttgactgcatgatcttgccacagtttattcartctctgaggctcattttttcacctgaacaatgggtgtaataaagcatacctccctaggtggctgtgaggattcaatgaaccagataatacatacaagctcccagcacacagcagccccagtaagtgttagtttcctttcttcctggccctttttttctgggagggggggcggggttagtgggtggctggcagagcagtgtggtggggccagccatggtgtgctctgtggttccctgccttatactgctagacagagggtccagagtggccaatgagtgtcagggtgggtggctgaatgatggcggtggccactgagctctgtatacctgatgggcctgggtactgaagcaggtagcacccattagggtaggattatatagagggtggggtcggtatgatggtgtctgtgagagctgagtgtgcactggggataggaggcgctttgtgagtgctaggaaggctgtgtgtgtgacggaggagtgtgtggttgtgtgggaggggtgtggagtgtgtgtagtggacaagcagggctatgctgagttcctcctgtttgacatgttgtctgtttgcatgattcatgtgggctggtgggggtgtgatgaggatgcgggttggcgaagcatgtgtgacagggcatggatgagatgggtgatgtgaacaggatgggtgaatgcacgatggtgggtggggagcgatggaccgtgagcgtgtgaggttgtacatctgtgtgagcaggtatgtgaggtgtgacagcgtgggtgtaagacagagggcatatgtgcccgtggggtgygtaggagataatgggtgtggcacgaaagtgtgtctgtatgtctgtgaggagtgtgagtgtgagtaggtgagggctcaggatgcctcgcccagccctacgcgcagtttgtctgcccagcggggccaggcgcgcccaggcgggtgtgcgggaggcgggccgagccgcgcgtgagcgtgttcctcgcgcggactggacacacaacagcaccacgcacaacccagagacctccgcagcgcggcgccccgaaccgcccccctggctcggtgcctttactgcagtgcgccctccctgccaccctcctaccgcggccccgcccccggccggctcggggccaaccggagcccgccccgccctgcccttatttgcatatgactgacgttcccccggggcggccaatgggggcgggcgcggcggggcctgacccgcgcgcggcggcggcagccaatgggctcacgcgcggggggccgggcttgcgcggaaggccgcgggggaagcggggaaggggcggggggaggcgcggcggggggaggggagcgcgtagtagtggcggggcggggaggcggtggtggttcggcgcggggctcgctcggagcgcacggacgcacgcacgctggtccgtctgcccgcccggggccggaggtcgacccggcgctgagcctcgggcccggggcccggaaaggcggggcggcggcgccggcagccgggacgcgcggggccagagccgttacccgccggagctgcgagggagggagggaacgagcgagccagcgagcggggaagggagggggccgcccccgcgcacgcgcgtcgcgccccgccccgcctgccccgcctgccccgcccgccggactccgcgagggaggagggagagggagggggcggtgccgatggcccccgtgccgcgcgccccgtgacggcccccgcgcgcgccggggggcggggcggggccggtgcgcgctgacctcccccgccccccgggcggcgggaggcaggcggcgctgtgcgcaggcgcgcccggcagagacccccgcgtggggcggccggaggggggcggcgggggggggggcatgcggcgacggcctcccgctccccccgggcccaagcggcgacggccgaggagcgggctgcgggcggagcggcgtcggccgctgaggaggtgcgagcccctgccgggtcccccctgcgccggaccatgtattcggcccacaggcccctgatgcccgcgtccagcgcggcctcccgtggcctcggcatgttcggtcagtagcgcctgggccctgggactgcaggggtcaaggtgtcggggtgctaagtgcggagtaacggtggtgggggtatagtaggggagagaacagtagaggcagagtaaagggatgacggggaaagttacggagctcggccgggccgagtggttagtgatggcaggtgggagtgtagcggagtggggcgtatctggggacagctgtgatgttaaagtgatgggatggcacaggtccgctgtaatagaaaggtgaggggtgcagagtaactggctctggagcatggggtagaataggaacagcacgagacctgctggtcctaggggaggaggcttggattgggtagtggggctaaggacagggctcaggaagcgagtgaggcactgttagctgagatcagagtgacaggctgcagtgtgtggtgtagtttgcagagagcgcgacacctaagaacctggagggttgtgcactggggaggggttcaggagggagcaggaccaaaggactgccctccattgtctgctgggtcccttttccccaccccccagaaaagaggaggccttgatgggaaagatctttgcaaagagaggcacaggtctaagtccctggaggcttttatatggggttggagggcccagcgggttttcaggggtaagggacagggtcatcgtagtcttgagtgctcttcagtgctgtcttcgtgatcccagtcccttgtttcctgaggtctactttttcctttgtcagcccctctcagaatcaggtctcgaggccagtgcctcgcacagagctcccccctgtccaggcttctgaaggcatggggaggtcacctcaggtcaggttgatccggatcaagggaaggcctggaatgatggagagcagggctagggcggttccctcctcccttcttcatcttccccgagcaggggcctctctcctctgctggttccacttcccccagggagccaggcagtgtgaggggaagcccactggtatcctaggcccgccccaaaagtccagccaggggtaggtcccagcctagggcttgctcttccaccacccacctcttggggctgaaggttggacccctgggaccagcctcttggtgaggaagcatcttcctgtgcatatcctcaaggaaacacctggcacttgtgccctctctgggtagagacttgttacaattctctcttctggcccattgtccgtggtttttcttccaaggagtttaccacaccctcccctgttttgggcaagggggctggaccctggactacagataagccgaggggctgatggggaagggaggctgggaggccgatttctggatggtgcattgtctttgtgggggcaaaggagagagctgctggagccacctgtgcccagccaggaagggcaggtctggcactctgtgtttgtggtgggggaggaaggcaaggagcaggacctctcccacaccacagttgtaagagaccccacagcctgtgcatagtgaacggagagttggaggggaggggacgtggggccgtatgcctcaggaaagggaaagagagcatgaggccaaggtgagacgctgtgttgggcggcgactgggctgctgggaatgtggcatgacgggggtgggggtcccagcccgtagaggtctggggccttgggagtgtgggatggcagccaagcatgacctggtttgtggcaggagcaaatcgttcctctggcctggtccctggtggcagggctggtggagattggtggggggaggagtggggcgtgagtactatttcccttccctgcttctgttttcttttttataaatctagaaacctttcagggaggagtttttcctgagtgacgttgcatggacgagtccaagaggctctggtgttgggggtggggggtagacaaaaggggtggggctacctcatctagggtggggaagagcttgagttggggttggggccaggctctcctgctgcacagctcacctggctcctttccacagtgtggacgaatgtggaacctcgctctgtggctgtgttcccttggcactccttagtccccttcctggcacccagccagcctgacccctccgtgcagccgagcgaggcccagcaacctgccagccacccagtggcctccaaccagagcaaaggtgagggctggtggggactggggggaggcaagggtgtggggtccaggtggcctaggagccctctgatctacctctgtgtccccagaacctgctgagtcggcagctgttgctcatgaacggccaccaggtgggacagggagtgctgaccctgagcggccccctggagccacatgccctgagagcccaggacccggacccccacaccctttggggktggtggaatctggtaagggtccgcctcccaccacggaggaggaggcctccggccccccaggagagccccggctggacagtgagacagagagtgaccatgatgatgcgtgagttccctgaggcctgggacttgggggtgggatggccagagacatggccctcactgtccctgctgccccgccgcagcttcctctccatcatgtctcctgagatccagttgcctctaccgcccggaaaacgtcggacccagtccctcagtgccctacccaaggaacgggactcatcttctgagaaggatggacgcagccccaacaaggtactttatccctgcctgtcctgtgctcaccccgtggccacccacacctgtctgccaggtcctaactgtcccgctctgggctgtgtttaatgcagcgggagaaggaccacatccggcggcccatgaatgccttcatgatcttcagcaagcggcaccgggccctggtccaccagcgtcatcccaaccaggacaaccggaccgtcagcaagatcctgggcgagtggtggtatgccctggggcccaaggagaagcagaagtaccacgacctggccttccaggtaacgctgttgcctcttggctcctcccagcttcttctggtggggtgggtgagtgaagggttgccctgccctctcctgccaggtgaaggaggcccacttcaaggcccacccagattggaagtggtgcaacaaggaccgaaagaagtccagctcagaggccaagcccacgagcctggggctggcaggagggcacaaggagacgcgggagcggagcatgtcggagacgggcactgctgctgcccctgggggttagtcagccccttggctctcccaccctgccacctccctccccgagagccaccagctacccccttgcttgctcctcccctgccccagcagctcctctctgctctatcgctttaatttggcgacccttatccgtaaaggaaccggcagttgattcatgtgacggagccagggagatccacacagatactaagattcccaaacagcaatctcgttatcaactgttgtttaacgagtgtttactatgtgcctggcactacagggaatataagctgtagtctgcaaaaccccattctatttctagaagaagaaactgaggttcagagaggcaaaatcacttgcttaaagtcataaacaagcaaatgacagagccagaatgtaaaccccagttcggcgggcccccagcaccatagttggggccactgcagctcgcaaacacccctgatgkgctgcttccacttattgaggttgtctggtgtgcctggcggtgttctggggcacatttttggagtgagcctatgggtatggcagttctgtgaggttagatggatagttgctatggatatgcacttctatgagagtggggacactagttacttcctctttgagatgagggaaccgaggctcaggccagcggttggctagccagcaccacatgaacctctctccaggcctccttactttcaggagggctgccccccagggaatgggcctgctgcaacyccagagggcaggaatcagcaggaatgagatgctggactggtggtgggtggtggtttttttttttcaccaagtggcccagaaattccagcctgcttctgcctagtacctagaaatatctatgggttgttgggccagtctaggtgctggtgacaggcttactgactgtcatagcgccactctctactttacagtgtcctctgagctcctgtccgttgcagcccagacactcctgagctcagacaccaaggctccggggagcagctcctgtggggcagaacggctacacacagttgggggacctggctcagcccggccccgagctttctcccacagcggggtacacagcctggacggcggagaagtagacagtcaggcgctacaggaactgacgcaggtctagggtgcaggccccctagtgggggtgggcagggaacctgtccagggcagcagccccgctgaaccctctctgccacctatcctgcagatggtgtctggccctgcatcgtactctggcccaaagccttctacccagtatggagctccaggaccctttgcagcccctggtgagggaggtgccttggcggccactgggcggcccccgctgctgcccacccgagcttctcgttctcagcgtgcggccagtgaggacatgacgagtgatgaggagcgcatggtcatctgtgaggaggaaggggatgatgatgtcattggtgagcattgcagggcccagaatcttgcccargacccagcaggccaaggctcagagggtgggcagaacttggatccaggcccctaggcccctttgttttcttttccacttggtttatggttgcatgtggccagttcaggccctgccgagtaaatccagccctgccctcaggaagcccccagccctgcaggaaatctggaggacagggggcatgaccagatcttcaggtgcagtgttaggggctctgtcctgcaggctcataggctcctgcactgggcagtgggcactgggcatgtgggcacagccctgggctgaggagtagccttcctggacagcactccctgccggtttggagcagagctgagatccaggctccagactgtttctcctgggtccccctgcatctagccccctccccatactgttccctccactccctcagctgacgatggcttcggcaccactgacattgatctcaagtgcaaggagcgggtgaccgacagcgagagtggggacagctctggggaggacccagagggcaacaaggtgagggcttgggtcacggtgctgtcccatcacactccctcctaagccatgggaatgtctgtttctcccgggcttgagagagggggagattaaggtccagagagggcaagctgcttgccccgtggggagttgggtcatagtcaggatgaattgaggccttcagctggcaggggtgcagccctaggctggcctggctgacaggctggatgggcatggctagggggctgctatcgaggtgtcggagtgtcctgacctggggtgtctcccttcctttcatgcagggctttggtcggaaggtgttttcacctgtgatccgttcctcctttacccactgccgccccccactggaccctgagcccccagggcccccggatcctcctgtagcctttggcaaaggctatggttccgccccatcctcctctgcgtcctcgcctgcttcctcctcagcctcggcagccacctccttctcactgggctcaggaaccttcaaggcccaggagtctggtcagggcagcacagcgggccccctacggcccccaccccctggggctgggggtccagcgacaccttccaaggcaacccggttcctcccaatggatcctgccaccttccggcgcaagagacccgaaagtgtgggtggcctggagccaccaggcccctcagtcatcgcggcccctcccagcggaggaggaaacatcctgcagacactggtgctgcccccaaacaaggaggagcaagagggcggcggagccagagtgccctccgcccccgccccatcactggcctatggggccccagcagctcccctgtcccgtcctgccgccaccatggtcaccaatgtggtgcggcctgtcagcagcactcctgtgcccatcgcctctaagcccttccccacctctggccgggctgaggcgtctccaaatgacacagcaggtgccaggactgaaatgggcactgggtctcgggtgcctgggggctccccgctgggtgtcagcttagtgtattcggacaagaagtcggcagcagccacctcaccagccccacacttggtggctggacccctgctgggcactgtggggaaggcgcctgccactgtcactaacctactggtgggcaccccggggtatggggcccctgcgccccctgctgtccagttcattgcccagggggcccctggtggtgggaccactgcgggctcaggagcaggtgctgggagtggccccaatgggccagtacccctgggcatcctgcaaccaggtgccctgggcaaggctgggggaatcacccaggtacagtacatcctgcccacgctgccccagcagcttcaggtggcacctgccccagcaccagcccctgggaccaaggcagcggctcccagcggccctgcacccaccaccagcatccgtttcaccctcccaccgggcacttccaccaacggcaaagtcctggcygccactgcacccactcctggcatccccatcctgcagtctgtaccctccgccccaccccccaaaggtgagacctgggccgggcagcactaggggaggggccatagtcctgtttggctcccttgtaaccttttcctttcttgcctcttaacttccagcccagtcagtttctcccgtgcaggccccgcccccgggtggctcagcccagctgctgcctgggaaggtcctagtgcctctggcygcccctagcatgtcagtgcggggtggaggggccggccagccactgccactggtgagcccgcccttctcagtacctgtgcagaatggtgcccagccccccagcaaggtgagggcctgcctttctctctacctgctggatgttggcccctgtaccccatcatttctttgtcttttttttcagtcttttctccttctccatgtatytggttctctgtcttgccatcttccgtgatgtctctgtgcatcctgactctctcaagtcctcagtgtctgtaccctcctccttctctgtgtccccacctctcactgtcatcttgcccatcctgttctcaccccaagttctgtgttccttgcttttgcttagagtcccacttgaggtcttggtcttcccctgccccagtctggggccacagctcaccctggcctatgggtgcccttctccacagatcatccagctgaccccggtgcctgtgagcacacccagcggcctggtgccgcccctgagcccagccacactccctggacccacctctcagcctcagaaggtcctgttgccctcctccaccaggtaattgcagctgagcccatactcagaggccagggaaggggtggggcggggccggcttacctcactcctccccatttcctctcctgcggcagaatcacctatgtgcagtcagcgggcgggcacgcgctgcccctgggtaccagccctgcgtccagccaggctggaacagtcacctcgtacgggcccacgagctctgtagctctaggcttcacctcgctggggcccagcggccccgccttcgtgcagcccctgctctcaggtgaggggcrgcctggcaggcagtgctggggacccagggtggggctgaggcagtccgggccctaacttggtctcctgcttcttcttctctgtctttcagcaggccaagccccactgctggctcccggtcaggtgggcgtgtcacctgtgcccagtccccagctgccgcctgcctgtgcagcccccggaggtcctgtcataacagcattttactctggcagccctgcacccacctcctcagcacccctggcccagccatcccaggcccccccaagcctggtctacactgtggccaccagcacaaccccacctgcagccaccattctgcccaagggcccgccagcccctgccactgccaccccagccccgactagccctttccccagcgccacaggtaggtgtcagatcaacccagagcagagtgagttgggggacccaggggatgggctccagtcaggcctggctcagcaaacaattttctccccactagcaggttccatgacctacagcttagtggcccccaaggcccagcggcccagcccgaaggccccccagaaagtgaaggcagccatcgccagcattcccgtggggtcctttgaggcaggtgcctctgggcggcctggccctgcaccccggcagcctctggagcctggcccagtccgagagccaactgccccagagtctgagcttgaggggcagcccacaccaccagcccctccacccctgccagagacctggactcccacggcccggagcagccccccactgcccccacctgctgaggagcggaccagcgccaagggccctgagaccatggtgagcgcctgcaggccgtggggctcccactgccacttgrctgtgcctctccattgacgtctttgcttttctgtcctactcttctttccatgcctgtgtgtctctcaggttaaagggtcccctctgtcccttctgcctgcctgtgttgtctcctctcccatctgaggcccctgtcttggccttcctgaggccgtgtgacagccttctcaaggggtctgctgggcgggctcagatccaactctttgtttctggcctttgccccagagtctgagctcagtgttcgccatctccctgcccatctccaccccaggccagcaaattccccagctcatcttcagactggcgcgtccctgggcagggcctggagaatcgtggggagcctcccactcctcccagcccggccccagctccagctgtagcccctggtggcagcagcgagagcagcagtgggcgggcagccggggacaccccggagcgcaaggaggcggctggtactggcaagaaggtgaaggtgcggcccccgcccctgaagaagacctttgactctgtggacaagtgagcatgggctggggccttggtggagcgtgttagggtggcgggagtgggagcagctgcaggctgaggcgggggaggtgaccctgccrgccctccagcagggtcctgtcagaagtggacttcgaagagcgctttgctgagttgcctgagtttcggcctgaggaggtgctgccctcccccaccctgcagtctctggccacctcaccccgggccatcctgggctcttaccgcaagaagaggaagaactccacgggtaggcgagcattgggcacccagggtccttaggtggagggcagactggggccacctgcactgagtctgcttctgtttggccagacctggattcagcacccgaggaccccacctcgcccaagcgcaagatgagaagacgctccagctgcagctcggagcccaacacccccaagagtgccaagtgcgagggggacatcttcacctttgaccgtacaggtgccgtggtgggcagaactttgggggcctggggacctgcaagaggagtgggtctctggaaggcggttagagagtgagagaggtagggtgggtccatccaggctgggaggaagcacagcctgtcagtggtgggttctggagtctggcaggcccctaggttgccctgtgactgtgggcaggacccctctctgactcccctgtgaaatagaatgcagtgagggcttgggtgggcactcagacggtggcaggaaggccctgccgctgctgcagccttgccatgctgcctgtgccctgcacaggtacagaagccgaggacgtgcttggggagctagagtatgacaaggtgccatactcctccctgcggcgcaccctggaccagcgccgggccctggtcatgcagctctttcaggaccatggcttcttcccgtcaggtgagcctgtctyggagtcttggggtcactcgggtgggacttatctgtacatctcatcctgtgctccccaccgtttttctatctccagcccaggccacagccgccttccaggcccgctatgcagacatctttccctccaaggtttgtctgcagttgaagatycgtgaggtgcgccagaagatcatgcaggctgccactcccacggagcagccccctggagctgaggctcctctccctgtaccgccccccactggcaccgctgctgcccctgcccccactcccagccccgcagggggccctgaccccacctcacccagctcggactctggcacggcccaggctgccccgccactgcctccacccccagagtcggggcctggacagcctggctgggagggggctccccagccctcccccccacccccaggtccctccacagctgccacaggcaggtgagggacccctgagaagatgccaggacttatagtaccccctcaggacatggacagtatgtgggggcaggaaggttatctcctcccgggtaaagccatttcgtcctctccagtttggggcggaatgaggcctgctcctcttgtaaatacccccttccctcgaagctccctcccggtgctggggggcagctgaggggctgcaggggcagtctccctcctccaagcccctgtacataacctggagcgtgtgaccttcagagcttttcactttatgcaaaatggctcctgtgagggctgcaagctggagggtggtgcaggccttgggccacagggaggcgcctgtggaatagggggagttcatgcaccccttttttycccagaggggctggactcaggttagtttgggggtgggggctcctgcactttkccacaggcacggggagggttttctcctcaccccctctgccctcccaacttgggttgtactttctaagaaggtgattccccctgcccttgcccccttccccagaacaaaacatgttgatcatgtgcaatatttcttactgtgccgagaagccgcaatgagcgagattaaagctgtttaacacacctgtgtggctgtaggctcttaacagggagggctgttggttgtaccagtcctgtcctgagttgtcatggagcggtaggctttccatgaggtgggggcaacaattccagtaccactgcccccaacttcagaggaaccccataggccaggtccctgacttgctgtggaccagatggcccctctccagtttaggagcctgtgcgctccgggagcctcaatgcctgctggccctgttctcagccattggactgcgtgagtttggggaaggcctgaggcaagatgccactggatggtttaccctcactggctctggggtcattcgtactcaggaaacaggtcccaagaggtcctagcccagaggtggcagtgggtgggagggagcctagtctacctggaatacccttggtcctcagtgtgacccctgctgcccccatgtggcctgggcctgcactgcaactgggcttgaaggaacctcccctgggtgacacccctcctgctcagcatgtggacacagtgcccacctgaggtgacaagatacctacaccctgtgtggagggatgacaactaggagtgggagggtcaggacacctccacagaagtggcatctaagctagagatggagcaccaggaagttccagccagggcaaccgcatatgcactgggtcactatgttcccagaattcttgcctgagcttggtcctgtaggatagtgctggaaagctggtcttaactagtgtttactgattggtaacgcctgcctgaagcacactattgtgatagtggaaattaacctaaccacaagaatcacagtgccttaatggatcagtgatacctgccctgggcagaaatagaaccacagccaggcatggtggctcatgtctgtaatgccagcaccctgggaggccgaggcaggtggattgcttgagctcaggagtcagatcagcctgggcaacatggcaaaaccacttctctacaaaaaatacaataagctggacctagtggcacatgcttatagtagcagctattcaggaggctgaggtgggtggatcacttgagcctgggaggttgaagttgcagtgggctgtggtctcaccactgtactctagcctgggtgacggagagagaccctgtctcacacaaaaaacaccttgcagaactgcagggtcacagatcaggataaggactaatggtggtacccagatacccagacaggttcgaccataaagcaggaaacagcacactgaggaaggagagtttaatgttgtgggaaggcagcaggatgcttagggtgcgggctccagcaggggagcaccttggccctggtcttgggccagcagacgcagaagcagggagtgcagagcccggcaaacaggtgtgtagcccaggcggctcagatgcaggtaatcatacatgtcatgatggctgatggtgccatctgagtgcacaaagccagggtcggcatctaggaagtgggcccgagggtggccagccagtgccgcccgtaccagctcgttcacctgtcggttcttctcccgaagtgggttgggatgttggcctcgcggaagcaggccctgagcaggaacacgaggcgtagtaaggaaacaagcatttgagtatcttgttctctgtgccaacctgtcctccacccaccaccatgaagtttccagctgcagaaaacactagggatgggcaagtggggagggtgggagggtagttcctaaatatcacatcctagccctcatttagcaagagacttctgggttttaccctctttcgttttcttttttttttttttttgagacagagtcttgctctgtcgcccagactggagtgcagtggcgcgatctcgactcactgcaagctccgcctcccaggttcacgccattctcctgcctcagcctcccaagtagctgggactacgggcacccaccatcatgcccggctaattttttgtatttttattagagacggggtttcaccgtgttagccaggatggtctcgatctcctgacttcatgatccgcccgcctcggcctcccaaagtgctgggattacaggcgtgagccaccatgcgcggcctagcctctttccaagtatcacttagaaaaatgttgacattggctaggttcagtggctcacgcctgtaatcccagcatgatgggaggcagagctggataggtcgcttgagcccaggagttcgagaccaacctgggcaacatggtgaaaccccatctctaacaaaaatacacaaaaattagtgggacatgatggcgtgtgcctgtagtcccagctactcgggaggctgacgtgggagaatcacttgagccctggaagcagaagttgcagtgagctgagatcatgccaccgcactccagcctgggcaacagagccagatcctgtctcaaaaaataaataggccaagggaggttgctcacgcctgtaatcccagcactttgggaggctgagacgggtggatcacttgaggtcaggagtttgaggccagcccggccaacatggtgaaatgccatctctactaaaaatacaaaaattagccaggtgtggtggcacgcgcctgcagtctcagctactgtgaaggctgaggcaggagaatcacttgaacccaggaggaggaggttgcagtgaggccagattgcgtcactgcactctggcctggcaacagagcaagactctgtcccaaaataaataaataaataaaagatatcaacatcatggctcatgccaagggatcaatccgttttcagaagaggaaatatcctagctacctacaagtgatggagcctagatttaccccaggaatgcctgacaacttttggcctattcaaggttttttgagggtttttcttttgttttctggtgagacagggtctctgtcacccgggcgagagtgcagtagcatgatcacagctcactgttaccttgaattcctgggctcaagtgatccttctcctttagcctcccaagtagctggggttacaggttttgcgcaccatcatacccagctaattctttttttttttgagatggagtcttgctctgttgcccaggctggagtgcagtggcacaatctcggctcactgcaagctccgccccccgggttcatgccattctcctgcctcagcctcccaagtagctgggactacagacgcctgccaccacgcccggctaattttttgtatttttagtagaaacggggtttcaccttgttagccaggatggtctcgatctcctgactttgtgatccaccctcttcagcctcccaaagtgctgggattacaagtttacaggcgtgagccaccgcacccggcttttttttttttttgagacagagtttcgctcctgttgcccaggctggagtgcaatggtgcaatcttggctcaccccaacctccacctcctgggttcaagcgattctcctgccttagcctcccaagtagctgggattataggcatgtgccaccacgcccagctaattttgtatttttagtagagatggagtttctccacgtgtggtcaggctggtcttgaactcccgacctcaggtgatctgcttgcctcggcctcccaaagtgctgggattacaggcatgagccactgcgcccagcccatgcccaactaatttttttttttttgagacggagtctcgctctgtcgcccaggctggagtgcagtggcacagtatcagcttactgcaagctccgcctcccaggttcatgccattctcctgcctcagcctgccaagttagctgggactacaggtgcccgccaccacgcccggctaatttttttttgtatttttagtagaaatggggtttcaccgtgttagccaggatggtcttgatctcctgacctcgtgatccacctgcctcggtctcccaaagtgctgggattacaggcgtgagccaccgtgcctggcccgttttttagtttttcaatacccccaaagtcttaagccatccctgggcaaaaaaggctaattggtctcggagcatattctcaaccacagccactctgaagggtatagcaagctccaacgtgagattctgcctaaaagccactgctctatgtcaagctgcctagaactgtgccaactgtggctatatctgagggggtcccagaccactgccattcttcctttcccactctcccagcctctcaccagcaccacaacccgggcctggggctgtcgctcattcaccagttgcacaatggccttgatgccaccagtcacctgctctgctgtgtgtccgtggttgttggtgcccacccagaccaccacaatctgtggaaaaagagacatgaagcagcggtgagggggcagccaaaagatgttttagagccccacccaagccccgctcaccttgggccggatgtgttccagctccccattctccagccgccacagtacatgctgtgtgccgtcaccaccaatgccaaagttaagtgcatgcagaggagagaagagctcgcgccagatctgtgggcaagaagtggtgtgggcaagaagtggtaggggcacaagggcactgtccgcatggaccatccccctctgtccaggtgttaaccaaatgccattatggaagaaccttacttcatggaagcagtcttaaaattttacctggagcaaactccagcatggctgaacctcactttatagaaatctattagagtctctcacttattttattttattttatatttttgagacagagttattttatttttgagacagagtctcactctgtcacccaggctggagtgcactggcactatctcggctcactgcaacctccgcctccctagttcaagtgattctcatgtctcagcctcctgagtagctgggactacaggtgtacgccaccacgtccagctaattttttgtatttttagtagagatggggtttcaccatgtgggccagactggtctcgaactcctgacctcaggtgatccacctgcctcggcctcccaaagtggtgggattacaggcgtgagcccatggtgcccagcctatttattttttgagacggagttttgctcttgttgcccaggctggagtgcagtagtgcgatctcggctcattgcaatctctgcttcccaggttctggcgattctcctgcctcagcctgccaagtagctgggactataggcatgtgccaccatgcccagctaatttttgtatttttagtagagacaggatttcgccatgttggccagggtggtctcgaactcctggcctcaggtcatccgcctgccttggcctcccaaagtgctgggattacaggcgtaagccaccacaccctgcctagagtctctcactttaaaccaagccccaggctctgttgctcatgctgaggtgggcggactgcttgagcccaggagttcaagaccaacctgcgcaacagggcaaaaccccatctctacaaaaattacaaaaattagccaggtgcatggtgatgtgcacctgtagtcccagctactcggagactaaggtgggaggatcacttgagcccaggaggcagaggttgcagtgaacagagatcataccactgcacgccagcctgggtgacagagcaagaccctgtctcaaaaaccaaccaaccaaccaaccaaccaacaaaacaaaccaagccccatagaagcaagactcacttcatgaaaatccagtctgcttgagccatgcattgaatcaatggcattacagttgaaacttattttgatgaaacccattacagttggacatgctttgtggaaagatattattatgattgagtcctctttgtggagtgccattagagttgcccttcgcttcctgtaaagtgactatagctttgtgtaaacccaacagggctgcgcactacttaaagcaaacaagaaagagcctcactttaggcaagcctatggcaggaaagcctcattttaggtcttagtacattatacacaaatccaatctgataaaaccaaggcatacatttctttctcaatagaat

SEQ ID NO: 97687 - DNA, 82968 bp, Homo sapiens
gggccccatgtgtccaaggggctctggccattcctactcacctcgttcctgcgcccctcagggccttgggagggagttgccccagtactgttagaaacgtttccaggctgggcgtggtggctcacgcctgcaatcccaacattttgggacgctgaggcgggttcacttgaagtcaggcattcgagacccacctggccaacctggtgaaactaccatctttactaaaaatacaaaacattagctgggcgtggtggctcgtgcctgtaaccccagcaactcgggaggctgaggctcgagatttgattgcacccaggaggccgaggttgcagtgagccgagatcacgccactgcactcccgcctgggcgacagagcgagactccatctgaaagaagaaaagaaacatttccagacctactccttgaacccaaacacagaggaatttcaacttatcggatgaggaaactgactctcagaattgtgttatttatttacttacctgaagccactatgggatgcgtctcacagtgagacccggggccaattctatggccatttggtcactagatgtcctaaccttctcatggattaaattccctaacaccaggcatgtatagttaaaacagattcccggattggaatcctggttctagggcaagtcaactgtcctgagcctaagtttctaatctgtgaaatggggctaataacagccccatttcatgtgagccccatttcatctcatgtgaggcagagagtaaaagacatctaggagttactcattttatttttattttattttattttattttattttattttattttattttatttatgagacagagtctttctctgccgcccaggctggagtgcagtggcgcgatctcggctcactgcaacctccgcctcccaggttcaagcgattctcctgcctcagcctcctgagtacctgtgactacaggcgctcgccaccacgcctggctaatttttgtatatttagtagagacggggtttcaccgtgttggccaggatggtctcaatctcctgacctcgtgatccacctgccttggcttcccaaagtgctgggattacaggcgtgagccactgcacctggcctatttttaaaatttaatttaattttttttttttttgagatggagtctcactctgtcgcccaccgcccaggctggagtacagtggcacgatctcagctcactgcaacctccgcctcctgggttcaagtgattctcctgcctaagcctcctgagtagctgggactacaggcagacaccaccactctcggctaatttttgtatttttagtagagacaggtttttgcaatgttggccaggctggtctcgaactcttgacctcaggtgatccacccccccacccagcctctcaaagtgttgggattacaggcgtgagccactgcgcccagtccctaattttttttttttttttttttttttttttgagacagtctagctctgtcacccaggctggagtgcagtggtgtgatctcagctaactgcaacctctgcctcccaggctcaagcaattttcagcctcctgagtagctgggattacaggcatacaccgccatgccctgctaatttttcctagtttttggtagagatgggtttttgccacattggctgggctggtctcgaactcctggcctcaagttgatccatctaccttgacctcccaaagtgctgggattacaggcatgagccaccatgcccgggttttttttttttttttatagagatagggtctcactatgttgcccaggctggtctcagaactcctgggctcaagctatcctcctgtcttggcctcccaaaatggtgggattacatgtgtgagccactgtgtctggccagttgttatttttattagtatctccgggagcctaataataataactaacatctcttgagtgtattatgacgtgctaggtattatgctcaatgcttacatgcattactcagtttaatcctctcaacaaccctatgagagagaaactgtcatgctgactctacaaaacatcgaggccccagagaagtaactagtcgtagttcccatagttaggaagagtcaggattccaacccaggagttgaccttacagtctacattcttggcccccaggctcacctgcctgccaggcaggaagttcaagtggttgcatgttgaagggttgaatgcaagaagtggaggaaagagttggtggaaattagtgagctaaagctaggctcggcctgctctgaagcagtctgggtttgcccttagggcaaaatcacctggggtaggtgacagagaagtggaagccatgctcagtttttgacaggctgtgtgaccttgggcagattcttgcttctgctgaaacctccttttccccacttgaaaatctgaggatcaggctgggtgcggtgggtcacacctgtaatcacaacactttgggagaccgagacaggccgatcacccgatgtcaggagttcaagaccagcctgaccaacatggagaaactccgtctctactaaaaatacaaaattagtcaggcatggtggtgcatgcctgtaatcccagctacgcgggaggctgaggcaggagaatcacttgaaccccggaggcggaggttgcagtgagccaagatggcgccattgcactccaacctaggcaacaagagcgaaactccatctaaagaaaaaaaaaaaagaaagaaagaaaaaataaaagaaaagaaaacctggccgggtgcagtggcttgcgcctgtaatcccagcactttgggaggccgaggcaggcagatcacgaagtcaggagatcgagaccatcctggctaacatggtgaaaccccgtctctactaaaaatacaaaaaaagttagccgggtgtggtggtgggcgcctgtagtaccagctactcaggaggctgaggcaggagaatggtgtgaacccaggaggcagagcttgcagtgagccgagatcatgccactgcactccagtctggacaacagagcgagactccatctcaaaaaaaaaaaaaaaagaaaaggaaaaaaaaagaaaatttgaggatccaggtaacttctcaggccttttgcttggacttctcaacttgatttgggtggtgcaggtctcttttctccagatcatataggaataagctgaggataagctgaggtctttctggaggtggtagtgcaggactggctgggatttccgggacaggttgaatttagaggggatggtggttggtttttgttttttgttttttttttggagatggagtctcgctttgtctcccatgctggagtgcagtggcatgatcatggctcacagcaacctctgcctcctaggttcaagcaattcttgtgcctcagcctcccaagtagctgggactaaaggagtgtgccaccgggcctggctaatttttgtatttttagtagtgacggggttttgccatgttggccaggctggtcttgaactcccaacctcaggtggtccacctgccccggccttccaaagtgctggggttacaggaatgagccaccgccctggtcgaaaggatggtgttctgtgttgaggtccttcataagcaaagtcccagaggcaggtgtgaatctgggcttttaggcctgactggagttaagtgtggatgtttgagggggcggtgtagatgttgaccaagtggggtaaggaggtgtgtgcaaagttggtggtccttcagcgtcagatatatgtgtcagatgtgtgtccaggatgccccacatgccagcttgcagagggcttcctgtgctgggctggcatgtggtccaggagttgccatgtgccagctgtgtgttcgaggcatgcggtcacatatgctgtgggccgcacgtgagtgtgtcagtgtctcctccccatcacgagcatcgggggtggtggtgagtcacgggctcagccttcggcgccaactgtcatgtttcttccccccaaatttcaccccccacccagccatgcaccacccacccccactccaagatctgtgtcgcttctctcttccatccccctgtcctgctcagctccttctgagaggctgcagggtgttccctgggaaggagtctcccacttctggctctgccctccagcttcctctccttgtcccatccacctttcccactgcctctctgctcctgtgactagagaatgagggccccttctctccacccactcatctctgtgggtcccaaggatttctctgtgcactatagggaattctcatactcaccacccatcccctcacctctataggagctatttatattgggggaggcttgccccgcatctccaggctggcagctcctgcctcagtggctctcttgtgtctatgagccacatccttgtctttttggtaccctggtgtctgtaggcctcccttgtttctgtgaccttcttcggctctccttggctctctccctgccctgtggaccgctccccatatctgaggagtgctttctgtttccaggggcctctctcttgtgtctctggcttctcccgttttccttcgcgggaggtctctatgtccacattactgccccttgtctccgaggtccttttgcttgtctctgtaggctgctcccttgtctccatgggcctttctttcttatccctgggcttttcctgtccttgtccttgtggggtttgtgggcctcagcccacttctctggacagtcttgacggctgtctctcttctcttcatttctcttcatctctgtagccctctcccctcatctcagtggccttctccctgggtcttcttgcctctcatctctgtgggctcctgtgcccagggctgcctgggcagggcggtggcatggtgtggtagagggggtggctcgggggtgggccttccatccaatgcagctccttcttctcatcagcattctcctcgcggggggcccccagccccaaccaatacaggctccccctcccccgactcacctccctactctctctttgcctgcctccctcccttcctcctgcccgccctcctccctgcctccctccctccctcttctctctctcctgaaccaccccactgcgctccaggacccagcgcaggcggcaggcgggcaggcaggcggcggcctcggaggggagactgagcggtggcggcagccagcggcagggaggcaggcccagccggggactggagccggggactggagccggctcctcacaggggaccaggagtgtgtcgccaggccctcccactgaggcccagcaccgggagcccctgggacaccccaccctcctccgcctttctcttccacctgctcctctccatcctcctctccctcctccctatctctccacctcatttgcccccttcttggcctctccgggtctcccagctctccatcctccccagctctccactcccgggctctccccgcccccagcatgcttttcccgtgggggctgagggcttgaggactccgggcccttgcctcaaccagggcagggcccaggctccaggggggagggggaaagggggcggccccctcccccagcaggccctcccctcccccacttctcctgatggccggcttccttttctccacccagtcctcgccccctgtggcccccccaggccggcccggctaggggagggggcgggggccctttcctgggccagcttccccctcccccggctttgcctgtgccccccccttccgttttcaccttcctctcctcctttcctccctccttcccctccatttgctccttccccctctcctctctccccttctctcctccattttctcctttccccttcctcccctccccggcccgccctctcctcttccacctgtccttcctccctgctcctgtggagccaccgttttggattagttgggagccaccaccggcggcgggggagggggccctgtggactgccctctccccccgcccagccccaccaccacccagcgccagagcacctcccgctgtcggtcttcgggcctcgagggagcccagccctccgtcccaccaggatccgtgagtgtctgcagggcagggattgggctgggttctgggtcctggaaggctgggctctggtgccgcctggcaggggggcaccacattctccccgttctccggactggcaagtaccctcccccactaggggcctgctctgcgccctccatctcctcagcgtccattcacctcgacctcttctcacctcttcttctgggtacatagctcactgccgcccctggccctctagctttctggggtcctacggggctgattgctcttacttgggctctcacttaccccgggcccctggcatgtccgtgcccctgctgtctccaagcctccgtcctggtcccagactggctctttctgttcctctgagcctcatcctctgcctgcggtgggccttggccctgtccccaccccrtccagtctctatctcctggatatgtctttccgcttttgagcccccatttcctgtgtctcttgggcccctctctgactctgcccaacttctctctttgctgttagcccaggttgctctcggcatgtctctgtttagatccctctctctgtcagaactcctccaccctggcttccctctttccaagtctccctcggcaggtctctttccatttctctttctattctgtgcctccgctcacctgtcctcctccctctctctgcctctgagcttggaggctgtcttccctctgtcacttttccacctctttcccccagatccactctgggtgcccggctcctcagtccctccctcctcagctgctgccccacctctccgtggtccatgctgacttttcctggctggtctggctctttccactcccattctctctcccgacttctgtgttacctcgcgtggcctttctgctcccattcctctccatgtctgggggctttcaggccccaggatctcctgctcccccacacggcattcctgagtgtcttggggtggctatgcctctgtgtgggtctggcctctcctgcaggtgcttgccctgtccctgcctgtgcccctctagtgcactcactccatctccccacctcagtttccctccctgactccccctttctctctcccaggtgcttttcccccttgccccttcctcttctatgggcctgtcgtgcagctccgacatactgtctctctttccgactggccctctctctttgtagagtttggccatttctttccttctcccaagtcttgtacctgctgctgtttctttatctccctttgccttctccctcaccctgtgtgccttcgctggccctccttgcctctcacctttgctgatgtctctcctatgcccactgttgctcagctctctgctgggttttgacttttatctggctttgcccagtctctggggctgagtcctggacctgcctgacaccctacctgccctgtctctgtctcctttgctgtctcacttctaggctgtgtctgtctcttgctctctcacttagcctcagttcctacgtcttgggctgtctttctgtgtgtatctctgtgtccacctgctgcccctcaaccctgtctttctctgtctgctcccacctttggctgccacctgtgggtccctgtccttctgtcccatctctccctcggtctttctgtcctttgtcctctgctccctgatttgccccaggagtccctggtgtctcaggatgacccactccactcctgcctctctcctagctccgcccttcacactcctcccactctgagcgctcctccgggtctcccagcatcccttgtgcctccatccttgacaagccttcaccttaatccacattatagtttgcagtccccagcctgtccagcataccctcccacctagcactctcttcttctcagaggcctagaaggcagtgacttgctcaagatcacgcagtgagtcaggggcagagctgggactgatccccagcctaggttttgcaggccacttgagatggtgagaaggacttgtgcctctatccttccctcgaagttctcattccacagtttcaccagctcaagctgtccttccatggggactgagtggggtccggtgtccaggcccacttcacagcattctgtgccccccacagtaaccctactccatggaaacccaagcatcccttcccgtggggcacagccctcagccaggggaagtggagctgtgcatctggccaaactccttgcccagtggttgccctgcagaaagctggggtgcctagaggaatccctgactccttaggggtggagagttgtgaagagcaaagatgcaccatctccccctttacttcttctccccagtagggtggggggcagtggtatggcacccacttctggcaggcagctccactccctgccttactcactcctcccttccagctcttcctgcttgtatccgagtcggttcctatcttttctccatcctctgtctccctcttcctgtgtctcgcctgtgccttggtttccccacctccagcctgcccctctttcctccgctccctgctctgtcctttctttatcttgcctcctcatcctcctgtctcttccctctttctccctcctagtcctctccctgcctccctgtaactctcctcttttctctccatttctacccccattttcctattgtcttgtctttctcttcccttgtatttctatctattttgacctttctctctttctgagtctctctgtctttcccttctctaagcctctctttcactttctctgtttcctcccttctctctctttgctttttttttttttcccccttttactgctctgggtccattcatctatggggttctgtgtgtgcctctctctctttttctccatctctccatctctcccgaagtttcctaactcccagatactctctcctccagacctcggatgtccaggcctctctccccatgggattgtgggaactggggatgttaggaaagtggcaagtgaggcctgggatggggttgcctagcaaccaccgcatcctctccagccggtttctgttgcctagtaacggctgcctgcccagagacaggggcgggactgggtggggggtggcacttcctggtttcctatttgggtggggctggtcccaggaattcactcctacctgagaacctcgcacgcctccctcctgttttggtagctgtgcccatcctctctcttgcagcctgtcctactcagcgcctgagcactgtgacctccaccctggtagtgcccctctgagctgagcttcccttcttgcaatgccctcagtattgccagcttctaaacagagcagggctctgcagagctgtgaactgcttgccaacaatgtccccaaggcttctgtgaccaccccatccagcaggcctccaaggggttccatcccaccacatagtaatctccccttggtctggggggtctccctgcaggtggcgagtgggggccgcggcagctgcgtccccatgaggaggggaggaagatgccggctgagctgctgctgctgctgattgttgccttcgccagccccagctgccaggtgctctcatcactgcgcatgggtgaggccctcccgcaccctgcccctgcatcctcaggccctggggctcctctggggacccaggcatgccagtccgtcagggtccaggtctcagctctcttcagcagcaaggaatcccagcctccagttcctccttcccccaggacccaggagtccagacccctagctcccaccaacctcagatccaggtgtctagacccctggtccgtatacccacctcaccctagagccctggagtctaagaccacagccccctccttcctcaggactcaggagtctggtccccaacccatgtgtcccctcagctgcaatcctggatgatcagacagtgtgtggccgcggtgagcgtctggccttggccttggcccgggagcagatcaacgggatcatcgaggtcccagccaaggcccgagtggaagtagacatctttgagctgcagcgggacagccagtacgagaccacggacaccagtgagcggggccatgggggcgtggggtgaggcagggcaggtcggtggccctcagtccatccctctgcccctggcctctggcctggccttgtcctcttctagctccatcctcccccttctttgtgtttgtctctgccttcttcccagacatggctgctgctgggcctgggggttggagaggagggagagcataagccccagttctgctctggaggagcacggggcggcgttgaaaagataagccctatcatcccagctggctggggatgcttgttagcccccagagcttaataacaagccccaggcatggagggcaggaggcttgggcgagggtcagcaaaggcattctggagaaggctagtctgaaactgagctctgaaaggtgaacaggatgtagaaagagtggcgtggctccaagcacggccggccacatcacaggggtgtggaagtgtctatggaatactgatgggctgaatgttcgaaggtgtcacttgaacagatgtgctggagttagacctttgggagatgctgccttaaaacatgttttagacaggtttctttcctgcaggccttatcagaggctttatggtgttcgtgtatgtttcagatcagtaagaggaagaatggggtatggcatttcacaggcttttttggctgatgtggcacagagtacaacttgggagaagctgggatggagggtgaggaggcagatggcattccagtcatgtgcctagagtctggagatgaggtggggatcggggtgggagcagagggaagtatttggagccaagaaatgggggggtatggggttgagcccatcctgaatccacctggattcaggacatatttggagagattgtgagatacttcagagctaagtgtgacagggtagtaggaagcgaggctgtgcagattgtcacgctggctcaaggaggctacagtgccagggtgaaagatgccaccttcacccacaggcactgggaagccattgataggtctataccagggagtgaggcttctggaaagagaatctggagactggatttgggtgatgagtgtgtactctgatatatgtctgagttgagagtcctaaactaggtcaggggccaaggggttgaagagaaggggatacatgtgagaaatttgaggacaaagaagagacaggacatggtgactaactggctgtcaggagagagattgaaggcaaggaccatttccaggcatctggtctgtgtgaatggtggggcccttaccagtgtggaaggtccagaaggagccagtttggaggaaatgaggtgttgagttatgatgcctttagttagaggtggcagaaaccaaactcagcctggtttaaggaaaaaagagaacttattagctcatgtcactaaaagacctaaggacaaatttcaggcatggctgaatccaggtgttcaaacgatggcctaggattgtttcaggcatggctggattcaggcattcagatgacatcctgggaatctctgtgtctttacctctgaggcctgctttcctctgagttggcttcattttcagaaatgctctctcaactggtggtgagatggccccagcagcaccaagcttacatctcaccagtttagcaaacccagtgataattgtagcaaaagacctggggaaggtgctccatggtctgatttgcacccatatgtatttctgaaccagttgccatggctagaagaatggagttctgtgactccccaaggcctgcatcaggtgccagtcaatcctgggaaccctggactgaagggtgaggatagttcccccaggagaagttagggttctgccatgagaacaggcactggacaagcaaaaacaacagctttccacctcccagtcttgagacacacatgtgtataaggaggaagagagcagaagaaagaggaggaagtaagtgcagtgggagagtggtgtttggagtatgggaaggctccaggggacctgggctgtggggtcaggggaggaggtggtgagtgcaccgtgggttgtggcatggctgaaaaggttgagaacaacagtggctgagggactaggcacaggctttgtaggcagaggaggcccctggtgtctctttctcttcatcccttcctttgatctcccttggcctgacctgtccctctgttgctgtgtcctcatctctctccatctcatgccccctcatgttcacttgttgggtggggtcagagactggccttctgggtcccggatggcagaagaggatcaggcagttgccagtgtctgatcctctcctgggccatggcggctccctgagggatggggaaggagaggaggcagggggtccctgactctgcggtctcttccccttcccacgcagtgtgtcagatcttacccaaaggggttgtgtctgtccttgggccctcctctagcccagcatctgcctccaccgtgagccatatctgtggagagaaggaggtgagatggggagtgtgggccggcgctttgtggggagcgggtccctgggaggcgagggctgggcggagaagcaggatggaggccaaagtttcctctctgtccagatcccccacatcaaggtgggtcccgaggagacaccccgccttcagtaccttcgcttcgcgtctgtcagcctgtaccccagtaacgaggacgtcagcttggcggtctcccgaatcctcaagtccttcaactacccctcggccagcctcatctgcgccaaggctgagtgtgagggagaactgaatgttttgttttctgttcccccagacaccccttcccaagagatctggtgtcccacacagtggttcactgccccctagttagaaccctggggcacccaggcaccaggctcttctcccatcttcagaaaccgaggcctctggttctacagaccccttctctccccaaagagatccatttagtccccagatggtgactaagcacctgccatgtcaaggccctctgctaggccctgggcgtggtccctgggtgcttggaactccggttctagtggaggtcattggtcattgagctgttgtgatacagagtggtatgtgtgctgccaggaggcacgtggagcctctggtatcacataggagggatcctaatccatctgggaggttcagagcctgtgtctatgagaaagagacatccaagctgaacctgaagggtgtgggaagaaagagggaacaggttctaagtagaaagtgtgacgggcagaggtagagggcccagggagcacagcccttcaagaggcttgcagatactcccagtggctgaaatgtgagaacaacgaagcaagagatgatgggagccatgggaagtccccacgccgggcagggcgaggggacagggtcagattcgtgttctaggaagagccctttggctgcagtgtagagaacaggctggagagtgacaagaggggtggcaaggagacaagtgaaaggcaggggagaggcgacactggtctgggcccaggtggtggcagttggaatgagggggccagggtgatgtgagaggcgtgagggaaagaagagggtggggctagggatggtgcaaggcctttgccaaggaggaacacgattcatcggggcacacgtcgggcatggtgtgtctttgagacattcatgtgagatgtctggtaggctggtggatttgtgggtatggagcttgaggcaaggaggaactgtgctccatagcctctagaaggaattcctccttcaagaagtatttattgggccaggtgtggtggctcatgcctgtaatcccagcactttgggaggccaaggtgggaggatggcttgaggccaggagttcaagaccagcctgggcaacatggcgagatcccatctcttaaaaaaaaggtatttatggccgggcgcgatggctcacgcctgtaatcccagcactttgggaggccgaggcgggcgaatcatgaggtcaggagatcgagaccatcctgtgaatggtgaaaccccgtctctactaaaaatacaaaaagttagccgggtgtggtggcgggcacctgtagtgccagctactcaggaggctgaggcaggagaatggcgtgaacccgggaggtggagcttgcagtgagctgagatcacgccactgcactccagcctgggcgacagagcgagactccgtctcaaaaaaataaataaataaataaataaaggtatttattaagcacctgctctgtgccaggctctgatcttggtattggggtcagccgtgggtgaagtagtccaagtacattctgaggagaggacttgggcaaaaaacaccacaaataagtgcattacatggttagaagtagtgagttctatggaaaagtagaaatgacttatgaagaatggtatgggcgtggggtgcaactttaaatgaaatggtgggcgagggcctcattgagaaggtgatgttggaatagagacctggaggaggggaaggagggagctgtgtaaggatgtgagaggagagggttctaggccaagggaacagccagcgtgaaggccgcaggacaatagcaagactatggtgtgtgcagaacagcaaggaggtggtgtggctcaagcccagagagtgagtgatggggagaggaggagctgtgggctggatggttaaaaaaaaaaaaaaggtatttattgagcagctgctatgtgccaggcctggctcttgatattaggctattagggatcagtctctactctagtgtctcaatgaggcccccgcccaccatttcatttaaagttgcaccccacacccacactagactcccagtcttcataactcatttctgctttaacatagaactcattatttctaaccatgtaatgcatttatttgcggtgtttgttgcccaactcatctcctcatcctgtacctggtctgcttcactcacagctgacccccaataccaagagcagagcctggcacagagcacatgctcaacaagtaccttttttttttttttaaagagatggcttctcactatattggccaggctggtcttgaattcccgcagtctgggcagtaacaaggggttgagttgggcagattgtgtggctttggaggctgtgaggactttggcctctaggactctgactgagctgggaaggcatttgagggtttggggcagaggaggagcacatctgacccgtatcattctggctgctgtgtagggaacagactcaggggcaggcttggggattgcagcaggcaggagttggtggtggctcaggacagggtggtgacagtggcacggcgtgaggggatctgatgtgtttggaagggagggccttgatggattgggtgtgaaagagaggaagccagagttttggcctgagcgactggcacactagagatgctgttcaccaacatggggaagccgtggtggttgagcaaggagattaagcatgagatacctgtcaagacacccaatgaggggtcaggaaggtggcagagacaggaatctggagttctaggaagaggtctaggttgggattttaattggggagggcccaggctttgggtccccaagcccattaccccatgggacccagctgccccatgtccttgcacaccctccagtcctctgcccagctgccccatgttgaggaggagagagtgtctacgccatgcctgggtacccagaagggctccaacccaaggccccacccctccctcaggcctgctgcgattggaggaactggtgcgtggcttcctcatctccaaggagacgctgtcagtgaggatgttggacgacagccgggaccccacaccactgctcaaggagatccgtgatgacaaggtgtccaccatcatcatcgacgccaacgcctccatctcccacctcatcctccgtaaggtgaggcccctacctctgatttcccaaaggactggggccagaaacttggggtgaccgagcaagtcacccaatgcccatgggcctcaggagtcaaaagggggcttcaagaccttcttcttccgtgaagatgataattgtaaagtttgtctctcagcctgcctgcttcctggttgtgtggtcctgagcagtcaccgcatctccctgtgaatagtccctgctcggtgggttgtgagggttaatgagtgaggctaagggaacagccagcgttcaggctgcaggacaggagcaagactgtggtgtgtacagaacagcaaggaggcagtgtggctcaagcccagagagcgagtgatggggagagaaggggctgtgggcaggggcaggtaaagtatgcagggcagtgcctggccccgagtcagatctggctacatcgtagctctgaaggatttttaaacattttttattgagctctgtgttaaggtgtttttgcatgtattttttttcttttttctttttttttttttttgagacggagtcttgctctgtcgcccaggctggagagcagtggtacaatctcagctcactgcaacctcagtctcctaggttcaagtgattctcctgtgtcagcctcccaagtagctgggactataggtacctgccaccacactcggctaatttttgtatttttagtagagacggggtttcaccatattggccaggatggtcttgaactcctaacctcgtgatctgcctgcctcagcctcccaaagtgctggaattacaggcgtgagccaccacacccggccaataaccaaatttgtattatttatttttctctacttttttttttttttaattaaaaccatatgtcagccaagtgcagtggctcatgcctgtaatcccagcactttgggaggctgaggcgggcggatcacgaggtcaggagattgagaccatcctgggtaacacggtgaaaccccatttctactaaaaatacaaaagaattagccgggcgtggtggcgggcgcctgtagtcccagctactcgggaggctgaggcaggagaatcacttgaacccgggaggtggagcttgcagtgagctgagattgcaccactggactccagtctgggtgacagagcaagactccatctcaaaaaacaaaaaacaaacaaacaaacccatatatcactgctgactgtagcccgcaggaagtgtgaacagaatccactgggttcttgagacaggatggcttaaggaggaggtttcaggtttgggagccaggcaggcctgggctgggatcccggcccctcccgtgccagccgtgtgaacagttgtctcttccctctccaagcctgcccttccctgacacccacgtgatgagagcccaactcctgccacccaggaaatgcaagctggtgccctttaatgttataattctcgtggggggacagacttgggtgcttctggcaggaagaatttttccagctttgttttcctcgaggattatgagaaaagggtctcaagaatgaatcttgacgttcaaactggctgctattattgcaaagcacttttaaagattgcagggaatcgattttctgaccttatgcctaggctgagtcctacacatttgcagcccaaccttggcttttggagagtgtagggcttaaaattaaggctctcctctctgctgggcctggtggctcacacctataatcccagcaccatgggaggccaaggcaggaggattgcttgaggccaggagcttgggaccatagcaagaccccatctctacaaaaaaacaatttttaaaaaattagctgggcattgtggtacatgcctatgattccaggtactcaggagctgaggtgggaggatcacttgagcctgagaggtcaaggcttcagtgagctatgatcccaccactgcactccagcctgagtgacagagcaagatcttgtctttaaaaaaaaaaaaagataattccccttcctgccctatttctgaggcttcttcttgcctatctccagaaggaaatcttctaagtgccttcatgagagacaggggacatttgggagtcctattctctcctctagcaaaatctcctctagcaaaatctctcctctagcaaaatgtcccacctgggacagcagtcagcatggcgggacaccagggactaaggcctccctatgcccccacttgtctcctcctccctgtctgtctatctctgagcatttattactttactgtgtttcccatggagtgtcttctcaccagggctgtctctaaatctctcttcttctcttgagtcctccccatctctgcctgtgggtctctgtctctcactctgcctctttgcctcctgtgttttccaggcctcggaactgggaatgacctcagcgttttacaagtacatcctcaccaccatggtgtgtatgccctctggcccatctctgcccccacytccttcccatcacagctgtcccattagggcttagccccaggcctcaccacctcttcctggtcccaggacttccccatcctgcatctggacggtattgtggaggactcctccaacatcctgggcttctccatgttcaacacgtcccaccccttctaccctgagtttgtccgcagcctcaacatgtcctggagggagaactgtgaagccagcacctacctgggccctgyggtgagcacacagatacccagtcacacccagaaacactctgcacagatacttctggggccccctttcagacctcactcagatcatgctcagaaccctctcgccctccctgaggcctcgtggtgtggccttgtgatgcattggacccatgtcctcctctctctctacctcccacaccactctggccacaccagctcctcgaggtgcctctgatgccccaagcaggtgcacctcagggcctctgcacaccctcttccccctgcttcctgtgcactttccgagagaagcagtggcttgctccccatcactaggacattgctccagtgtcccctcaggtataagatttttccttcctcctcctgtttaaaaaatggtaaacttggcccggcgcggtggctcacacctgtaatcccagcactttgggaggccgaggcaggtgaatcacctgaggtcagcagttcaagaccagcctggccaacatggagaaaccccatctctacaaaagtacaaaaattagctgggcatgatggcaggtgcctgtaatccagctacttgggaggctgaggtggaagaatcacttgaacctgggaggcggaggttgcagtgagctgagatcgtgccattgcactccagcctgggcgagagagcgagactccgtctcaaaaaaaaaaaaaagtaaattggccaggcatggtggcttatacttgtaatcccagcactttgggaggctgaggcaggaggatcactttagtccaggagttcgagatcagcctggccaacatggcaaaatcctgtttctactaaaaatacaaacattagctgggtgtggtggcgtatgcctgtaatcccagctacttgggtggctgaggcacaagagtcgcttgaacctgggaggtagaagaggttgcagtgagccaagattgtgccactgcactccagcctgggtgacagagcaagactctgtctcaaaagaaaaaaaaaaggtaaactacctattttttcacccctccctgccttgtctttttccatagcacttatatttgcttatttcatcacgatgtggcttactgtatattagacttacatagagatatggatttgaggactgtaagttccatgagggcagggggttctgtttattttgttcaccattgtatccccagcacttaaaacagcctagctcataacaggtgtctgataatagatgttgaataaataccagcatacaaaagatgcatatttatgtgtatttgttcacagacatctactcagataccaagacaccaagacacttctacgcgcagagcacacatggacaccaagctgtccagtcagatgtgtccacacagggacatcacacaccccaacacagaggcacatttgtgtgtacccctgtgcacatctacacaacacagatactcagaccttcacactaacacagctggggcacaccctaacaagcacacacagacaccgtggttgtgtcacagattgggggctagagtgtatgggacgctaactgtgtgccaggcactgttctgagtgctttacaggcgttatgtcaccggagccccgtaacagcacatgaaggtagagattactattatcctcattttacagagaaggaaactgaggttcagggaggaatgaggacttagccctatcaaagaatgagaaaatagcagagccaggcctctagctctgagccacctgcctcccaggcccgcgaccaatcattatatgctcctgcctctctgacaccacacccaagctgtgtatagatgaatgggcatggtcgtccagccccactcatgtaaacgtgccccagacacactcagacggggactatggccatcttccctggcctgcatcacccagattcacagacatacctgcccatgcaggtgacacagctagctatccaggcaccctctgagagatacatggccacatacattctgggagacctactcccaccaagacatgggaagcacacacaccttccccgctgtcaattccacttcccaagaaagacaccagagccacttcctcactcctgacccacccagtttcccattcctggggagagggaagttatttgagggtttgagggtggcagctcaggggcctttggggctcctctgcctaggcagcctcttatccatcccacccccgcctctgtcccacygcagctgtcagccgccctgatgtttgacgccgtgcacgtggtggtgagcgctgtccgagagctgaaccgcagccaggagatcggtgtgaagcctctggcctgtacatcggccaacatttggccccacgggaccagcctcatgaactacctgcgcatggtgagcccgagcggggatgggtggaggaggcaggacacggccacctcaggtgggagcgctcactgtgaccaccctgtggccctctgccctccctgctcttcccaccgtacccactgcctcccctgtccactcctggctgttgctgcctatctgggttactctctctctctctttctgagtcttgccctcttcatgccttttgtcccatctcctcttgcttccttgcatgttatcttgctcttttgactgtgatcttcctcttctctctcttgtcccctccaccccggtctgtctgtgcctttctctgtggatgtctcaccacgttgggccttccctgcccatctctgggcccctgcactctccctctgccccacctccccaccctgccaggtagagtatgatgggctgaccgggcgggtcgagttcaacagcaaagggcagagaaccaactacaccctgcgcatcctagaaaagtcccggcagggccaccgtgaggtgagcagacccagggtgacgccagagccctgctggggtgagggtgggggcgggcccagaggctgccatgacctcaggcagggcctgagctgacagcaccctctctgccccctagattggggtgtggtactctaaccgcaccctggccatgaatgccaccaccctggacatcaacctgtcgcagacactggccaacaagaccctggtggtcacaaccatcctggtgagtggccctagatgggggcctgggagtggcgctgccctgagcccagtcctagctcccaccgtgaggtggagggatgcattggctggcacagcgcataggccagtgggggctgggattcctgcacgcagcaactccaggttgtgaacaaggtgctaccatcctaaatgctgccagagcagggagggagcagactgccctcagggccagatttaacccagctctttgcacagtatctggctctggtcaatcctgatgaatcatgattgccagaacagttgttttgccacccttgccaacaacatgtatcaacaatgccaactcagtgtccatcttgaagttgtggaaactgaggctcagagaggggaggcgacttgcccagggtcacacagcaagcacccggcacagccaggactggaagctatgtctctaatccttcagagcctgagtcttgacctctgtgttctgaagctccagacctctcagtacccaagcaccagacagggacgttgtcctgtagccctgggggtgccactcctgcatttcaccaaatcagaggcagaggggcctttgtatgtcaagtatttattgattgcctgttctgcaccgggcactgtgctaggccctttccaagcgtcattctttagacctcacggctacccttgtgagctttgtcttatttcccccttttgagggtaaggaagcaggtcacacagtgagtccccggcagagctagtgtcaggctcggagctggtgccctctctgctgcaccatgctgactcctgccaggcacaatgggcttccagtgccttaggaggtcagggagggggtgatccacagggcctggcgagcaggaggcttccccaagcggctggcctggaggctggacatgccaggcagccatgctcttcacagtggccaagtccgtggcctgtcagcactcattgttagtgagggagccgctcagtaactctgagctgtgtcagctattcgctgtggatgctgacattcagagagggttacaagagggttttgcaggatgttagagggccacctaaagcagtgagtcgcagagcagttccctcagtccctagggaactcctgatctaaaatggacctcgagtccctctggagcagggccagtgatcctgttgtggagggacagatggcctgcagacgggaaaccagacacctcctaacagcctccccagggagccctgggggcttggctaggagcagtcagaccctctgtgctgtggtgtgcggtcaatccctgaagcctcctggaggcagaagagttgggggccttggtggggaacagggtgcaaaggtcagggaggggaggtcaggagagctgagctgtgaccctgggagcttcaagtgtcttcactctcctccctgcttctcctcaaggcctgggagcttgtatttttcttcccttcctgatgttcacctatctcttgatgggttgattcacttattcattccataaatatttaccaaagctgtatggtgctggcccttacattctagaagcacagatatgagtcaggtgctctcaggtggcactgggaggcggtcccagtctgatggaggagatagacctggacacagtcattcccacaatgagggactaccaaagaaaggagggactgagtcagctttaggaggctggaggaaggcttcctggcagaggtggcattagatggggttgcataggagttgggtgcccagaaaatatcccaggcagcaggagcggcaggaggggcaggagctggggttttgggaggtgtttgtcaggttgaacagggaggcaacagcctctgtgtacacagccagacaagccctgttcattcgctggtattgcctgacatgggtttctgggcaagacctgtgtcaggcacttggagattcagatgtgactcaaactgggtgcctagggcaagatgtgggttagaacttgtctcattcgctgctctatcccagggcctagagctgtgactaatacctagcaagtacagagggttgtggtgagtgttgggacagaggcagcctaggggctgcggggcagcaggtggggaaggggctctgaaggactcagttgtcctgtgctttaccttggggagagagtgttgagcaggaaggggcggggccagatctggagtcaggaaggctccttgttggcccatgagggatgctgctagggattagaggtggtccgggtgtgggagcgagggcctctggtgatggggtgcaggctggcgctgcccctggggcaggctcagggatcttgtgctgagacaggatgggctggcgctgagatagagagaggccccatggggaagctgggggtgcagaagtcccacggagttgaggctgtgcataggcccgccctcctcagccgctggtctcgccccagtcttggagaatttgtcagggtacccaggtggtcctgaggattcccttcattgagctgagatgcctcactctgccctttggtgactagtgtggcagttaagagtagtctctctgctgcggacagagggacctcagtcccattcctccgctcttattagttcaagtcacttaactacagtatccattgctttatctatacaacgggtctgcgtctcgccttgaggggcagtgggaggatcacatgagctaagaaggcccttgcagtgcccaaggtacgtgtgagagcacctccctccctccctccctctcctgagcttgtggttcatggctttgagtgttgtgccaagccctgtgctcatgtgacacaatcttcacagaagccctgattttcggatgaagaaactcaggcataggagggttaaatgacgtgcccaaggtcgcccagctagaaggcagcagagcccacatgcctgtcttttgcaccacgttgcctctattattttttaatttttttttttttttttttgagacagagtcttgctctgtcacccaggctggagtgcagtggcgcgatctcggctcactgcaagctccgcctcctgggttcacaccattcttctgcctcagtgtcccgagtagctgggactacaggcgcccgtcaccacacccggcttttttttgtatttttagtagagacggggtttcaccgtgttagccaggatggtcttgatctcctgacctcgtgatctgcccgtctcggcctcccaaagtgctgggattacaggcgtgagccaccgtgccaggccacattgcctccattatttctactactttctgagccctcagggctgtgtcctgagcctggcactgccatccacacactgtttgcccctagcaggtctctctatactcagtttcctcctttaaagtgaggggattaaagtattcctagcagtctgggcatggtggttcacacctgtaaccccagcactttgggagactgaggcgggaggatcacttgggcccatgagtttgagacaagcctgagcaacatggcgaaaccccatctctactaaaaatacaaaaattagctgggcgtggtggtgtgcacctttaatcccagctacttgggaggctgaggcaggaggattacttgaactcaggaggttgaggctgcagtgagcccagatcataccactgccagggcgacagagtgagaccctgtctaaaaataataataataaataaatacgtaaataaaatattcatagcagagtgaggaggttggactagatcagtgttgacactgcaggaaatcctggacaaggatttggatcccaggttcatgaaagggtccaagcaatcagcttgtaaggaatgttctagaacctaccctactttaattttttgtttttacttttgattttcactgaagtgtaacacacatacagaaatgtgcacaaatcgtgttacttctcactgaagtttcaaaaactgaacacacctgtgtaaccaaccagctgtccccaacccaaagcctccccatgcccttccaatcactaaccctccaaggctaacccccatctcagcttccgtcaccacagatcagctttgcccgcccttgaacctcatataaatggcatcgtactgtgtgttctttcttgagactggcttcttctggcaacattatgagtttcatctgtgtcattgcaagtagtgtagtctcattgttgtatgttgaatgtactgcaatttcctgattcatccaatctagatggacgtttgtttctggctttttgctgttaggaatagtactactaggaaggttctcttccatgtcttttggtgaacatgtactggtgtttctgttgggtgtgttctagttgctgggtcccagggtgtttgtcctagctttatcacgtattgtaaaagtgtcttccaaagtggttgaaccactttcactttcattcccagcggcagcgaatgaatgaaaattccacttgctactcggtttgtcagtggtgagtgtataaaggtaccaaccatatatggtggttttcatttgcatttccctaatgatcaggaagggagaacacctttttgtgtttattggctatttgatttttctttgtttttgttttttgagagagggtcttgctctgttacccaggctggagtgcagtggcccaatcgtagctcactgcagcttcgacctccaggctccagcacttctcctatctcagcctcctgagtagctgggaccacagtcgtgcaccaccacacccagctaattaaaaacaattttttttaattgacagggttttaccatgttgcccagcctggtcttggactcctgggctcaagggatccacccaccttgacctcctaaagtgctgggattacaggcatgagccaccacacttggccctttattggctatttggaaatcctcatttgcaaggttcctattcatgtctttttctattttaaaaaaattgggatatgtgactttttattgatttgtgagttattttttattttttatttgtttatttttttattttgagacagaatcttgctctgtcacccaggctggagtgcagtggcacaatctcggctcactgcaagctctgcctcctcggttcacgccattctcctgcctcagcctcccaagtagctgggactacaggcgcctgccaccacgcccggctaattttttgtatttttagtagagacggggtttcaccgattagccaggatggtctcgatctcctgacctcgtgatctgcccacctcggcctcccaaagtgccgggattacaggcgtgagccactgcgcccagcctgattgtgagttatttatacattcttgggtacaagtcatttgtctgatgtatgtattgcaaatgtcctgtccccctttgtggcttaccttttcattctcagtagtatattttggataaaaggatttgatttttaattttaccaaagttctcttcatcagcttttttcctttatggttaatgattttagaatttaagaattccgtgtatacccctatatcatgaagatattctactatttgtgttctaaaaacttaataattttgccttttacatttgggtctgccatcctcctgaaattgatttttatgtagcatgtgaggtaggggagtcaaaatacatttttttcttttttttttttttttttttgagacagagtctcactctgttgcccaggctggaatgtagtagcatgcgatcttggctaactgcaacctccacctcctgggttcaagtgattctcctgtctcagcctccccagtagctgggattacaggcgcccaccaccacgcctggctgatttttgtatttttagtagagataggggtttcaccatattggccaggctggtcttgaactcctgacctcaagtaatccacctgcctcagcctcccaaagtgctaggattacaggcatgatccaccgcacttggccagaatacatttttttccatatgggtatttaattcagcagcaccatttattataacaataattcttcccccttcaggacagttttacctttgtcacaaatcaatatccatttatatgtgggtttccaaacactccattctattgtctgtttgtctgtctttgttctagtactgcagtgtcttaaataccatagctttaaattaagtgttaacatttggcagggtaaacccccagttttgcttttcttctttaggattactttggttcttcttgactctttgcatttctttttattttttataagttatttttattgagacggggtcttcctatgttgcccaggctggtcttgaactcctgggctcaagtgatcctccctccttggcctcttaaagtgctgagactacaggcgtgaaccaccaagcccagccaaccatgcatgttcatacacacttaaatatcatacttcaattttaaaaaaattgttacactggggaagggggctgagcatggtggctcatgcctgtaatcccagcagtttgggaggccggggtgggcagatcacttgagctcaggagttcgagaccagcctgggcaacatgatgaaaccctgtctctacaaaaaatacaaaaattagccaggcttagtggctcgcacctgtggtcccagctactccggaggctgaggtgggagaatcacttgagcccaggaggcagaggttctagtgagccgagattgcaccactacactccagcctgggtgacagagcaagactctgtctcaaaaataaataaataaaattggggaagggacagaagttaatacaaacctacgtaaaatagaattcaaagagtacaaggcaggtgaggagtgaaaaatcagtttccttccttccctgggtctctcattttcttttttcagaggccaccatcctcccagaaatgtctatgcatatacaagcacatcgttgctctttctttaacaaagagtagcatattgtacacgttgttctgtagcttgtttttttcctcctaatatatcttgtagaccttgctattttagtggttgcctgggattcttttatgacatcgataatctttttaacttggcccaaattaggttgtttcagtctttgttctcactacaagcaatgctgcactgactttcttggacctgcgtttttgatgcacagccatttgtagggtaaattcttagaactggacttagcagtatctcattgtctggctgcagtgttgggcttctgcataagattctttttgaagtctgaagaccctggatttgaggctccttgaggacccttctgttctgatagtctgtgactctaagttgagtcctagattacggttatctaatttctattcacaggccccagtctctttttgtctccctaagctcagaccccagtcctgagaccctgaacctaagttcctcagtcttgaatttagagatcagcttggcatagtggaaggaacagggttcagagtgcacagtgactgggttgtgaagcccagctctgccccgtctcccttcccactgccctgcttcagctgggtggccttgggctagatgctttacctctctgagccttggttctatcctctatatgtcaagggggctgtatgggagccaggcccttgtctctaggattctcagtttctgattctccagctttgatacccaacctgggtccctcgtctctctctggcttctcccatatccactgtctgattctgtccacttgagctcagtctagcacagggcttaagagcggagctttggaatcagaccaacttgtccttctcagccacttactacttcacttctctggacctcagcatcctcatctctaaaagagacgtaataatactgccatcccacgctgacggaattgctgtcacacagcaagcccacaagaaatgctggctgctgccgctattattagtattatctcacattcttgttccccgttccacaattttggttctggaaaggcagcttaatagagaatcactgactgccctccattccatcaccctgtagctgtagggctctgtggggtcctggagtccagagcctatgacctggccacatagtaggagattctattactgtgtgacaaaccacccagaacccagaaactgaaacaatagcagttgattattttgcatgattccgtgggtcaacttagtggttctttggctggtctcacttgggcacactgcggcagcattcagctggtgtccagactggactggaaagtgcagaatggctgtggatgctggctgttggctggcatgccttggttcactcaccctccagcaggccagcctgggcttccttaaatgggggctgctctgaaggctgagactctggaattcacacggcatcacttctgccacatccagttggccaaaacaagtcataaggccagctcagaccaagaagtctgaacccagggagaaatggaccccatctgttgctagaagaagcagcacaatattgtggccacatctaccatggagctcagtaattgtgtgttgaatgaatgagaggtgacagaggtcacctaaccactttgagcctccgtgtccacatgtgtaaaaggaatctacttatgcccatttcagtgtaaggtcaccataaggaattaaaataatgtcatcgagagaatgcacagcacagtttctcaatacacaataaccagtgtggatattttatttattttatttttgagagagtctcgctccatctcccaggctggcctgcagtggtgaaatctcggctcaccgcaacctgagcctctgggactctacctcagcctcccgagtagctgagactacaggtgcacaccagcacgcctggctaatttttgtattttttatagagacggggttttgccatgttgcctakgctggtcttgagctcctgggctcaagccatccacctgtcttggcctcccaaagtgttagagttacaggcttgaggtactacacctggctcattgtgtatattttaaccaaagctctttcctggctcttccctaagtcctaagtccttttgttcattattccaaagtgacattgtacaaacaaccatttagacaataactgtgtccagataagtttcccatttgttaccatcatcacatgccttgttttcctagcacttggaccattctttctgcttttgtgtttctttggcacaacgggatcagtaaagtttgctcaaacccctcagaaataagcgtcaatgtggcaaactgactgtaggtcagagattgcaaactagaaactgtgtttgttttggcctgcagaacatttaataataattggtattagaatttgaattggttgctgtattagttcattttcatactgctgtaaagaactgcccgagactcggtaatttatgaaggaaagaggtttaattgactcacaggttcagcatggctggggaggccttgggaaatttacaatcatagcagaaggcgaaggggaagcaaggcaccttcttcacaaggcagcaggagagagatgtgccgagtgaagggggaagagcccattataaaaccatcagatctcgtgagaactcactatcactagaagagcatgggggaaaccgcccccctgattcagttacctccacctggtctctcccttgacacatagggattatggggattacaattcaaggtgagatttgggtggggacacaaagcctaaccgtatcagttgctaacatttatgttattttattttagagacagagttgctcagttgcccaggctgaagtgcagtggtacagtcatagctcactgcagcctcaaactcgggctcaagcaatcctcccacctcagccttccaaagcagtgagatttcaggcatgagagttgctaacatttataaccaggagactttataaaacaatcttaagtttccaaattctcttaaaattgcaccatctgggccaggtgcgatggctcacacctgcactttgggaggccgaggtgggcggatcacttgaggtcaggagtttaagaccagcctggccaacatggtgaaaccccgtctctactaaaaatacaaaaacaaaattgggcgggcgtggtggcaggcacctgtaatccaagctacttggcgggggtgaggcaggagaatcgcttaaacccaggaggtggaggttgcagtgagttgagatcgcgccactgcactccagcctgggtgacagagcaagactctgtctcaaaaaaaaaaaaaaaaaaaaaaaattgcaccatctgtcatcttcagcctgcctccctcatggggaattggactggagctaaaccctggtgagggaataccatctttaacccattagtggctcatgaagttggtttggtgagtcattaccagccatgtggaaagatgaagtatagcagaatagaaaatatcagtgtattgcccatagttactagggcaaggactgttctgtggaattaagtctagttacgtgtgttcatgtgtgggtgaattaggttgcagggtaaaatgtatcttttactgtgaattgtaataagaaatctgaaagcccctgatccactttggcacaagatctatccagtctgactctaaagttacctcctccctcatacgcatttgagcttggcaccaatgagcatcaggttggctgctgaagattaaaatggctccctgcaatctgctaggaactggcagtacccatgtgtttttccctggctttcaggtctattccccactctgagcatttgtaagtgagaaatgtgtactatgaataaatcaaccgtgctcagcaagcagattcctgctctacctgcctggtccgggctccaggatccgcaacccagccactagacacccagcctctgacccctgctttcttctgcccacccaggagaacccatacgtcatgcgccggcccaacttccaggccctgtcggggaacgaacgcttcgagggcttctgcgtggacatgctgcgggagctggccgagctgctgcgcttccgctaccgcctgcggttggtggaggatgggctgtacggggcgcccgagcccaacggctcctggacgggcatggttggcgagctcatcaaccgggtatggctggactggggcygggaaagatgcatggacccggcgagtgagggagggcgggcagctgggcagccagtcgaacctcagaagcagcctggctggtggcagaagaggaaggagccatgaagggcccctgacaccacctcactgatgttgcgctgtatgcctgtgcctggcgggtgctgtgggatgggacagaggaggagaggtggtacatgcatcaccacctgtgtcctgctttgccaaatgcccctttcatgccaccttggattagtcggtgtgcaaagatttgttaagtgaatgaaagagacatggagtggggagcaggaaaaggtctgaggaggtcaaaggcttcctgcaggaggcagggctgagagcagggagcacacctcacctgtgtgctatgcccagcacctgctagggagggcctggcacatcatggacctggagggctgcatgtagaactcatacattcacccattcagtggctgtttattgagtacctactatgtgccttgcctcttgctgggcatgggatcccactgtgagcacagtggatctggaccctgcccccaagagcttagagtctctttggggcgcaagacagtgaatgaccacagcacagagctgtctgggctgtgattggggagctcagaggacggtcccagaggaggttcctgacccagtcagatatcccagtagggcttcccagaagagaygatacccaaactgattcccaaaggtcatgaaggagttagcaaggtgaagggggtgtgggagaaggggagtgtatttggagcaggggaaatagcatctacaaagatggggcgatactagggagtgggatgcactggaggaaccagcggggcctgagcgtgggcagaatttggttgcagctgaggagggatggaaggcagggccatgggaggtggcaggcaagggtgcagtggaaaggatctttgggtgtcagacactcctagatttgaatccttaagtgtcatttctctcctctgaacctcagttttcccctccctaagatggggataataataccttgcaggtctatagtgagggttacgggacgtggggacaagtacctcacacatcgcttggcagatactgggggactgaaatgtagttcctctttttattccaggtgggagaaactatgggcacaactgcccagaggcaggactgtgccctgggagataagtaggcccctgattaggacactcccagagctggtgtgcagaccaaggggctgtggccagagatggccagggcagccttgacgttagacttgacagagctcatcagagattctcaccctcctctctctcatgccagaatttacagcatccaaccccctgaacatcacgagggaagacatgagagggccactttgcttgacaaggacgtttatcccttagggcactgactttcaaaagttattttgacagaactttttttccaattgcaaactccctcagaaccctgggcaagagcagagctgctctggtgaaggcagagatgggggtgcctcccaccccaccccacaggcaggtcccaaggcgctgccccataaagctgccagctggtttgaaaacttctgccccagggtgagttttaaggtcagggtgaattttattattattattattttatttatttatttatttattttggagacagagtctcctctgttgcccaggctggagtgcaatggcacgatctctgctcacagcaacctctgcctccctgcaacctccacctcccgggttcaagcgattctcctgcctcggccttccgagtagctgggattacaggtgcgccaccgtgcctggctgatttttgtattttttggagcaacaggtttcatcatgttggccaggctggtcttgaactcctggcctcaagtgatccgcccacctcacctcccaaagtgctaggattacaagtatgagacaccacacccagcccagggtgaattttaaagcctgaagcccaaagaggccccgggtgagacaggagatgagaagccccagagctgacagctctatgcccacctgagggcacaggcttcctcgtgacctgtttccacagcctggtctttagtcacgtaggctcagaaatattctttcatctggtatcccagaaataagcaggctccaagggagtagccctgcacctgaagtcactctaaactggatgcccttttttcaccaacagagaagtctggaacagttcttatttacagctgtctgacctttgtgtctcagggcctactcagtagggtagggtgagaggatttggggcctggggccagcaaagtgtggcagctgagagtgtctgtggttggctgtttaaagcttagctctgctgtgcactggttgtgtggctttgggcaagtgcttaacatttctttaggttgtagtttgttcaactgtaaaattggggaataacagccctttagcacatagggttgttttgaagaacaacatgcagtgaagaacttagaacagggcctggtgcatagtgggtgctgtatgcgtgtgtccttttttttttttcctttgagactgggtctctctctgttgcccaggctggagcgcagtagtgcaatcacagctcactgcagcctccacctcctgggctcaagcgatcctcccacctcagcctcccgagttgctgggactataggcatatgccataatgcctaggtaatttttgtgttttttgtagagatggggtctggccctgttgcctaggctggtcttgaactcctgggcttaagcaatcctcccacctcagccttccaaagtgctgggattatactatttttattattgttattattcataccagcatggccagcacatacatagatttgtgtgttcatccattttccattcagccaatgtttgttgagtgcctactgtataccaagccctgtgctataccctggggataccatggtgaacaagcccgatgtgctcttactgagtgggctaaagggtttgggcctcagcagaaagcccatgggatgcccttgaagagttttgtttttgtttttgttttgagacggactctggctctgctgcccaggcaggctggagtgccatggggtgatcttggctcactgcaacctctgcctcgtgggttcaaatgattctcctgcctcagcctcctgagtagctgggactacaggcgcatgccaccacacctggctaatttttgtatttttagtagagatgggtttcgccatgttggccaggctggtctcaaactcctgaactcaggtgatccacctgcctcagcctcccagagtgctgggattacaggcatgagccaccatgcccggccacccttgaagggttttgatctggctcaagtgaattggccctggggttgggggaagcagtggtaacaggaagaccagtgaggagataaggaatgagctggtgggcctcaggcgggagaacgtcagagctagagactaggggaagggctaaagagcaccagggcttggtgactgcctagggtgggggatgcaggagaggacaggagggagagcattcctcctgtgtctggcttgggcatctgggtgatggcaatgacatttacagggagaacactggaggaggagctggagcgtgaaggataggcggagtttggccttgccctgctgtgggatagccgagtgtgccragctgcacaggaatagtcaccaccgtcatcacaacagcagcagctgtcatttgttgatttcacaccatgtgcgaggaacttttcaagtgttacttaacataattttcatagcagtccttcatggcctgaggatcactgcccagtgtgagatctggagtccccartgcacagggctgcagccaggtgtgtctgacttaaggcccgtgccctttccagccctccagctgggaacttgggaagctcggagtacactgatggagtggcacgctgtgccaggcccttgtctgagctttctgacttgtctccatccttgactcctcatggccacccagtgagagagggactggtattagccccgttttctcaaatgtacagtgaggcatcaaggtttcatgtccaggcccatggctagtgaccaggagagccaaggtgggcaccccatcagggtggcccagagctggtgagtgacttccagatggaagacagcctggggcaccaccatcctgccagtcacccctgggccaggcacaggkctccttggcctgtcttgaattatgacccattttttccacccagtggccatggctgacattggccttctccctgccatcactgccatggtgtgaattcaggtcccacccctctcatcagcctccttactggcctcctggcttctagtctctccactccccagcttgtcctccaatagaacctttctacagtgtgagtctgatctgtcacttgtatgctttaactgaagcccctgaggccctcaggataaagcttagccttcaagggcaaagaagatcttaggtcagggtcccaggaagctgactctgagatggagatgtagaggcaggaggtgtgatggcgtgcccctggaaacctgccctgtgcaggagggaaggaagcaggcttgggcagaggagttgagctgcgctgcagtcacaactgggccttagctgtcccacaggcagctctggagctgagctggccgtcaaggacctccccctgtggtaagggtgccaggcctttaagcacccactgatatgtcactggacgtgggctgctcttggggagagtcaggactttgggtgagggracgctcttctactgacagagctgagagccatcagccacctacaccctgggcagctgaggcaatgagtgccccactcctgaaacagagtctgggtagccaccatggagtccactatagcagtgcactggttaggagccagaaggagccagcttcaggtccccagtgctcccacatgatccctgcaaagccacttatctctgaaggtcagtcactcctcttgaaaaggggctaatgttacctccctcacagagggtttttttgtttgtttgtttttgtttttctttttgaggcagagtctcactctgtcgcccaggctggagtgcagtggcgtgatctcggctcactgcaacctctgcctccagggttcaagcgattttcctgcctcagcctcctaagtagctgggattataggaatgcaccacaatgcccggctatttttgtatttttagtggagacggggtttcgccatgttggccaggctggtctcgaactcctgacctcaagtgagctgtccgccttggcctcccaaagtgctaggattacaggcatgagccactgcacccagccagtgagttttaaggcaattaaatgagagcgcatttgcacagagcctggcacatgcctggctcacatgtggtcactactgctagatacctttcttgaggcggtctgtatgtgagtgtagttagaagaatgggttttggagtcggctaaccctgggttcaaatctggacttactccttactggctttgtgacctgcaggcaggtggctgccccctctgagccttagtgtctcctcaaatggggagtggtgaccccctaacttggaggggtatcacaggggacagatgagatcagcacaggtcatagatgctggcatgaccaagacaatacccacccacctcacctgtggcctccacaccctggggatgggagccttgtctacttagctatgtccccagctcagggcctgacacatggcaggtttctagtaaattagtgttgaatgggcaattgactgattctatcaaggagtctttagaaatgttgtccccagttctcttcatctgatagaagacgcacacacacgccaggcatggtggcttacgcctgtaatcccagtactttgggaggccgaagtgggaggatcacttgagcccaggagttcaagaccaaccttggcaacatggtgaaaccctatctctacaaaaattgaaaaaatttagccaagtgtggtggcatgtgcctgtagtcccagccactcaggaggctgggaggtgggaggatcacctgagtctgggaggttgaggctgcagtgagccatgattgcaccactgcactccagcctgggcgacagagtgagaccctgttttaaaaaaataggctgggcacagtggctcacatctgtaatcccagcactttgggaggccaaggcgagcagatcacctgaggtcaggagttcgagaccagccccgccaacatggtgaaaccccatctctactaaaagtacaaaaaaattagccaggcgtagtggtgtgcacctgtaatcccagctactcaggaggctgaggcaggagaatcgcttgaacctgggaggcgaaggttacagtgagccgagattgcgccactgcattccagcctgggcgacaagagtgagactctgtctcaaaaataaaaataaataaataaataaataaagtccatttcattaaaaaattttacattatactgtgtttccggttataaaacatatttgtattaagtataatcctattttgcacaacaatagcaagtatatatgcattaaaaagcatttttgcataccatcagaaattttcataagcaattatttgagaaggaactcctttattttctgtttatatatgtaatactaaatgataaaataccaaatggtacaaatagcagaaacactggatatacatgatgttcttacacctcagagaccatattcctccaactcattttctacaaattcattaatacaggtacatctttaaatttcttaatttttttgagacagagtctggctctgttccccaggctggcgtgcagtggcacgatcttggctcactgcaacctccacctcccaggttcaagcaattcttctgcctcagcctcccaagtagctgggattacaggcgcccaccaccatgccaggctaatttttttgtattgtttagtagagatggggatttcaccatgttggccaggctggtctcgactcctgacctcaggtgatctgctcaccttggcctcccaaggtgctgggattaaaggcgtaagccaccatgcccagcctaaatttcttaaatttttatttttgcaaaaatgatatcttactatacttactgctgtgtagtttgctttttttacttgtaacttggccatcttcccacgttagtacacatagatctgcctcatctttaaaaacagctacgtttaggccaggcgcagtgactcacgcctataatcccagcactttgggaggccgaggtgggcggatcacctgaggttgggaattcgagaccagcctgaccaacatggagaaaccccatctctactgaaaatacaaaaaaattagctggatgtggtggcgcatgcctgtaatcccagctactcagggggctgaggcaggagaattgcttgaacctgggaggcagaggttgtggtgagccgagatggtgccattgcactccagcctgggcaacaagagcgaaacgaaaacaaaaacaaaccagctacatttagtcattcacttactgaataactactgagcaactattctgcacccactgcatcctggccactagggggcagcaatgtaatgagcagaggtgctccttgtcccctccttcccgccccccgccccaactgctgatgttctagtgggggaaactgacagcgtatgatatattaatatcgtgttaggtgaagcaaggtaaggagataaaagtgtctggtgcgtggatgctgttttagacaaggtggttggataacgtttgagaagagacctaaaaggggtggggaatacagtcctgagaagagccaccagggagggttttatgagggcagaagtttgactattttccttacttctgcatccccagcgcctagaaccatctgacacccagctggtgcgcagcaaataattgccaagtgaaaggatggatctggggaagagtgttttccaagtagagagcccatatgtataaagacttgaggggaaaagtgtggttgaggggaaaaagtgaggggcagagagatccgagagcagggcccacatcccagggcctcacagtcactgctaaggagtgtggctgttattttttattattattttttagtttttgaaacagggtcttgctctgtcaccgaggctggagtgcagtggtgcaatgcagtggtgccatcttggctcactgcaacctcaacctcccaggctcaagcaatcctcccacctcagctttcccagtagctgggattacaggcacgctccatcacgcctggctggtttttgtatttttgtagaggcagagttttgccatgttggccaggctggtcttgaactcctcggctcaagcaatctacctgcctcgacctcctgaagtgctgagattacaggtgtaagccaccatgcctggccttggctgttatttttatcgtgctgcagagccactggaaggttttaagcaaggaatgtgccatgatattttattttattttgagacagagtctcactgtgtagcccaggctggagtgcagtggcacgaccacggctcactgcgacctccacctcctgggttcaaacaattcctgtgcctcagccacccaaatagctggaattacaggcgcacaccaccatgcctggctaatttttatatttttaatagagacggcgttttgccttgtttccatgctggtcttgaactccttgcctcaaatgatccatctcccttggccccccaaaagtgctgggattacaagcattagccaccgtgcccagcctgatcaattttttttctcttttttactgaggtgaaatttatgtcacataaaaataaccactttaaggagtgcaattcagtggcatttagtacattcacagtgttgtgtaatcactattgctatctagctccaaaacgttttcataacctcccataaaactcatacccattaagcagtcgctccccactccctccccgctaccccaacccctggcaaccacccatctttctgtctccatgggtttacctattgcaaatatttcacataaatggaatcatccaatatgcggtctttgtgtatggcttctttcactttgcatgatgtttccaacttttcaaagttcatccacatcatggcatataccagtactgcattccgttttttttttttttttttttttgagacggagtcttgctttctcgcccaggctggagtgcagtggcatgatctcggttcactgcagcctccacctcatgagttcaagcagttctcctgcctcagcctcctgagtaactgggactacgggcacacgccaccacacccggctaatttttgtatttttagtagagacaggctttcaccatgttggccaggatggtcttgatctcctgaccacgtgatccacccgcttcagcctcccagagtgctgggattacaggcgtgagccactgcgcctggcctgcattcctttttatggctgaataatattccattgtatgcataggccagcaggatctaatttttaaatcatttaaaaatgattgcactggctgctgtcttgaggaacaccttagtgggacaagagtagaaactgaatggtccatttaggaggctgttggagggtgtggatgagagaagatgttgccttggtttgagtggcagctgtgtcaggtgtgcagccagcttggatgtgcataagaggaagagaggaatcggggtgactatggggtttggccagggcagctggcgaatggcgaggccagtttccactataaggaggacatgggaggagcagtttgctggggccgggaaacaagagttttctctggtcacggatcatttgagatgcctgcttaaaattcaagtgaggatataaggattccattgtgtggctcagcatgaattatttaccatatcccctattgatggctatttggatggcttccagctttgctagcatagccagtgtcatgataaacttggcctgtggatttgtgggagtgttcctgagggatacattccaagaagtgaaagtgctgggtcaaagggtataaattttttctaagtgtatactgccaaatggctgttcaaaaaggcttcgccaatttatattcctaccaaagtgcatgagaatgtgaaatttcccatactcttgccaacagtcagtgttaccaatctctaaaataaaatctttgcccatctcaaaggccaaatataatatcattgttttaacctaaacagaatgttacttggctgcatagtagtaattccatgtggatgtaccataatttatttagccatttttcataactagttgtttccaggtgtttttattgtttgtgctcttataaataatcattaacaaacatcttttttttatttttgagattggcgtctcacttagttgcctaggttggagtgctgtggtgccatcacagctcactgcagcctcaacctccccaggctcaggtgctccttccacctcagcctcctgagtagctgggactacaggtgtgcaccaccatgcctggctaattgttttgtattttgttgcccaggctggtcttgagtccctgggctcaagtggttcacccattttggcctcccaaagtgttacgattacaggcatgggttgttgcacctggccaacaagcatctttatgcacaaaagctttgcctgcattgcagcctattttcttaggattggttctctgaacagaataactgggtggaagaagaataccctttttgtggctttcgtgatattttgttgaattattttccagaaagactacaacagtttctatataggctccttctcagcattgagtgtttttatcggcttttagctacttagacaactccctgtcattttcatggatggcatatcattttgatttttcctgctttgactggtagaccacacagtgggacttatgtggtcaagtgattggtggaatctgagcccaggttaactcagaaggggcctgatggggccatggtcccaccctgtgttttcccagttcttggttgtataactggaatagacacacatggtagctggcagaatcccacgttggcgcactgacccatggagtcagggccattatggtagaaagagccacgtggaagctcctagaactccctgtctttcccagaatagtaattcaaaagcaattctctatcctttgtgcaaattgtggaaattagtgtcaccattaacggcttggaagaagcaggggtagtgatcccatctacattcagctggcctgtttggcctgtacagaaggcagatggattttggaagaatgactttggattattgtcaacgtgatcaggggtgactccaattgcagttgctgtcccaaatgaagtttctctattggagcaagtcagcacagcccttggcagctggtgtgagctactaacctggcagatgcttttttctccataccaatttccaagggctaccagaaggcaaggttcacatcttcacagtcttgctcagtgtgacatcaactttcccactttctgtcctgatttaggctgcaaagaacttgaactctacagtccacatagcctcacactggtcccctacattgacaacagtatgctgatcagatctgatgagcaggaagtagttgagtcagtgcagttggcattaaacctggcagatggcagtctggcagggtccagtctggcagggtccagtctggatacaaaacagcgccggttgccagatgcagtggctaatgcctgtaatcccagcactttggaaggctaaggcaggaggattgcttgagctcaggagttcaagaccagcctcagcaacatagcaggaccttgtctctactaaacattaaaaaaaaaaaaaattagctgggcatggcacatgcctatagtcacagttactcggaaggctgaggtgggaggatcacttgagcctgggagttcgagactacagtgagctatgatcacgctgctggactccagcctgggtgacagggcaagaccctgtctgaaaaacaaaaacaaaaccctggctgggcacggtggctcgcgcctctaataccagcactttgggaggctgaggtgggtggatcacctggccaacacagtgaaaccccatctctactaaaaatacaaaaattagccagactcagcggcacgcacctttaatcccagctactcaggaagctgaggcacaagaatcgcttgaacccaggaggcagaggttgcagtgagccaagatcgtgccactgcactccagcctgggcgacagcgagactctgtcacaaaaacaaaaacaaaaataaaaacaaaacaaaacccagctccatttacttgaatagaatcatatcagttatttgaatagagagtatttagtataaagaattgttaactaaatgtaaagttgttaaccagctaacttaaggggtaaaaagaaaactaagaggtcatggcagtagcaacggcagaaagcagctaccacacttagtccttaagggacaagtagaagagtttgaaagatgaaaacttagaagcttagaggagggccccacagagctgagacagactgctgaggagggggtgctgtttggttgatgatgtgacatttggtggactttttggattttggtggcaactcataccacattgggatgtgctacttcaatccatttactttccctacagcccgtaaggcttttttcatctggagtgaggtccagagcatcaaagactctgcagccagtccaggctgcatgcgagctgatctgccacctgggccagatgtaaccagcagatcgggagattcattcgcaaagtattgatggcaaataggaatgctgtatggagccttgagcaagcaccagtggctagctcatggtgcagacctctagggtttttttgtttgttttgagacgaagtctcactcttgtcccccaggctggagtgcagtggcgcgatctcggctcactgcaacctcagcctcccaagtagctgggattacacaggcgcctgccaccaagcctggctaatttttgtatttttagtagagacggggtttcaccatgttggctaggctggtctcaaacacctatgctcagttaattcttaaaagtttttgtagcagccaggctcggtggctcacgcctgtaatcccagcactgtgggaggctgaggagggcggatcacgaggtcaagagatcgagaccatcctggccaacatggtgaaacgccgtctctactaaaaatacaaaaattagctgggcatggtggcacacgcctgtagttccagctacttggaagggtgaggcaggagaattgcttgaacccaggaggcggaggttgcagtgagctgagattgcgccactgcactctagcccagctacagagcaagactctgtctcaaaaaaaaaatttttttttgtagagatggggtctcactgtgttgcccaggctagtcttgaattcctgggctcaagcaatcctccttctttggcttctcaaagtgctgagattatagacatgggccactgcactgacctagccagctttttctggccaagagtgtaagtattttcagctttaaggccttactgtcataactccttagctcttctgttgtatggaaagtagtcatggacaatatagtgggcatcactgtgttccaataaaactttatgtacaaaggcaggcagatgggctggacttggcccaagggccatagctttcccacccctcactctcaggtgtcatggaggtatcatggcaggaagtggccacatccctagttctgaaggaagaaagggaagagctgaaactcttggaaacttagaggaagggctctgtggagctgaaagtcagaccctggggagaggtgcttacagctggtgctgggttctggagagaggctggatgagatgggtttgtagatattgggaagctgcacaccggattcatctgctgccaggagaagaaacgatgctgccaggaggggcagaaggtggctggggtgggagaggagacaggaaggagcaatccctcttccctcctcagtctggcaacctcccgctagcgccccctattggcagagcctggcagggcgcagcaggcaaagcaggaatatggtttacacagaacagggtatacaggatgggttgggagctgagggactatcacaagtgctttgattggctttgggcatttagatgacacccccccccatcattacaggtgacttgtcattcaaattcttcctgatttcatttcagagattaaataactgtgagggggcccgtcagggtaggggctagagggtatatgtcagggtggggaagtcatctctaaggaataggtcttttaccatgcatggtggcttacgcctgtaatcctagcactttgggaagccaaggtgggaggattgcttgagccaaggagttcaagaccagcctgggcaacatagtaagacccccgtctctacaaaaaatgaaaaaattagccaggcgaggtggcacacacctatagtcccagctactcaggaggttgaggtataggagaatcgcttgagcccaagagtttgaggctgcagtgagccattttcacaccactaaactccagcctgggtgacagagcaaaaccctgtctcaaaaacaaaaacaaataaataagcctttcttttagaaatgaaaagtgagtaggaggagggaagggggctccaaaggctctgggaggagcctaggaagaacttgcagcatttaggatccttccatcacaccttcagatgagacccaaatctcactgtctctctccaccaccagtgctgccactcagtcctgcccccagcactgtgatgggcatctgcagttggctccctggttcccacatccactcttgtgcctgtggtctgataatgtcaccctctgttcacaccttcctatatgacatcctcatgcaatgtcctccattgcccaaggtgcagaatccagttaccttactgtggcccgcaaggccctgccaggctcttggccccactctgctgccttcccaggccctcctattctgctccagccttgctggatgctgcaagtctcttcccaccttagggactgaacccgctgatcactcagcctggaaccttccccctaggtcttctcctgccttttctgtacttccttcatgttgctattcaaataagaccccccttgcaacagtggggagcagatccaaaacagcatctccctcgagtctctctcttgctgcctgcttgatttttcatcacagcacttgtcactacctgacgttgtatgtttctattcaccgccgtatccccaaagctagaattgtgctgggctagtggagggcgctatacaaatatttgtcaggcaggtaaataaatgaaagaatgaacaaatggaaagggcagtgtggctgcaatgtgggacacagggcaagatggtaggggatgaggctgtgggggttggatggtgcgggacgttttggggccaggtgtaagacagagtctcataaggggaacaggcatggcacatagtcttattgaggtgataggtgtagttagggcctcattgggtcgggtgaggcatttggatgacagtttaagaacaaggtggctgggtgcagtggctcatgtctgtaatcccagcactttgggaggctgaggcaggtggatcacctgaggtcaggagttcaagaccagcctgggcaacatggcgaaaccccttctctactaaaatacaaaaattagctgggcatggtggcattcacctgtaatcccagctactcgggaggctgaggcaggataattgcttgagcccgggaggtggaggttgcactgagccatgattgcaccactgcactccagcctgggtgacaagtgagactccgtctccaaaaataatgataataataataataataaatagggccgggtgcggtggctcatgcctgtaatcccagcactttgggaggctgaggcaggcggattacctgaggtcaggagttcgagattaacctggccaacgtggtgaaaccccatctctactaaaaaaatattagacaggtgtggtggcatctgcctgtagtcccagctactcgggagactgaggcaggagaattgctgaaacccaggaggcagaggttgagctacagagcaagacttggtctaaaaaataataataataataaaaagaacaaggcgctgtgtctcatgcctgtaatccaagcactttgggaggctgaggcaggaggatcacttgagcccagcagttcgagaccagcctggggaacatagccagaccctggtctttctaagaaataaacaaaattagtcaggcgtagtggctcgcacctgtggtcccagctactcaggaggctgaggtgggaggatcacttgaggagttcaaggctgcagtgacttatgattgcaccactgtgttccagcctagttaacaaagcaagacactgtctctaaaaagaaaaatacaaacaagcagagtcattgcagaatttatttatttatttttagttttagtagagatggggtcttgctacattaccctggctgatcttgaacttttggctcaagcaatcctcctgacggcctctcaaagtgctgggttaacaggcataagccactgtgcccagcccgttgcagaatctaagcaggaaaatactgtgaccagactgtcatatgttggtatctctggggctgcaggctgtgtgtcctgggaggcagagaccagctattcagtcagagatggtggcctgggcgggtgtgggcagtggaggcagagggcagtgactccgttccggaggtgtttaggggtcaaaatcaggaggcttgaggatggatgcagtgaggggtgagggagaggctgtgtacaggacaacccccatgtttctgtctgggatggtgctggctggaagactggatgtggagcagtgtcagggagaggtggaggctgctgccgccgccatattggccagaggttcaaggactcactgactcctcccatcagtcagccctcatttcttgaactccctgggatccagggaggagtcactcacctgggccagacctcagacacccccagccatggagcgaccagggcagcaggcagataaagcccctaggaggggagtggttccgaatccaagggtcaactgtggcaagaggcttagtctctgtgcctcagtttcctcatgcgtagaatggtagaaatggaggtccctctgcattgggttgctctggggaccagtctactctggggaaaaccctgggacagtggctgcatggggtaagtgctgtgtgcatgcaagcgtctgactgcgtgaggtttcattgtggcaccagggaagaagaggtctctgcatctgggagggccccagaggaagcagcaacattcctgggtttcagcggaggaggatgggacatgagacacagcagatcctgctctaagctggcccctgagcagtgccagaaacacatgacatgtccagctggccttgcttctgaaacgcctgtggtttagcagcagaggcagagaagagacagatattttccaaattgagcaagttgttgagatcaagtggtgtccagggagtgggggtccatgaatggcttcccagaggagtgaaggtgtgaggagccctggagggatggatgggatccagctctacagagtggacaggcgcctcaggcgtagccagaaagaagctggcacgagagagaggggtggcgagtggcccaggaatgcggtgggggagccgtcggctgcctggaatgccagtcagagaggctgtactcggtcaaacccgagcaggatctgttgggaacctgctctctgcgggctctgggctgcctcactgagccagacaggcaaggaacctgtatggagtgaagacagcctattaccaagcacctgagtaaggccatctccagtcgtgctaagaacaggacaatgaggccaggcgcggtggctcacgcctgtaatcccaacactttgggaggctgaggtgggcaggtcacctgaggtcaggagttcaagaccagcctaaccaatatggtgaaaccccgtctctacaaaaaatacaaaaatcagccgggcatggtggcatgcccctgtaatcccagctactcgggaggctgaggcaggagaattgcttgaacccaggaggcagaagttgcagtgacctgagattgcaccagtgcactccagcctgggtgacagagtgagactccatctcaaaaaaaaaaaaaaaagggccaatggggaatgtgagagagaccctagagtgggagtgaggtggggtctggaggctgctttggggagggctgaaggggtgggtgtgatgggagcctggaacggggaagaagagcttgggggagagcatgtgcaaaggctctgaggcgggcatgagcctgctgcattgaggaaagaacgggccatcatggctggagcacagctggcaagacagaagatatgaggggaggctggcagggcagctgagccctaggtcgccagggcctcttggccatgagaaggttttgtcttaagtgctgggggaagccatggcaggttttaaacaggagactgtcctcttggcttatatgtgaggaatggactgggaggttatgagtggcggcagggggcgccgatgaggcggccagtgctgtagtcaggagtgagataccagtggcccaggcccgggtggtggagttgtagagaaatggacagatctgaggagtgtttcgggagcagagcccctgtccttgcccagcccagcaagaggcaggtgtctggcccgaggcatggccccaggaatgagtgaggagaaggccagtgtgggaacaaaggatgggggcccttaggctttcaggaggaagtggggtcttgagctcctggccccaggactggagcccacctgaaaggccattgcttcctcctctctgaaatgaggatgtggccaccatgcagggccttgctaggacagacccccagtgggtgcttaaaataattggagtcctatattagctgtgatgatttccacgacaattcacgtattagtcataaaagtggcaagtgtacaacaaaggggatggaagctccctatgctcaacacccaggaattcccagagagattctccgaatccacattctgggcccctgccacactgccgcctctggatgatgcttcagggctgtgctgtctcactctgctcctcggttttatcgaggctggtgccatctctcccgtacccggctttagctgtttagcctgcgccatctccctctctgcttggggtcatctttggggtctgtgtcctttctccccgaccctggatttcacagtgggcctgtctgctctctctttgaccgtggattttgttttcagcctgtgccacctctctctacctggtggttatcatttgtgcctgtgccatctctcaccaaccttgggtttgtatctgggtcctgtgccatctatttctgattccagctgaagttttgggcctgggccatccctccttcatccagggttgtgctttggtaccagtgtcgtctcctgaccaggatgctgtttggggcttgtgccctatctccctgactatacactgggccggggcctgggttatgtctccactggctgtgggcacatgctgacctgcacccttcctccccacccggggtcatttctgggccctgcctcctctctccctgctctgtgttctgtccgggcctgtattatctcgagtgctgtcagtctcagccccttcaggaccttggctcttttatggccctagggagaagttgctgcttgaattggagtttggggaacccctccatccccagcccttgatgctgggacacagttgaggcctaggggacggagtcagtgtgtctggagacgtgagatgatgaggatggacatgcgatgagggtccgatttcaggcccaaggtgggctcctggagtcagtccatgctcctggcccctccccctccctacctctctctctctcgcctccctcagttgctcactctccgtgcatttctctctaactgtccacttctgtcttcccctctgtccccctccacccctgcccggcttcccctccagcagaaggcagacctggctgtggccgccttcaccatcacagctgagcgggagaaggtcatcgacttttccaagccctttatgaccctggggatcagcatcctctaccgagtgcacatggtatggttcccctggagaccatgggctgcttgcctggcatggaggctcagggcctgcgagtgggagccagacagccccaggacctcagatgggccggtcaggctcccaggtccctggtagggcaggggctgggtgtgaggctcaggccaggggtgtctccrggtctcactccctctccccacagggccgcaagcctggctacttctccttcctggaccccttctcccctgctgtgtggctcttcatgcttcttgcctacctggctgtcagctgcgtcctgtttctggctgccaggtgagtccactgcctactgggaaggaaggggctggaggaggcacgagccgaggcctctgggaccgacctgcctcttctctctcrgaactgtccttggcctcccctttggggcctcggattccctgtgccctcctttctcagttttgtgccctgtgtctgagtctcattcttccccttgtggctctgactgtgctctgtggttctctgttcaggtctctccccttcccgcctctcccttttttgcctcctcccttctctatttctctctgagtatctctgtgtctctctctgcctcttctgtctccatctctgtgcatctctctctgccttttctctgtgtgcttctgtccatcttgctcctttttccatctctccccctttcttctgatcactgtgactttcctttgcttctttccttttcctccccacctgggctctgggccccatccacacgctgcacgtctctccacaggctgagcccctatgagtggtataacccacacccatgcctgcgggcacgcccccacatcctggagaaccagtacacgctgggcaacagcctgtggtttcccgtggggggcttcatgcagcagggctcggagatcatgccccgggcgctgtccacgcgctgtgtcagcggagtctggtgagaagctttctatctgcctctgcccggggcgagggagggacccatctgaggcctggatggggttggggctgtggcatctcctggaagatttgattccccgttttcccttgcagagctgtgtgacgaggaatggggtggggagagctgagctccagctctgccgcttactggctatgtgagcttggccagaccgcaaccctccctttgcctcagtgacctccctgaaagatggggagaaagatgcccatgtctcagggttgtgaggattcagtgaggctgctaaggaataaaagaatggctactccaattgcttgaactcaggaggcggaggttgtagtgagctgagaactccccactgcactccagcctgggcaacagagcaagactctgtctcaataaataaataaataaaagaatgactactccaaagacagagcagccctgagggctgctggttgcccatttttatggttatttcttgatgacatgctaaacaaggggtggattattcatgcctcccccttttagaccatataggttaacttcctgacgttgccatggcatttgtaaactgtcatggcgctggtgggagtgtagcagtgaggatgactggaggtcactcttgtggccgtcttagttttggtgggttttagctggcttctttactgcaaccccttttatcagcaaggtctttatgacctgtatcttgtgccaacctcctatctcatcctgtgacttagaatgccttaaacgtctgggaatgcagcccagtaggtttcagcctcattttacccagctcctattcaagatggagttgctctggttcacacgcctctaacaatttcacagatgcctgttgagcctgtccatgtgccaggcactcaggtgaggaatcagccccattcctgtcctggagaggcagaggagctgagaataaacaagtaaacagataaatcaacactggacatcctattttattcaaagaataggtcccaaagatattatttaatttgtgcctttttcaagtcaagactaaccttaataggtggcaggtttttcccttctcctaactaagtagaactaactgtggtatggcaggcattagcaattcacttggtccactggcttggacacttgcgagtcttgatggcttttttaaatggttttggatgggtatcatttcaaattataaccctgtagaggattgtttgagcctgggatgttgaggctacagtgagctgtgatcgtgccacggcactccagcctggatgacagagtgagactgtctcaaatgaaaaaaaaaaaaaaaacccccaaaaaaacccaatgaaagctctgtttgtttcctattgctactgcaaaaagttaccacaaatttggtagcttaaaacaatacacattatcctatagttctggaggtcagaagtctgaaatagatctcaatggcgtaaaatcaagttcctggcagggctagttccttctggaggctccagggggagaatctgtttccttaccttttccagcatttagaagccacttgcattccttggtttgtggccccttcctccatcttcagaaccagcagcataggatccacaaatctctctctctaacttccttcttccactcctaaggacccttgtgattcctttgggccttcctggataatccagagtaatccccccatatccagatccttaacttaatcacagctgcaaagtctcttttgctgagtaaggtcacatcttcatgtgttctggggattaggatagagacttctttggtgctggtgggcggggcctattctgccggccacacagtccaagtgaaatgtactaatattttccatataatgatgttgcagatgcacataaaatgtgctattgaggaaccaaacaggatacagtaagagaacagtagagcatgggggcagtcagagaagggtcccctgaggaggtgaactgggttgagtcctaaaggcagaaacagagtcgtccatgccaaggagagggaggagcattttagacagagggagagggccaggtgtgtgaggtgctgggagggcgcctaggagacctgccatgacaaatctagtggcgtcctcacaggagggttgggggagaccagtgccctcatctctgctggccactgtttctgccgcccagccaggggccctcttcctgagagtcacactctctagccagctgttttctgccccttcccatcgctgtcacccagacagcccccactcatgttccctccctcatcggagcctttggccctggggcccactctcttctgcacccaaagtcctcccacacattcactcattcagcagatgtttgagaatcttcagatgtgacttagcaccatgattcagcaggccagtccccgccctcgtgggactcagggtccagtgtagggggtgagatttggtgccatcaccctcgaggacttgcctggtagctgatctgcagcagcctggccacagcccactacctgggcccctcctctccagggccccctcagcccacagcctcctgcagccacacctgagggcttgtcactattcaggacagctctgcctcaggagttaacgtttcttttcctcccccccccccccccccccgcttttttttgagacagagtcttgctttgttgctcaggctggagtgctgtggcacgatctcagctcactgcaatctccacctcccgggatcaagtgattctcctgccacagcctcccaagtagctgggattacaggcgtgcaccaccttgcttcactaatttttgtatttttagtaaagatggggtgttgccgtgttggccaggatgatctctaactcctgaccttaagtgatccactcacctgggtcggcctcccaaagtgctgggattacaggtgtgagccacggcacctggctgagaagcaacatttctttatttcttttcttttcttttctttttttttttgagacagagtctcgctctgtcgcccagcgtggagtgtggtggtgcgatcccggctcactgcaagctccacctcccgggtccacaccattctcctgcctcagcttcccgagtagctgggactacaggcgcccaacaccatgcctggctgatttttttttttttttttttttttttagtagagatggggtttcaccatgttagccagggtggtctcgatctcctgacttcgtgatccacccgccttggcctcccaaagtgcagggattacaggcgtgagccaccacgcccagccgggartcagtatttctaaggtttcactctgaccatggcccccatccctcccaactctcccttggtcacttggtgcgatgagtcctctgacctccctgtttccattctctgagcccttcctgctttcactcgtccatctccaggtggctcctaggctgtctctgcagccattgtcctcaacttttccctaggtcctcctttcctcacgccctcctggccagaaaaccacaaaacctcagatytagccagtagcttggctttgcctgccttcccccaaccccagctgcaccaggcgcacatgcgaccccttatccatgcctccagcctctgtcttacctccaggcagcattcgcccggttagccacccttctagaaactctcttcttgcttctaggctctgtgtcctcctggtttcctccaacctctctggtcctgtttcatttgctgtgggttccttttgcctttgccacccctcaaatggggcttctcactcacactagtgagttttcagtgcttgcagacccaacaccctctttttataacaaatattttttaatacgtccttttccacactgagctgaaattcaagggtaatatatcttcctacacacataatttgtaaaaaatcaatttaacgccataattgcaatatgaaggggaaaaagcagggaagtgacttccaataaaataatattatggcaatacacaaatgcctgggtgtggctatgccagaagacagaatgcgacagtcggcgcctgcttagaatgagtaagtggcatgatgagaagtaagatcatttaacagaattatgttgccacttgatatctgacacatcgaaatagttgacaaatgagtatgtttgtgcaaatacaagtcactgtgaacgtgatgatttgctaatgcagctggtgcaagggtcttgacttgggtcttgagttcgagtggagttgctgtcagagacagatgatttcccccaacggtgagcagctctcagcaaagttccaaacaaaacaacatccagtcatccctcgattaaaacaagaggtgcatttctggagattttggtttatattatcatcatgcaaaaaaaaaaaacttgggtttttaatgtaccaaggagttaggctcagataatcacagaacaggtattccccattgttcagaccaggcctcgaattatccggctgtcctacgctgagcaccagtggcccacactttaccaaacacctcccagggtgccctccctgccagagaccactgttccatacaccttgtcaggggccatctcacctgctgctggacttcccatgctatgcgcatactaacacttccgaagtcatctctagacccctccatgtgtccagccccctgggattgctcctcttgggagctcaacaggcatctccaaactcaccttgtgcaaaacagagctcatgtctttactcccaaatctgactcccagtctgtgttccctctgctgccttagtgagtggccccatcaccaccaccagtcatccacactgtgtcctcaggggccagagggtgcatggtgtgtaccaggcactgagtaatttttgttgttgttgttttgtttttatttttttatttttgagatggagttttgctcttgttgcccaggctagagtgcagtggcacgatctcggctcactgcaacctccaccttccgggttcaagcgattctcctggctcagcctcccgagtagctgggattacaggtgccagccaccacgtctggctaattttttgtatttttagtagagacggggtttcatcatgttggccaggctggtcttgaactcctgacctcagatgatccacccacctcggccttccaaagtgctgggatacaggcgtgagccactgtgcctggccaaataattttgttttgcatgaatggcagcattgacctgtaagatgggtttggagagacttggtttctggagaggttgagtcagtccctgggtctttgtgtcttggggttttggttttatttttcaggaggctgtttaattcatgtctctctatcaagccctcactccatccccatcccagtgcctagcatagctttgcacatgtgttctgtggaggacattgctgttttcattattacgtgctgggaatgtgagggtgggaggtctgggaggcccttttcagcatctcctctgccttcaggcccctcagatctatatggtctacagggaccctggccattcttacttgccaggagggaggacagagggggccacggtaagacaagtggttgctctggggtcctgcagccaggctggtgggagcctattctcccgggtcggtcctgtgtcaccaagacaatgagagaaaacacttgcatagcacttgctgtgtgccggatgaactcagtcactcttcacaaaacccagtgaggaagggcctacaattgtactaacttcacaggtgaggaaactgcagcacacttccaaggtcacgcagcaaggcattgatggagaagacaggatttggggattttccagagatctttctatgattgatttctaatttagctccatcgtggtcagagaacattctctagaggactttaatccttttaaatttattgagacttgctttagagctcagcatatggtctgtcctggtaactgttctatgtggagttgcactgaatgtgtttctgctgttggtggtgcagtgttctataagggtccattggggccagtaggttgatcatgttattcaagtcttctctatccttactgattttctacttgttccatcaattattgagaggagttttgaaatctcaccctgtaattgcaggaaatttatccgtttctcttcaattctatccatttttgcctcatgcatgttgaagctttgtaattaggcgcacaaatgtttaggactcttatgtcctctaggtgaattgacccatgtcattatataatgtctctccttattcctggtaacattctgtgttctgaagttaacattttttgatactaatataggcactctggctttctgaggcttaatgtttgcatagcatatcttttccccattcttttagtctcggcccatctagattattatatttaaagagcattccttttcttttcttttaaatagagatagggtctcactttgttgcccaggcaggtttccaactcctgggctcaagtgattctcccatcttggcctcccaaagtgctgggattacagctatgagccaccacacctgaccaagtgtgtggtgagtattggggagtgcaatggtgtgatctcagctcactgcaacctccacctcctgggttcaggtggttctcctgcctcagcctcccaagcagctgggactacaggttcatgccaccacacccagctaatttttatatttttagtagaggcagggtttcaccatgttggcaaggctggtctcaaactcctgacctcaagtgatccacctgcctctgcctcccaaagtgctgggattacaggcatgagccaccatgcccagccccaagtgtgtttcttataaacagtgtatacttaggccttggagcaaggtttggccaattttttctgcattgggccagatagtaaaatttttttttttttgagatggagttttgacctgttgcctaggctggagtgcagtggtgcaacagcacgatctcagctcactgcaacctctgcctcccaggttcaagcaattctcctgcctcagcctcccaagtagctgggactacaagcgcacgccagcacgcctggctaattttttgtattttagtagagatggggtttcaccatgttgcccaggctggtcttgaactctggagctcaggcaatccacccgcctcagactcccaaagtgctgggattacaggtgtgagccaccgtgtctggccagtaatttttcttttaaattttatttatatgtaatagttgtacatatttttgggagtacaggtgattttttttttttttttttgagatggagtcttgttctgtcactcagactggagtgcagtagtgtgatcacaggtcactgcagcctcaacctcccaggctcaagtgatcctcccactttagcctcctgtgtatctgggatcacaggtgtgcgacgccacacccggctaaatttttttatttttggtagagacgaagtctcactgtgttgcccaggctggtctcaaactcttgggctcaagcagtcctcccacctcagcatcctgaaatgctgggatcagggtaattgggaaatccatcacctcaaacatttatgttttctctaagtaaagatgcttttaggccgggcgcggtggctcacgcctgtaagcccagcactttgggaggccgaggtgggcggatcacgaggtcagaggatcgagaccgtcctggctaacatggtgaaaccctgtctctactaaaagatacaaaaaattagccgggtgcggtggcgggtgcctgtagtcccagctactccggaggctgaggcaggagaatggcgcgaacctgggaggcggagcttgcagtgagccgagatcgccccmctgcattccagcctgggcgacagagcaagactccatctcaaaaaaaaaaaaaaaaaaagaaaagaaaaaaagaaaaaaaaagatgtttttaaatatttatctttatttttatttttttaaagacaggatcttgctctgtctctaggctggagtgctgtgtgtttatagctccctacagcctcaaactcctgggctcaagggatcttcctgcctccgcctactgagtagctaggactacgtgcctggctaattttttattattttcatttttttttttttgtagagagttcttactttgttgcccaggctggtcttgaactcctggcctcaagcgatcttcctgcctcagcctcccaaagtgccgcgattacaggcatgagccactgctctggccctaagtaaatattttgtactttgttgatcatatggtctttgttccagctactcaatcttccattgtagtatagaagctgttgtagatgatacattaaatgaatgagtgtggctgtgttccaataaaactttatttatggatactgacactgaaatttgaattttatataagtcatgtgtcataaaatattccttttttttttttttgaggcaatatctcactctgttgcccaggctggagtacagtggtacaatcttggctcactgcagcctcaacctcccaggcttaaggaatcctcccacctcagcctcttgagtagctggaaccacaggcacgtgccacccagtctggctaactttttgtagagatagggtttcgccatgttgcccaggctagtctcaattcctgggctcaagcgatccacccaccttggcctcccaaagtgctcggattataggtgtgaaccactgcgcccagcctgttcttctgatttcattttaaccatttaaaaatgtgaaaactggccgggcgtggtggctcatgcctgtaatcctagcactttgggaggccgatgcgggcggattgcctgagctcaggggttctagacctacctgggcaacaaggtgaaaccccatctctactaaaatacaaaaaattagccaggcgtggcagtgtgcgcctgtagttccagctactcgggaggctgaggcaggagaattgcttgaacctgggaggcagaggttgcagtaagctgagatcgtgccactgcactccaacctgggcaacagagagagactctgtctccaaataaataaatacatacatacatacatacatacatacatacacatacatgtatatatacatatacatatatgtatatgtaaaagccattcttagcttatggggctgtacaaaaatagacagcaggtcagatttggcctgtgggccatagttagccagccgctggttcaaaccaattacccttaatgtaattactgatatggttaggtttaaatctaccaacctgctatttgtcccatctgttctttgttccccttttcctctttttctacctttagggggttactgggacttttcttttcttttctttttgagacagggtctcactctgtcacccacgctggagtgcagtggcacgaacacgactcctgggctcaagccatcctcctgcctcagcctcctgtgtagctaggaccataggtgcgctctaccatgcccagctaattttttaaattttttgtagagaccggatctcacttcattgcccaggctggtctcaaactcctgagctcaagcaatttgcccaccttggcctcccaaagtgatggaattacagcgtgagccactgtgcctggcctgttgggattttcaagattctgcttatctctactcttgacttgttaactgtacttctttgttttatttttcttagtggttttctgggtttgcaatatggatctttaatttattacaaaatactttttttttttttttttgagacggagtctcgctctgtcccccaggctggagtgcagtggcgcgatctcggctcactgcaagctccgcctcccgggttcatgccattcttctgcctcagcctcccgagtagctgggaccacaggcgcccgctaccacgcctggctaatttttttgtatttttagtagagacggggtttcaccatgttagccaggatggtctcgatctcctgacctcgtgatcctcctgcctcggcctcccaaagtgctgggattacaggcgtaaaccaccgcacccagccacaaaatactttcaagtaacattataccatttcacgtaagatataagaccttgacaacatgatatgttcctctcaccctcccgtcctttgagctctgcatatcttatgaaccccacaatacattaggggtgtgtgtgtgtgtgtgtgtgtgtgttagatagtaaatgctgggtgtggtgctcacgcctgtaatcccaacactttgggaggccgaggctggaggattccttgaacccaggcgtccaacaccagcctggccaacatagcgagacctcatctctacaaaaactaagaaacattagccaggcatggtgatgcatgcctgtggtcccagctccgtgggaggctgaggtgggagaattgcttgggtccaggaggttgaggctgcagtgagctgtgttcacgcctctccaccctagagcaggaccctgtctcaaaaacaaaaccaaaccactaaatgcttcgtaaggaaatttgaaagtgaggaatatatcttttctatttacccacaaatctaccatttgaagagggtgcccttcaccccttctggtacatccacgtttctatctggtgttgtgtttcttttacctgcagaacttcctttaatatttcttgctgtgcgggtctgctggcaattaattctcccagctttggttttgtatgaaaaatgtgttagtgtgtcttctttgagggatatttttgcctgctgtggaattctaggttgacagtttgttttgatttttctttcagcatgttgcatcatctttgggcttgcacactctctgacaagaagtcgactggcactgttatctttgattctctgaatgtaatatgtttccccccttctagctgcttttaagatgtttctctttattgctggttttcagcaattgattataatgtgtcttggtgcgttttataaatatgtgtgtttagcctacctggggtttatggagcttacatctgcaagtttatggttttcatcaaatttgaaaagttgtaggccattacttcatcagacttttttttggttatccctttctctcctctctttctggaactccagtcacataggtaaagccacttatttctcaggccattgaggctctgtgctcattttcatcactttttcctttctgtgctttattttggatagattctattgcagttcttcaaattctctaatcttttttttttttttttgagatggagttccactcttgttgcccaggctggagtgcagtggcgtgatctcagctcacagcaacctccacctcctgggatcaagcagttgtcctgtctcagcctcccaagtagctgggattacaggcgtgcaccaccatgctcggctaattttgtatttttagtagagatggggtttctccatgttggtcaggctggtctagaacccctgagctcaggcaatccgcccccatcggcctccgaaagtgctagaattacaggcctgagccactgtgcctggcttttttttttttttttttgagacaaagtcttactctgttgcccaggctggagtgcggtggcacaatctgagctcactgcaacctctacctcccaggttcaggcaattctcctgcctcagcctcctgagtaactgggattacaggcatgcaccaccacacttggctaatttttgtatttctagtagagaagggttttcgccatgttagtcaggctggtcgcaaactcctgaactcaggttatcctccctccttggcctcccaaagtgctgggattacaggcgtgagccaccgcgcccagcctttttttttttttttaaagataaggtctcagcctggccaacgtggcaaaaccccatctctacaaaaaatacaaaaattatctgggcatggtggcgggtgcctgtaatcccagctattcaggaggctgaggcaggagaatcgcttgaacccgggaagcggaggttgcagtgagtcgagatcgcgccattgcactccagcttcagcttgggacagagcgagactctatctcaaaaataaataaataaataaaataaaaaaataacgataaggtctcacttagtcattcagactagagtgcagtgacgaccaggctcagtgtagacttaaacttctggcctcaagtgatcctcccacctcagcctctcaagttgctgggactgtaggcaggcaccaccacacccatctaatttttttatttttctgtagagacagggtctggctatgttgaccaggcttatctcaaagtcccagcctcaagtgatcctcctgcctcggcctcccagtgtgctaggattacaggcatgagctactgtgcctggcccaaattccctcatcttttctgctgccggtgtctaatctgtgtaatccctttcagtaaaatttttctttcagatatgtgtatatcattctctaaaagttctgttcacttctttttatatcttctgttcctttcattacgttcatgtttttctttatactcttgagcattctgaatgtatttataatagctgttttcatgtccttgtctgctaattccgtcatcatctatgtcaattctgggtctgtttcaattgagtgatttttctcttggttataggtcacattttcctgcacctttgtttacctggtcctttttttttgaggcaagagtcttgctttgttgcccaggccagagtgcagtggtgatctcggttcactgcgacctccacctcctggattccaacgattctcgtgcctcagcctcccaagtagctgggatcacaggcgtgtgctatcacacccagctaatttttgtatttttagtagagacggggtattgccatgttggccaggttgtccttgaactcctggcctcaagcaatccgcccacctcagcctcctaaaatgctgggattacaggtgtgagccaccgtgcccaacctggtatttttttaaaaaattatgtaataggccgggcacagtggctcatgcctgtaatcccagcaccttgggtgggcgaggtgggcaggtcacctgaggtcaggagttcaaggccaacctgccaacgtggtgaaacctcatctctactaaaaatacaaacattagtcaggcgtgctggcaggtgcctgtaatcccaactactcaggaagctgaggcrggagaatcacttgaacccgggagtggccaagatcacaccactgcactccagcctgggtgacagagtgagactctgtctcaagaaaaaaaaaaaaattacataacagacattgtttacattgctgaatatatttttttacagagtatttataaactttttctggaatctagttaggttacttgtgaattactttgatacttctaggcctgtttttaagcttttttagtgcagctttagcattgcctttattctagggctaacttaatcctatttctagtatgttacacttttgggtctctactgaatgtctcatgtattcaatgaaatctttctactctggctgcagggagctcaaaagactctcagccctgtgtcaactctaagaattgttttctccttgaaagttgctcttgtccagccccacagagtttcaccccatgcatgcacagattgatattcagccaaagactcaaggggaccaccggtttctgaatcctccctctctttgcagctccctcctctcaggcactctatcccccaaattccagccatgttggcctgcctgatcaccagtctccgtctctgcaactcagcaggattgctgggctgtttgggcttcccttcctataaattaaatccagccaagcagcctggacaataagactcattttgtttctcttctcagggatcacagttctatgatgtctcttgtcctatgttttaaatagtttcctggccgggcgtggtcgctcactcctgtaatcccagcactttgggaggctgaggcaggtggatcacctgaggtcaggagttcgagaccagcctggccaacatggtgaaaccccgtctctgctaaaaatacaaaaattagccgggcgtgatggtgggcacctgtaatctcagctacttgggaggctgaggcaggagaatcacttgaaccccaaaggtagaggttgcagtgagctgagatcgtgccactgcactccatcctggctgacaaagcaagatctgtctcaaaaaaaaaaaaaaaagaaaaaagtttcctgtattctatccagctctttagctgtttatggtgggagggtatttccagaccatcttactcttttatatctggaagtagaagtctccggatgcaatatttacaaccaggaagtctggcttcagaatccacactccccgcttctgcacccagcagtcactgagtcttccagatgctggggtcacttgggaggggcaccaccaatggggggcatggccacgggggcaggtcagcaggggtgactccagcccgtgactcacccctcccacccttcaggtgggccttcaccttgatcatcatctcctcctacacggccaacctggccgccttcctcaccgtgcagcgcatggaggtgcctgtggagtcggccgatgacctggcagatcagaccaacatcgagtatggcaccatccacgccggctccaccatgaccttcttccaggtggggccaccagaacctctcaggcgtggtgttgggatccctgccatgcaaagcagctcaggatgggtctgggcagggtctcctgggtcagagggactgattgtcagtgacagcctggaggctggggagcagaaaacacacatgtgctgtcatggggctcgcagctggctggctagggaactggggaatgagggcagggaggcatatgtggtatcaaatgtcaatgtcatatgggccaaatgggatcaaggaggctgctggaagggtcgggaccaggaatatgggctgacagagagaagggaaggcccttcaaggtgaaaagtgcttgatcttttgtattttggggtggtgggaaggaaagaagaggaaagcaagcttggcagggaggtcctagtggtctaaaggaggcctgagttgggcagcggccaccggctggagggttaaggggaaggaggtggaggtgcactcaccgggccccccaggtgggtggtgggcacagtggctgtggggatgacttggacctggcctggacagtttgtccatctcctctctcycctctacctttggctctgtcttcctttgatcaccttgcattctcctgggttgagggagacttcctggaggatgggaagggctcggggaaaggaagcggctggaaagaccctcccatcttccccttgtgatcctcctgcccagaattcacggtaccaaacgtaccagcgcatgtggaactacatgcagtcgaagcagcccagcgtgttcgtcaagagcacagaagagggcattgcccgcgtcctcaactcccgctacgccttcctgctcgagtccaccatgaacgaataccaccggcgcctcaactgcaacctcacccagatcgggggactcctcgacaccaagggctacggcattggcatgccgctgggtacggcacagcacggtgtggaacacagcagggccgtgggcatccaaaaccacctgtgagcaggcccaggaccgggccaggcacccccgaggcaggctgggtgtgttgcatgtggcctcctggctgtatggtcttgggcaggcgacatcaccgtcctgagcctctgtacccccaacctgcaaaaccaggcctagcagcaatccagccctcccagagctgttgggagaattcagtgagactgtgtatacaattcagtatatgtgggtggtggggcttgctgtcttcccccaagggccctgtgggggtgaggacctggtcttgtttcctatttcttggaaaaatcctatagcctggctcagagcaggtgcttgaaaaatgcttgtaagatggatgggaaggatggaatgatctggtagggagacttgtatgtgcctatttatatttcaggacaagtttggtgttttgtttttttttttttttttttttgagacggagtcttgctctgtcgcccgccttggcctcccaaagtgttgggattacaggtatgagccacctcgcatggcccaggacatgtttttccaggactcagtggtggaactcacgaccaaattgtcaccaaattttggcattttggcttttaaaatcatttatgtactgatgacacctgtattagttatctattactgcatagcaaattgccccagatcttagcagctttgtaggtgagtcggtgccagggaggcagtgtagcttggtgcttggaggacaggctcaggagtcacaccgacctggattcaaatcccagttccggctggccactgtggtttatgcctatgattccagtgctttgggaggccaagccggaaggatcacttgaacctaagagttttgagaccagcttgggcaatatagcaagaccctgtctttacaaaaaattaaaaaattagccaggtgtggtatgcacctgtagtctcagctacaggctgaagtaggaggatcgcttgagcccaggaagtggaggtggcagtgaacaatgatcatgccactgtatgccagcctgggtaaccaagtgagattctgtcaaaagaaaggaagaaatctcagtttcctccctgactcagtgcacagtcttaagcaagtgtatcactttcgtcattcagaaacacttgcctcaggtgggatacctgtcccacaggatcatcataagacctgaataaacccagggtctggcacacagttggtgcctggtagatattaatcactttcatctgcccgtgtctctggttctgtggtagttggtcgggaagtatcttagtcaatgaagaaataagtatagaatagggtgtgtggggtgttgaagcccaaggatggcttaagggcaggatgtgaggttggggaggagaggtggtccagggagaggtgtggatggggattcgtctggtgtccaactgcatgccaagtcccgcactggatgcagacgaaagatgataaacacatagccatataatacagtgttaggtggtgacagctgctccaaagtaaattaaagggaagacactgacagggagtggggcgcttggtgccattttaaataaagtcatcagaatagactccctggggagccagcatgtgggcagagacctggatgaagtgcggagagggacattccaggcagaggcaaaggtcctaagacaggactgtgtgtgatgaatttggggagcagccaggaggctgatgaggctggagctgagagccgtgggggtgagggtgtctgagagtggccgaggggaggagcttgcaacaggaagccatggagagtcctgagcacaggaaaggtatggcctctgactcttcctaacactgtctctctggctgctgtgttgagaggagactgggctgggggtgaggagaggctgcagggaagaccctgggcacgtggtagaggcgggggaaggccgtggtgagggcacagtttggggtttggggcggtcagggctgcagggcccgatggctggtccagcccctcgtgtgcctgcccaggctccccgttccgggatgagatcacactggccatcctgcagcttcaggagaacaaccggctggagatcctgaagcgcaagtggtgggaggggggccggtgccccaaggaggaggaccatcgagctaaaggtcagttcccgcgtatggtgtccccttcccatagccccctcccagcccccttcccacacagccccaactccctttgccccccaactcccttcgccctccaggtttgggcatggagaacattggtggcatttttatcgtgctcatctgtggcctcatcattgctgtcttcgtggcggtcatggaattcatatggtccacacggaggtcagctgagtccgaggaggtgaggaggctgggggtgggggtgggcaggaacagggacccccaggggctgaggtgcgtgaagattgtggcattgggagccatacctggagggtggtggggatcgcgagaagggggcagaggaatgcaggaggtggggaagtaagagagctgatggggccagagaatcagcgcgtgaggaagaacaggagggaaagtaggcacagggagcaatgaggatgcagggagaggaggtgagggacaggatgtggggagccacagaggcagaaaagcaagaagaaataagaagagaaacagggccaagtgcagtggctcacacctgtaatcccagcactttgggaggccgaggctggcggatcacctgaggtcaggagttcaagatcagcctggccaacatggtgaaaccccatctctactaaaaatacaaaaattagccgggcakggtggtgcacacctgtaatcccagctactcgggaggctgagatgggaggatcgcttgaacccgggaggtggagattgcagtaagctgagattgcaccactgcactccagcctgggtgacagagggaaccagaagaggacacagccctggactggtcccacactgtgttcaggagggctgcttccatgtccctgggggccgcccagccacacccctgcatttccagacccattcgtgctcttgcacccctggactgctggttccctgcttcccctctctctgtcagcctccagcccttcctccccctcctcacatccagcggctgaccttacatctactccccagaccccagctctgcatccagctgcctgccagtgttctgcacttggcccaaggactcctctgaaggagccgtccatgctgctagtaaaggtgccctccacccgtgtccaggttgccttctcaaggacatccctccggcaagtctgtcctttcctcctgcagcatcagttgtcctctctttattggattcaggccaccaacgtacaaatatgctgtcatttctccagtcttaaaccctctcctgacctcactttccctcccagccaccgcccactttcttcccttctctttacagccttggcagcagtggggggtctccctgatgcttccagtttcttctttcctcccatttcctcttgccccccactccagtctggcatcggtccctgccactccactgaagccactcttgtcaccagcaacttccatgtctgaaattcccggtctcaggcctcatgtatatgaggtagcagtgggcttcggcacagccagtcactctcaatcctcaaagccccttcttccccttctcccacttctccggtcactccttcccaggctccctcgttgggtttctctttctccccaggctctgtttgttgtggggctccagggctcagtccttagactgcttctcttctcggtctttctccactacttsaatgatcccaccagccaaatggctcttaagacccactatgtgctggtgattcttgtgttagttatctattgctatcataacaaatgaccttaacagcttttaaaaagccagcttccattggttcacagtttctgtgggtccagagcctcggagcagcttagctggatgtttctggctgccatgggtctctgatgaggtcatagtcatgttttttggccagactgctgtggtctgaaggctcaacaaagggtggagggttccgttctaagatggctcactgtcccaaatgtccccatgggattttagtttctggaggtggccaagtgacaacatggagaccaatttcattgaaagatgatttttgcccaggtgtggtggctcacgcctgtaatccaagcactttgggaggctgaggagggcagatcacatgaggccaggagttcaagaccagcatggccaacatggtgaaaccctgtctctactgaaaacacaaaaattagccagatatggtggtggacacctgtagtcccaactactcaggaggctgagacaggagaattacttgaatctgggaggtggaggttgcagtgagccgagattgcaccactgccctccagcctgggtgacagagtgagactgtctcaaaaagaaacagaaagaaaaatgatttttattctttaacatttcccaggagaaggggaaacagcttacgattcaccagtttggataatgtcagtggactctgggctataggggctgtccctacttatctggtacctggccccgggttgatttaggtcaggaagaatattggcttggtatgtgagagttaggtaaagggggaggttgggggtatagattggttggtttgcacatgaaaggcagctgagccctctgctatctctaaggcttggctagttctgggaggggtagtctctccccagcctgcaagatgtttaaagtgtcaaaacatcctaagacacagaaaataaaaaacatgatgaatacactcacatggcagttggcaggaggcctcagttcctcagacaaggacctctccaaggactgcttgagtgtcctcacaccatggcagctgagatcccccagggcgagtgatcagagagagcaaggcggaagcagaatgtgcaatggctgaaacttattctgttggtcacacagaccagctctgacacagtgtcagaggggattacacaggggcgtggacgcgggaggtgggatcttgaaggctgcctgccttaacccacaaatatgtgtctcccctgaagccaaggtctgcaacttcagctccacacttggtatctccacttggatatctgataggtgtgcacgtgatgcgatgtgtccaacattgggcttctgcccacctgtgaggcaatttggtccttccagttgctcgggccaaaatattggagctttctttcactattctctctcttccatgccccgtatctgatctcttagcagatcctattggctccaccttcagaatatatccagaatccagacctttctcaggtygctctggtccagccatccctatctcctgcccgggttattgtcatagcttcctccatgagctccctgctcttgccttggcctccctacaatctgttctcaacacagagtgatcctatgaaaacacagcactcctctacctaaagctccccagtgattcccgtctgactctcattctgattttcagaatgaaagccaaaaatccttccagtggtttatgggccttaccagagctggccgccactgctcctttgacctcatttttctgtcttccctgtgcacgcccccctccagccatgctgacctgcttgcagtgcctcagacgtgccaagtcactcccacctgggcatttcggccctgcccggttatctgtccagcaggctggcttcccaggtctccagtggctcaccctgtctttatttaaggatccttctctcagtgaggtcttccttgactgtcctgtctcagaattcatcgtcactccctacccatacaccttaggcctcttcccgattttctttctttccaaagcactcaccacgcctaacacactacatacatgtctgttatcttctgtctctgcacacttgagcataacctccacgagggctgggacttctgtctgtttccttctctgccatatccccagtgctcagaacagtgccgggcacacagcaggccacaggtaaatatgccttgcaataatgaacgcatggatgaggggcagaagatgggaaatcaggaaggaagaactggagaaaatttagagacagtgaaaagaccagaggaaagagaggagcttaggtggaaggtgaagggcagattcaggaacaaacgcagagtagaatggagacattgaagataagtggggagaggtggagaggggaggcagaaaacacgggggagataaagggaagagaagtgggaagggaagcgagggcagaaggaagaaagacccgggcgaggaaaggaggaggaggagtgggatgtggagaggggctgggggaggcgggaggcggactgcgccgggacggtgaccgcccgcgccacccccaggtgtcggtgtgccaggagatgctgcaggagctgcgccacgccgtttcttgccgcaagacgtcgcgttcccgccggcgccgacgcccgggcggcccgagccgggccctgctgtcactgcgcgcggtccgcgagatgcgcctcagcaacggcaagctctactcggccggcgcgggcggggatgcgggcagcgcgcacgggggcccgcagcgcctcctggacgacccggggccccccagcggagcccgacccgccgcccccaccccctgcacccacgtgcgcgtctgccaggagtgccggcgcatccaggcgctgcgggcctcgggggccggcgcgcctccgcgtggcctgggcgtccccgccgaagccaccagcccgccccggccgcggcctggccccgccggcccccgggagctggcggagcacgagtgaccacgggcggggctgtgcgggcgcccggactgaccgaagggacggggcccgccccaggccccagcagtctccgctcccgcagcgggcgcgggacaggacttgtgcgccggcgccccggacgccgcgattttgcctttggttccccgcgaagtccgaggcctggctctggagcccgcctgcgccccccagtggactcgcgagagggtgccgcgggcgagaagggcgcaggaaccgaggactccaggggctggggacttcgggggcggctctgggaagcggaaagcagtcagcggagaggaccccattctgggactgctcaggctccccaagacttgacgcagccccccacgcttctggaggtggggagggcctctggacagatgggtgtcccctggtgcccctccactcttctcttcctctcttttttggggggagaaacctcggaatttctatgagacctcccccagggagggggtcagttgggcccccatccctccccttgccacatcgcagcccctgttggaataaaaaaaagaacaaaaccccagaactggggataccgtctctcatttcctgggggtgtgagggctttggaggcttgggtccccggggcacctgctgagaatcagagtgagcctcgatggttacttccatgctctctccaccctcagccctgcctacaggctgcaggccagcccgggtcccagcagctggcccctctccactgaccttctctcaggacagagggaggctgcgacagagaccctgagacagatggagagatgcagggatctggagacgcggagacaccggaagcggagacacagaaagacagaaaacagatggggctgggggaggggagggccagtgagctgttgagtgtggccgtgcctggggtggcgagtgtgtgcctgggccggggtgattcagtgacgttgtgatcgtgtgtgcacgcatctgcgaggccatcttcaactgtctgtggctgtgatcccgtgtttctgttgaaaatgtacctccccaacccccaagagaggaagtgaggaatcccagtagactggggggtgggtgggcgggcaggggtgggagaggctgaagggctgatggcgcaggagaaaggtgggtccgccttctgtccccgccctccctgccccgccggaggtttctgtggaaactgcagctgaggaaggacgagtgaaggtcacacagcaagagccaaaacgaggccgagcagaaagggagagatggagggatggcgagagacagagatggggagagacaacgaagggggcagagtgggcgggagggggatggggagagagagctagaggacacagagccggcgagacagggagagaggctgggtgaggtgagagaagactggagaaagaatagagggctgagaccagaggtgaagcgggagggtaagatacacccggagttggggtgagagacaggaagccataaaaaactaaatggaacctggaggggactggaacggaaaggaaagcctgactggaaaggtcccagagagagcgaggctgcgcccgttcctgggcggcggcccggggcttgggagctgtccgttcagcacccagttggccagcctgagcccagagcgcccgacttccctccagggcccgcctgcccagcgcagtcctggcaggccggccacaccctgggagacccctccccgcacacagcgccccccgtcgccacccgtccccttctgcgtctcagaccctggttgcgtgcccctcggacaggtgtgggggcaggcaccagcctctctctgttgtctcgcatctctatctccacgtctcttacacactccaatcaatgtctctgcccttgggtcggactctttgtcgaggtgactagaacatgattacagacatttctggtttctcccccttctctgtcccaatgcctcgaggccaattccctctggggtctcccccatttctgagtccccggtcccctaccaggtttctgctcagtctccccctggcctttatctctgagtctccctggtttaccaagcctgtctctgcctggctgtctacgtctctctgtctctgtcaccttcactgaactcttccgttgctctgtctccgtgttctcatctctgcatctgccaatctctgtctgtctttttcaatctgtttgtatccgcctctctctggttctgggctgcctgtttctccctctgtgtctctccttccgcctctcacatctagctcccctattcccctttatccctgtgaccttcccaggtctttccttctcaccgccccccctacttctgcagagcctcaccaggagcacgatgcacagtcatcagtctcatcaggctcgtgcctgaggagagagtgcatgaggggggacgtgagcttgtgtctgaggtgggatgggaagggctcaaggcctcccccggcccagctggagagcaagagcagacagagcctagaatctcctggaatccaggcctcccccacctccccaggcttccccatctccccagtcccattctccatggtccaggcccatgcctctaggccaaggtgtcaagagaaggaaaggaggatatgttgataggctctccctcccctaggaagagggcagagttggggagggggcgtctgggggtgaggcatctgggttaaaagatgtggctcctccccctttcccagtctccatggcaacagcccagtctgcaggcccaacctcctttgctgcagaagcagctccctgttaccatggcaacaaaggacagcgagaaagatggggacgggtcagaggacaggattgggatggggctctgggcactggggaaagcctccattcactctctggccttgtctctgtccatatgctgtggctctgaatctctgtgtttctgtgcctctctctggccttcagcctttcacacatttccctgcaccaggtcctcgaccttcacccacccaccctcatacaccaagctcactccctgtcccttgcctgcgtcccccacatctcctatcccataggtggagaggatacccacattctgagaaaactacaaggtcaaatgctctctgtctctctctctctctcttccccttctaccatccccagggagagtctggggtgttcctcatagaacaaagtggtgttggagtgagtggggaggcctcaacttcttgggctccagtggggtggctgatggggtgttgtgtgtcggcagcaggcctggggtgtgggtgccggctgtgcatctgtgtgtgtacatatactgtgacgagctctgtgtgtcatgtgggtgagggcgttggggtgtgtttggaggtgcaacaaagatgtctgcgatagtgctgcaataacgtgatgtgtgtatgtgtgggaggtgtgtgggtgtcgcgtgacttgtgtttgaattattgtgctatgtgtaagtgtgtgcacctttttgtctgtcattcacagttagcattggcaactttgcactgtgggccgttgctcatgcccaaacacactggggagcagtgtgtgtgaggatgtgtgcgacatcgtgggatcatgcaacgatgtccacaaaggctgatgtagtgtgtctggaggcagtgtgaggcctgtgcgtgtgtgatggtgctgagtgcaggtgtgtgttggtttatgggttgcacgatgtgggtttctatgtgagatggtgggaggtcaggtgtggtagagtgtgtgatgtgtgagtctgcgattttctgagtgtcggtgttagtccgcacagcactttgtggctgtgattatgagtctcttgtggtgtgatgggtgtgtaaggtgtgtgccctatgtgtgtttcactctatgtttgagactctgtgtgtggtggggtggtgttgtgtgtgtgagggtacatgctggcctatggtggaatatgagtgcaaccctgtggtgtgtgcgtgtccccagcatctgggctatcagtgtgatggtcctgtgtaactgtgacgctgggcattttctgggcctcctggggccatcctccaccgtgttgtgtctcccgtgtaccctgtgtggttgtggctcattggatagctcaggcgtagtgggggggcacccacagtgagggaatctcagggctcctcccgccagcacccctcctcaattgcaaggcctttcttgctctcttgtgttcccttccaacttcccctcctgcagggccctctccctgaacagcactaccccccgccgtctccagggtccctggtgccacactgcagtgattcaccgggcttccctcccaccccgtgtcactacccgccccccctcccccagcgtacccttctcggtgatggcacacccccacaatgagaggatttccggggttttctttccctgagcgccccttcttggaggccctactccatattgagggggtctccaagtcccctattgcggaggtctctgggaatccccccacccccgcagcgctcccccttcgcggccgcgccgccactttgcggagcccaaggggaggacagctgcagtaccaggggcggggccgcgggccgtccgtcagcacggcggcgcccctgattggccagcgccgcccccctcccgcggacgcgggcatatgaggaggcggaggcggcggccgccgcagcctctgtgcggtgggaccaacggacggacggacggacgcgcgcacctaccgaggcgcgggcgctgcagaggctcccagcccaagcctgagcctgagcccgccccgaggtccccgccccgcccgcctggctctctcgccgcggagccgccaagatgggggtaggtgctgagccggctgggcgccgcttccgtgtgacattgtggggccggtgacattgggtgtgcgcggggggcgggggcaccgggacccctgcgctccggggccaggcctgcgagacccggggagccggctgacccagccaatccatgtggtcgtggggccgcagggggcggcggggggtctgtggcgcacgttggcatggctttgtgtgcggagatccgcgaggttgtgggccagccctcagcatctccgcctgaccttgtgcggttgcatgtgcacagttgcatgtgcgtatgagagctgctggctctgtcaggccctggcagcgagtgtgtgggccccgtggtgtctgaaagtctgcgatcgcgtctgggtgtgtctgtgagagctcgtgttagtgcgtctggggttattgaggcccccctgcttccctggcagggtgcggataggtccacgttgtgggatggacaccagatgacctctctttctccttccaggcctggatggggggactccgcagtgtgtgtgtgtgtgtgtgtgtgtgtgtgtgtgtgtgtgtgtgtgtgtgcaggctccgcagtgtcgcagcctggggctgcagtgtgtgtgtgtgcagcccctcatgtaggggagcaggcatgggaggctgggaggaggagaggaacaggagagccacggtggggagactgagtgcacagctgagggtgtgcgtgtgcaactgtgtagtggggagcgtgcatgcctggctgtgtccttgcctctgtgtccgtgtgtccttgtctgtctgtgagtctctccagcagatgccgcctccctccctggctgaccacctgacccttgctgcagccctggattcctccctgtgtgtctggggcggggctgaagggagggggaatcaggagaggagggggtgggtgggggtaggtgggatgaagagggcgggagaggccagtggagggagaataggagggctggggagaaagatggcggataaaggctgatgggcccagggatggaggtgggggatggggctgcagatctgtggggtggggcagggtgggccggggggctgggaaggaggattgggttggggcaggactaggggagagaagggagaaaggggtagtcagtgatggctgtcaggtaagtgggatggagggagggaagctgtggatggattgggagaagactgatgctaaaagccctagagaaggaagttagagggaggtggtcttaggaaacggagtggggacgagaggagaaatgaaggcagcttagacatgggaaggaaagacagagacacatggaaagacagagatgctctgaaagagacagagaaagagacatggacatagagacaaagagacagagacaagcagagagacatggctgagacacatggagagacattgagagagaaaatgagaaactgaggctcagaggaagagacacaaggacagatatttcctatctagcggcaaccacagtcagcctgagggacaggaagaggaggcagagggcaaagggggaggtcaagggagggatggtcagagatgtgggccaggtcccctgcgagggggaagggaggccggcccaggcgcagaggctgcgggagctggcaccagatcagggagaggcggacagcatggaaaatggcaaggagctgcagaggcggccacagcgagacaggcatggtccccacccttggaggtgctcccaccccgcagcgcgcccatctgggcctcctgcct

SEQ ID NO: 97688 - DNA, 23713 bp, Homo sapiens
tttctccgtccagaatcactttctggtcccccaaatccctccaatctcatgaccccttcaccaccctccatcttttgttgttgttgttgttgttgttgttgttgagacagagtctcgttgtgtcccccaggctggagtgcagtggcgcgatctcggctcactgcaacctccgcctcccgatttcaagcgattctcctgcctcagcctctttgagtaggtgagattacagtcattcaccaccacgccggctaatttttgtatttttagtagaggcgaggtttcacatgttgcccaggctggtctcgaactcctgacctcaaatgatctacccacctcggcctcccaaagtgctgggactacaggcgtgagccactgcgcctggcccccaccctccatcttttttttttttttttttttttttttttgagatggagtctcgctcggtcatccaggctggagtgcagtggcgcgatctcggcccactgcaagctccgcctcctgggttcacgccattctcctgcctcagcctcccgagtagctgggactacaggcgcccgccaccgcgcccggctaatttttggtatttttagtagagatggggtttcaccgtgttagccaggatggtctccatctcctgacctggtgatccgcccgcctcggcctcccaaagtgctgggattacaggtgtgagtcaccgcgcccggctcaccctccatcttttaactgtttccccatgtccctgttcctaatagcctctctctgtttcctggcttatcttcccattagctgtgactccttcgacttcatcttacccctgtgattccttatctgaccaaaccttttccaatctctctctgctcacttattttctctcatcttctctctctcttttaagagacaaggtctcactctcttgcccaggctggggcacagtgatgcaatcatagctcagagtaacctccaactcctgggctcaagtgatcctcctacctcagcttccctagcagctgggactacaggtgtgggccaccgaatccagcttttttttttttttttttttttttttgagatagagtctcactctgtcactcaggttgaagcgcagtggcgcaatctcggcttactgcaacctccgtctcctgggttcaagcgattctcctgcctcagcctccagagtagctgggattacaggcgcgcaccatcacatacagctaatttttgtatttttagtagagacaggatttcggcatgttggccaggctggtctcgaactcctggcctcaagtgatctgctcgccttggcctcccaaagtgctgggattacaggcatgagtcaccacacctggcatcatccagctaatttttatttttattttttgtagagatgagggtctcactttgctgctcaggttggtcttgaattcctagcctcaagcgatactcccgcctcagcctcccaaagtgctaggattacagatttgagccaccatgcctggcctcatctggtcattctaaatagtattcccaccacaccccaaaacatctccctattcacttgttttgttttgttttgtttttgagatggagtctcactctattgcccagactgaagtgcagtggcacaatcgtgactcactgcaacttctgccttctgggttcaagcaattctcctgcctcagcctcctgagtagctgggattacaggcgtgcaccaccatgcccagctaattttttttttttttgagatggagtcttgctctgttgcccaggctggagtgcaatggcatgatctcagctcaccgcaacctccacctcctgggttcaagtgattctcctgcctcagcctcttgagtagctggaattacaggtgcatgccaccacgtctggctaatttttgtatttttagtagagatggggtttcactatgttggccaggctggtctcgaactcctgacctcaggtaatctgcctgccttggcctcccaaagtactaggattataggtatgggccactgcggctggccaatttttgtattttcagtaaagacagcattttgccatgttggctaggctggtctaaagtgacctggcctaagtgatcggcctgccttggcctaccccagtgttggtattacaggcataagccaccgcgcccagccctccctattcactttgctactccccttgacttatctgcatgctgatggccaccctatctttatattccaggacaccatggatacccagggaccagtctcccagccttttcagcagcctgagaaacctggtcgtgtccgtcgtcggaagactaggcgggaacgtaacaaggccctggtgggcagccgcggccattagcccaccacgatcctcctgtggccattcgggatccacctgtggtccctactgcctccaagctcgtggtcataacccagggccggctgagccgggagcaccggggtctcttcaaccacgaggtgaaatccctagatgttgcaaggctgcttagcagtgggaccctggtgccaggcagccccacactccccgccaagccctccccaagcccaggcagggcccaggaaccagccccacggtccagggacaaagagaaccaggtgcctggaggttcgggcccaggcccacccagttccccagagttgtctggcgtggggcagctgctggcagagctgcagtgtcagctgagtttgccacaggccttcccccggaggaacctgattcaggatgccagggatgccatcgtgcacaccttgcaggcctgtcatggttgtgtgcctgaccttgccctggtgcttcggggctgccagccacccttgccaggtgagcgtccctcctgcccctgtactcccctttcctttgtcggctctagctcagctagcctctatgcttctttcctctgtgccaggggccaagcctggggtctctgagagaaagatgacacccttctggattaatagccctgatcaagtcccagagcaggagaggcaaaggaagcaacaagggacaaaggagttcaccttccccatgccctacacctccagcatgcccactgcgcacagggggagtctggcaccgccaagaggtccctggccaccatactttccctcactgtcttcgccatctggaacagcctggggtcccccaacagcgtttgacttgttaaaaagcatctggctggtagccacgccaccccctcctcggccctggggggttggcctccctcagcccctgcctcagccttcatcacccctgttgccccgaacctctgtcctggactggagccccagccccccttccccactgcccagcctctcctgggtagtagcccagagcagtccggaagcctggtcttttccacccatgagactgtactgaggagaggctgaggctagggctggggacagatatcttgtactcccagtgacctcaataaagtacttttcatggtcctcttgattttcagtgagttgctgactcagaagagcagcttttcttagctctgagttctaggtccaagatggaggggaaggtactgttgcttgttaccttcatagggcctgaggagccagcatggtggggaaaattgggacttcaattagtccaacacatatgcccactgtggctaactgtgtacctgaccctgagctctggtgatgctggggctccagagtgagtgagacaaaggccttgtcctcatgaggctcccagtttggtggtcggcacacacaaccccagctccagtgattgtgtctaggagagcaagagaggtgcaggggctggggcagtccaaggagggagtgatggctgccctagtgaggagggaattcttcgtagaagagctgtgtttttctttctttctttctctctttctttctttcttttctttctttctttttccttccttccttccttccttccttcctttctttccttctttctttctttctttcttttttggagacagagtcttgttttcttgcccaggctagagtgcaatggcacaatcttggctcactgcaacctccgccacccaggttcaagcgattctcctgcctcagcctcccgaggagctgagattacaggtgtgcgccaccatacatggctaatttttgtattttaagcagagatggggtttcgccatgttggccaggctggtctcgaactcctggtctcaagtgatcctcctaccttggcctcccaaagagctgcaattacaggcatgagccaccgtgccctgcgaaccctctatttttcaagggtggtggaaacttggtacttgaggaaaagaacatttcaggcaaggggaacagcatatgcaagtcctggaggaggctgcatagcagatacagggccattttcactcagcaaatccctaggccatgctgggacctagagtaagccacatctgggcctgcccttgagcgcctcctggtctgtgaacacagggaacagtgtatgtgcaggctcagggcaggagtgacagatcagggctgaatctggcccacaggctttttttagtttcacccacgatatgttttaaatgttggaatcaattgcctactgttacaaaccaggcagtttgctttttttttttaaattgcatttctggcttctttcagaaggaaagaaaaaataaaaaaggatctggcagcagcactacaatccttcctggcaacaactggccaagtagcagaggccccctctttgtgggatccatgctctccattaaaaatgtttcacttatatttccagcttggccccttggcttagaaaatttgtaaaaaatggtattttgagcagcccccgttttctgcagtggagaaggatgaagctagaaatgtttgttggagtctgatcaggaaaatcaaggtgaagggcatggcttctactctggaaaagcctttctagggcttgctgttgtccactgggaaaccatagggttgatatctgcatagaggggactgggctaggagatcatagggctgaatgacttggcccaggtcttatggtggacaagtgaaaaagtaggggtcaggctgggatttgaatgaacccaagcaagttattttaacttggatctgaaacatgcttttggctatctcacactaccacctctgtctctcacagcaacccagcttcacagcatggtaagcagtgacaggtcatggtcaggcagaggggtacggtggttatactgaagcctccaccaccaccatgtggtgtaacaagtggcttcccctctctgtgcctccatgggcactttgcagggtgcatcagatctagaacgctggcaactccaggatggacacagctggggatggctgcaatagaggtggtgatgggcaatcaaagacttgttggccaggcgcggtggctcacgcctgtaatcctagcactctgggaggccgaggtgagcagatcactttaggttagaagtttgaaaccagcctggccaacatggtgaaaccctgtctctactaaaaatacgaaaaaatcatcccgggcgtggtggtgggtgcctgtaatccctgctactcaggaggctgaggcaggagaatcgcttgaacctgggaggtggaggttgcagtgagccgaggtcgcgccactgcactccagcctgggtgacaaagcaagactcgtctcaaaaaataattagtttggggactacattgaggggaggccaggacagagcatgggtctggggatccggagaaggcagtctggaggaggcatggctttggaagacgtgagttcagtttaggacacaggaaaccataggtatctacgggactccaggaggggagggctggggcggggtgacagaggatgaacgtccccctcccacgcggagaagataggagtcaggttgggccctcttggaggagggggcagggagcgcggcgcccggcggcccctttaatcgggggcgcgcgctggccagcccgcgcgctctcgcctccattgccgggccagtgcgggagccggagcggagccggggccggagcgggcggaatggagcccctgcgcgcgcccgcgctgcgccgcctgctgccgccgctgctgctcctgctgctgtcactgcccccccgcgcccgggccaagtacgtgcggggcaacctcagttccaaggaggtgagcatgccgagccctcctctgcggcccgccggcccccgggggacgcaagggaggcgaggggagcgggtaccgcctcgccccctgccgcccctcctggcggactccgggagcctcgggggagtggggccgagggcgatgggggactgggccagagtcgaggctaaggggagccgtagggtcgcggccagacctgggggttgtaggagggacgttgaggtcagagctgagcggggagggggagcgggttgggagagtcagagtttgggaagggtggtgcagaggtggtgctgaagggacagcacttttcactcagcagagagccccgagctcgccgccacactcccgctcaggaccgggagggggccgtttggaagattcccccgcgcgggatggtctttgggagcacggggtggggtgcaggggagtgtggatattgggggaacggggttagatattggccaggacatgaggtggccaggatgagcatctggcccctaaggtctttctccccagaaagatcccgggaaatgcagggaggagtgtttgaatggaggggaggaaacttgggggggcaatggagggagaaaatcagggcggcaggaatcctggacccacagtgacgggatcagggaaggagtttggaggtgacctggtctccttctagtacttgrgaagccaggtacctggggggtagggaagaaaagttgggggtctatggagtaaagagttcttgaaggactcagcggagggtcagactgggcccctttttcaggactgggtgttcctgacaagattttgtttcctctcggattacggccgactggacttccgtttccgctaccctgaggtgagtctcccccaacactcgccatgctgaggctgggtacttcccttggcctccaaaggcacaggctgccccagctcccggtccccaacatctctggtctgcaggccaagtgctgtcagaacatcctcctctattttgatgacccatcccagtggccagccgtgtacaaggcaggggacaaggtgagggctgtgaagagggcatagggggagaggggagaaggtcgttgctggccgggggagtgaccctgtccctgccttccccaggactgcctggccaaggagtcagtgatccggccggagaacaaccaggtcatcaacctcaccacccagtatgcctggtccggctgtcaggtgcaggctcagcctgggggagtgggcaggtgctgaaggatgaagccttcggggcatcaaggacaggcttcagccttctcgtttgtccccaggtggtatcagaggagggaacccgctacctgagctgctccagtggccgcagcttccgctcagtgcgtgaacggtggtggtatattgcgctcagcaagtgtggggtaaggggctggggtggccacctggaccaccttctctttgccttcctgccaacccccaacttgcccagggccccccttaggcctccctaccccccacagggtgatggattgcagctggagtatgagatggtcctcaccaatggcaagtycttctggacacgacacttctccgctgatgagtttggtgagcacgtggggacctagaaaccaggctctctgtgggacaccagagctgggtgcccactgaggggacatccacctgaatgaaccttactcctcctaccaaatcggcagggatcctggagacagatgtgaccttcctcctcatcttcatcctcatcttcttcctctcttgttactttggatgtgagtctggcacatggggtgtgggggaagagataggagggagcagggttgggggaggtgagctgctctccctttctgcctgtggacagcctttccctaccttgcttcctagatttgctgaaaggtcgtcagttgctccacacaacttataaaatgttcatggccgcagcaggagtagagggtgaggttccgtgtcccaacttttgggttctgaaagagaaggcacttggggccagacacctgggcctaagaggaatgcctgggggcctggactcctgggtcctgggggaggaggggctgggggcctggactcctgggtccaagggagaagggcctgggggcttcgactcctgggtcctgggggagaaggggctggagccctagttcctgggggaggatgggctggggacctggacccctggttcctgggggaggagggggtgggacctgacacccctgggtccttgagggagtataaaggccggaactaggctggacacggtggctcacacctgtaatcctagcacttggggaggccaaggtgggcggatcacgaggccaggagttcaagaccaacctgaccaacatggtgaaaccctgtctccactaaaaatacaaaaattagctggacatggtggcgtgtgcgtgtaatcccagctactcaggaggctgaggcaggagaattgcttgaacccgggaggtggagattgcagtgagccgagatcacgccactgcattccaacctgggtgacagagagagactctgtctcaaaaaacaaaacaaaacaaaacaaaacaataaaggcctgaactcctgagtctgggggaggaggggctgggagcctggactcctgggtctgagggaggaggagctgggggtctggacccctgggtcctggaggaggagggyctgggggcctgagcccctgggtctgaaggaggagggggtgggggcctggacccctgggtctgaggggggagggggtgagggcctggacccctgggtctgagggggtagggggtgggggcctgggcccctgggtccttggggagcagggttgggggctggactccagattctcctagcaggtgagtcggggtagaaggtctggagtcctragggaggaggcgggattcagactgcctggatggtagtgctagagaacagtgatgccccagagctgctttctatcctttcttatctgcccatcctcccctcagtcctgagcctcctatttttctgcatctactggggtcaatatgccaccgatggcattggcaacgagagtgtgaagatcttgggtgagaatgaagctgggtggggagagggtggagcccagggctcaggttgggcatcaggtctgagcctggctctgagccgccccctcctcccttctcccagccaagctgctcttctcctccagcttcctcatcttcctgctgatgcttatcctcctggggaagggattcacggtgacacggtgcccgggcagggcgtgctcgtggggcggctggtgggggagcagggcaggggcagggttggggggctgggtgcatcctcctccctgacggcccccaccctgctgtctcccctcatggcctgctgccaggggccgcatcagccacgcgggctccgtgaagttgtctgtctacatgaccctgtacacgctcacccatgtggtgctgctcatctacgaggcggaagtgagtccgactggcccctggccgggccctgccttcccctgcttttggcgccgcctcccccttgacctgtctgctcgcccttgcccacatcctgctcctgctggctcgctctctctcccactcttcgattttctgctttcccatctgtctaagtgattcctcctctcttcaccatcccgcagcagctttctttctcctccctctgtctctcactgtctgtcacatttgtgctcaatatcgtgactaagagttcaggagtcacacagacctggattccacaccagctctcccacttcctagctgcctgaccttgggtgacgacccctgtctctgggcccattttcttcttggaaaattgggaggatcttacctaccccatggagcccctctaaggctttctatcgtctgtatggctttggccaaagggcttccctcttagccttagtttcctcttctgtgagatggagcagtaataagacctacctcgttgagtagatgctgatggaaaaactcacacatgagaggggtttagccctgtgttgagcaaacagtaactgatttattctcttcctgtctttttcaccctctctctctacctcaatatgcttctgtctccgtgcctggctctcctgttgcttgtgttctgaccgagtacctctgttcccaagtgcccaggggtggggtccggggaccctaatagaggggaggaggccaggctgtgatggaccctctcctgcgggtcyagttctttgacccaggccaggtactgtacacgtatgagtcgccggccggctacgggctcattggactgcaggtggcggcctacgtgtggttctgctatgctgtgcttgtctcactgcgacactttcctgagaagcagcctttttatgtgcccttctttgctgcctataccctctggtgagaattggtgggccccagcctgtccctgcctccctctcggggctccccagaagtggttgccccccatctcagaccctccatagtgagggagatggacttttcactcaggcagctgttgcccagaatctgccacttactcactttgtgaaaaattactttcacaagaagtgcatcaggtttacccataaaacaacaggatctcgccaggcgtggtggctcacgcctgtaatcccagccctttgggaggccgaggtgggcgtatcacaaggtcaggagattgagaccatcctggctaacatggtgaaaccccgtctctactaaaaatacaaaaaaattagccagccatggcagcatgcacctgtagtcccagctgctggggaggctgaggcaggaaaatggcgtgaacccaggaggcggagcttgcagtgaaccaagatcgcaccactgcactccagcctgggccacagagcaagactccatctcaaaaaaaaaaaaaaaaaaccaaacaggatctcctcaggccgggcgtggtggctcacacctgtaatcccatcactttgggaggccaaggcgggtggatcacctgaggtcaggagttcgagaccagcctgatcaacatggtgaaaccccatctctaccaaaaaataaaaaaattagccgggcatgctggtgggcacctgtaatcccagctactcaggaggctgaggcaggagaattgcttgaacccgggaggcagaggttgcagtgagccgagatcacatcattgcattccaacctgggcaacagagcaagacttcatcttcaaaaaaaaaaaaaaacaggatctcctcaaagggatatcttgagcaagcataggccactatatgagggccgagtgtctggcacatagtaaatgttcagtaaaaaactattgtagactgggtgcgctggctcatgcctgtacccccagcactttgggaggccaaggtgggtggatcatttgagatcaggagttcaagaccagcctggccaacatggtaaaaccccgtctttactaaaaatacaaaaaaattagccaggcatggtggtgcacgcctgtactgccagttactcgggaagctgaagcaggagaatagcttgaacctgggagactgaggttgcagtgagttgagatcgtgcccctgtactctagcctgggcaacagagtgagactccatctcaaaaacaaacaaaaaacaacaacaacaaacaaaacaaaaaaacacccaaaactattgtaattattatcgttcaccataacatagcaataaggttggcagattctgagccagactgtccgggttcagatctcagctctaaagcttatagatgatgtgacctcagacgagcccattaacttctctctgcctcagtttcctcaccttttaatggggatggaaattttatctgcttcatagagtcactgtgagagttaaatgagtttatatacatcaaatgcttagaaacaggcctggcatgcaataagtccttacttcttattatcatttgttcattcattcgtcaaatatctatttttttttgtttgtttgttttttgtttttgagacggagtcttgctctgtcgcccaggctggagtgcagtggcacgatctcagctcactgcaacctccgcctcctaaattcaagtgattcttctgcctcagcctcccgagtagctgggactacaggcgcatgccaccacaccctgctaatttatgtatttttagtagagatgtggtttccaccatattggccaggctggtctggaactcctgacctcaggtgatccacctgccttggcctcccaaagtactgggattacaggcataagccactgtgcccggcctgatttcttctttttttttttttttttttgagatggagtttcgctcttgttgcccaggctggagtgcagtggtacaatctccgctcactgcagcctccgcctcccaggttcacgtgattcccctgcttcagccttccaaatagctgggattacaggtgcatgccaccacacccagctaattttgtatttttaatagagacggggtgtcaccatgttggtcaggctggtctcgaactcccaacctcaggtgatctgcctgccttggcctcccaaagtgctgggattataggcgtgagccaccgtgcccgggctgtctattgatttcttatcagatgccaggatttggggtggtgtggaactgagttaaattgaacctccttcttgcccctcagaatttcccagtccagtcctgccccatttcagtctctggcttctgaaggtcacactggcttccctccagtttgggacctgcctggggtctgcgtgtgtacatggcaggcgaggtggggctatagggtggggtggaggacaggagcagtgtctctactgacccaatacttccccttcaggttctttgcggttcctgtcatggccctgattgccaatttcggcatccccaagtgggcccgggagaagattgtcaatggcatccagctggggatccacttgtacgcccatggcgtgtttctggtgaggatgggcatctgtggggggtggaggggaggacccgagggcagaagatgtgtgaggctcctacacctgatctgctggacctcctgttctgaggtcttgatccattttccttttagtcattctccctttattgagagcctgcttggttcctgcagtctcctctattgtgctcctcagagtccattttcttctctttttttttttcgagacagagtctcactctgtctcccaggctggagtgcaatggcttgatctcggctccctgcaaactccgcctcccgggttcaagtgattcttctgcctcagcctcccgagtagctgggattacaggtgcccaccaccacatgcagctaattttttgtatttttagtaaaggcagggtttcaccatgttggtcaggctagtctcaaactcctgacctcaggtgatccacccgtctcagcctcccaaagtgctgggattacaggcatgggccacctcgccgggcccatgcccattttcttctgttcccctctccaactttgtgtcctggcttctttcctcaacccccatcctctctctttgccctcccttcccatttccattcctgaccctgtgtccccagattcttccatttctcttttgtatccccactgccttccccaccctccttgatctctccactctccccctgcccctgcccaaattctgccatcacaggccactgttcaggaagaagcatctggggtggcacagggtgaagcttttgggctcctgggtcggcaacaggagggtacagcaccacatcttttttttttttttttgagacggagtctcactctgtcactaggctggagtgcagtggcgcgatcttggctcactgcaacctccacctcccaggttctcctgcctcagcctccggagtagctgggactacaggagcacgccaccatgcccggttaagtggtttttttttttttttttttttgagacggagtcttgctctgttgcccaggctggagtgcagaggtgcgmtctcggctcactgcaacttctgcctcccaagttcatgccattcccctrcctcagcctccctagtagctgggactacaggcgcccaccaccacrcctagcaaattttttttgtatttttagtagagacggggtttcactatgttggccaggatggtctcgatctcctgacctcatgatccgcccgcctcggcctcccaaagtgctgggattacaggagtgagccactgcgcctggcccccaccacgtctattctttgccctggttcacatcctatctgacattcttggtgacagttctaatattcattaatttattcatcaattgttcactgggcacctgtcttgaaccagtctgtttcattctaggaacatccatatgcatttactcctgccctcttgtttaattgtcagagcagctccaggagagggtggataattgacattgttcccactacacagagcggggaagctaaggcccagagaggagaagtgacgtgccagggctccgtggcctttggcggcaggcaaatactttgaaccctatccttctccagcagaccacaaggtctgaaatgaaggggaaccagaaagggcaacaggcatgacccagtgtcccagcttctgactccagggatstacaacgtaccccgtgtagggagtgggcccagccaccgagggaggggacaggtccccatcctttgcctcagaggctgacataggtacagactcgctcaccttcccaggctggtctatcctgaagctctgcaggaagtcagaaagggacagaaagaggagaaatgctgagaacccatcatgtgctgggctctgcaccagtggttttcatttccaccctctcatctttccaagtaggcgctacagtcccttttccccacagcgaggctcagggagtttaatcaacatgccccagatcccatactcagtgagctacagatcccagaggcgggatgcaggctcagaacggcaagcacagcgcccttcctgctgtatctcagccagcttccttcctaaggatgctcacgttagctcagcacagctccacctgggtatctcaacgctcattgctttcagctccttgttcatttttttcagcacaaccttagaagagctgtgttaggtttccgggatatggcggtggagtcacacccagtccctgccttcacagcctatcagactaactggtaccagacatccctacattccaccaatatttatttatttatttatttattttaaattttttttttttgagatggaatcttcctctgtcgtccaggttggagtgcagtggcatgatctcggctcactgcaacctctgcctcctgggttcaagcaattctcctgccttagcctcccaagtagctgggattacaggcgcaccaccacacctggctaatttttgtatttttagtagagatggagtttcaccatgttggccatgctggtctcaaactcctgacctcaggtgatccgcccgcctcggcctccccaagtgctgggattacaggcgtgagccatggcgccttgcccaccaatatttactgaaggcttatatgcgccaggcatggttctagaaggtactagggactcagtagggaacagaagagtctggttcctgcctcatcgagacattttagagtctattagttgctgtccaattgaactttctgtatttatgaaaatatcctattacctgcactttccaatatgggagctactaaccacatgtggctgttgagcacttgaatgtgggtagtgcatagtgagtgtgtagtgaggagtgtgaccaaaatttaaattttattttgattaaatttaagctacatgcagccagtggctatcatacagtgcaggacgctgaccctaagcaatcagtgacagctcagtgatcaggcctctgatggaggaagcacaggcsgagttttgttgaagggaaaaggtgagggtccagggcatttggagagcccagaggggacgcctaatccagtgtgaatggcttcagggaagtgtggtggatgtcaactgaaagggaatccttcggaccccaagtttatggggacagcctccggcctgacagtgcctctcacacctgctcctggccctggcctcagatcatgacccgcccatcagcggccaacaagaacttcccgtaccacgtgcgcacgtcgcagatcgcttcagccggagtccctggacccggagggagccaatccgctgacaaggccttcccgcagcacgtctatgggaacgtgacgtttatcagcgactcggtgcccaacttcacggagctcttctccatccccccgcccgccacctccgtaagccccgcggccccagcgcccgaggagctgctggcgccgcccctggagtacctgaccccgctcccggccccgccgccgcccccagcgcccggacccctgagccctcctcctgcctttcgcactccccgcgccccaacaccgcgccgcgaccgtcccctggcgcccgcgcccaccctgcctgactgggttctggcgctgttgcgcacacccccgcagactccctgcgccgtgcccccaccgcccgccttccgcggctctcccccagctccccggccgccgccggagttcgccccgcgcgccccgacgccgccctttgagtacctggccccgctgcccaggcgccccgccacccagtccttccctgactgacaacgtgcgtccacacctggggtggaagggttctccgggggagggggacgggccttcggggccgcatctgccccccgagggtcccggacggcctctgaccctgacccccctcccaggccgggaagcaggtggaggagacagcggtggcggcggcggtggccccgaggggccgcgtggtgaccatggccgagccgggcgcagcctcccccccacttcccgctcggttccccaaggcggccgactcgggctgggacggcccgacgccgccctaccagccgctcgtgccccagacggcagcgccgcacaccggcttcaccgaatacttcagcatgcacacggccgggggcactgcacccccggtctgagcacccctgcccgcccctgccccatgggccatgaccgggccccggccgggctccggacccctgctttatcccggcccgagagctcgcccatccccggccttcccgacccttcccaccccgcgcgcccaggttgggtacgctgcgtcccgcccccctcccctctgtgccaaacggtcccgcgggagccgctctccccgtcccctccctcagcccctgccccgagcggcgccggattctgggctcccgctgttccgtgacctccggccccctggcccccttcgagacctctgaccccgctggactccggaacacccgtggtgaccgccgggaccctgcctgtgactctccaggactctgcgaccccgggatggatattgcgatgctggtctcgaccctgaaaccctccctcggatctgtgacctcggacccgtactccatctgccgcatctccattccgggggccttccctcgggtccctggcagaaagacattttaccccttcttgccaaaataaaaaaggattcgtttttatctataacatggcttcttttgcatcttgatggtgttcagcggcggggctgagccagaactatgtcaggctcgggacctcagtgtgtccatctgtgaaatgggaatttggaaccggaggcaggggcctgtataacctgatctttatgttgccccagaatgtgggaacattgaagatgatcaaacatctagcagggtcttgcaccgctcctttatttttgccttcctttcctcactcagaggtagaggcgccctccagtggcccatgctttgctgaaccacaggcacccagagtttgggttacgatcttagcactgcgcatatgtgtatttctctccctccaggaggacgctgctgcgcatgcggttgggaacaaatgggcggggatttccccggaagtctccctttatggagggttggggttgggcgctccgcagtcctcccagggccgctctgaccggccgctctgtaacttctcgcctcctcttcgccgtccctcccacagcggctgctcggctcccgccccctcgccctcccacagcgggtcttcccgcggccgctctggcccaagcgtcccctcgtctctctgatctggcccatccggcttcggagggaggcgagggtgggtgagcaaagggattgggtctgtggggtccaggcccgaacccctgaagacgggctccgcccccggcacccgctcgcgccccgcccccggctggaggagtctctcctggaccatccgaacctagcctgtcccggcccgcagcctctatggaggctcctgccgggccgtagagcccttcgccccctggggacccacccgtctataaggtccgtttggcctgcagcagcctgagtccgtaatgctgggcactgttcatgggatcggccccctatggagccctgtgtctataggggactcctacggtccctagggttcggccccgtccataatgactccatatacagggccttccatcgctctatagggctcagccctcggcttccagagcctgtcagcagtggccgtacccttcgccgggactgccgggtctccgggacctcttcgatctacaaggtcatgttatgcctatagaggtcgcatttgcagggcctcaccccgggtagagggtcctctccaggtttttacggcctgtccccgctctaagggtcagtgcaggaggcggcgatggccctgggcaaggttctggccatggcactggttttggccttggccgtgctggggtcgctgtcccctggggcccgggcgggggactgcaaggggcagcggcaggtgctgcgggaggcgccaggcttcgtgacggatggtgcgggcaactacagcgtcaatggcaactgcgagtggctcatcgagggtgagtggggccgcgtgggtcactcactaattcgctggtagttcattcatgtgtgcattcatccactcaccacattcccagagctcggttctggtccaggccttttgctctaaaatgcctgacacccagggttgcagccaacctgggccctgccctggaaggcctccaagtctggtgggggagatgcacctacacccagatttacaattacaagacaggagcatcagtgccgggccttctgagtaactgttaagaactcagggtctgggtccaatcatttggctttgaatttggttctactactactactttttttttttttttttttgagatgggggcctcactctgtcacccaggctggagtgcaatggtaccaacacaatttacttactgcagcctcgacctcctgggctcaagtgatcctcccacctcagcctcccaagtaactgagtgtgtagagacagagtctcaccatgtcgcccaggctagtcctgaactcttgggctcaaacgatcctcgcacctcagcctcccaaagtgttgggattgtaggtgtgagccactgtgcctggcttcttattattagctttgtgactttgagcaggtggttttctttctctgaggttctgtttccttcccccacaaatgggataacaacagtactcacctcatagagttgttggaatgaaatgaaaacaggtatttaacatgcctgatgtgtggcatatagtaactgttcaataaatggcattaggattattgttgttgttatttgtgaagtacttcaataaaagcatttttcttcagtcattcatgtgccagacattatgtttcccattggacatagcccagactgagacagctccagcaatccctggtgacttaggtcttggagtctagttggggagacaaacacattaatagtgagagacaagagtggtctttgatggaggaaccccagaggcctgggagagcccagagaaagtgcctgatctggggccggggagaacagagaggcttcctggaggaggaaatgtctaagctgagacttaaaggaccaataggaatctgtcaggagtgggaggaaaggccccagccctacccttctgggctcccagtcagtgggagagacaaacccactccgaggctgtttgttttccttttccacccaataaactcctatgcatgcctcagaaccctgccccagtggctctttctctgtgaagacatgtggcttaacctggggtatagctgagatcagaggcatctgtacgagggagcagaagggcattccaggcaagaatagctgtgcaaaggcggggaagcgggagagtgatgcttttgaagaactagaaatccagtgtgttaaaacatagaatactggcagggtatggtggctcatgcctgtaatcccagcactttgggaggccgaggccggcagatcgcctgaagtcaggagtttgagaccagcctgggcagtatggtgaaaccccatctctactaaaaatacaaaaattagctgggtgtgatggcgcgcgcctgtagtcccagcttctcaggaggctgaggcacaagaatcacttgaacctggaggttgcagtgagccaatattgtgccactacgctccagtctgggcggcagagcgagactccatctgaaacaaaaacaaaaacatagaatacaagacaacgaatgagccagaggctgcagggtgggaggagccagcaggtgtagggctctgtgattttgagctgtatcctgagggcaatacaggggtgaaagagaagttgaaaggcagtacctgcagaagcccaggaaggcctcacagagtagtggatgtaaaagctggcctccagacaggggaggtcctgggcaaaggccagaggtgtgacagagcctggatcatgcagggcctcccttgggaggctgtggagctttgtctttgtctgggggctctggggagctatggaagggttttgagcagggagaggacatgatctgatttatgttttagaagatctctctggctgctgtgtggggtatggatgaaggcctgtttctcagtgatagcatgtctacctgttcccagcttgggggccattcctgtcaagctagtgggatgagaacagaataggaagtgtgtgtgtgtgtgtgtgtgtggcgaaggggtctgtgtgctggatataaatcactctctggccttaaagagtcccagactggttaggccaggtgcggtggctcacgcctgtaatcccagcactttgggagaccaagtggggcggatcacctgacgtcaggctttagagaccagcctggccgacatgaagaaaccccctctctactaaaactacaaaaattagccctgcgtggtggcgcacatctgtggttccagcctgggtgacagagcgagactctacctcaaaaaaaaagaaaaaacgtctcagactggttgggaatggtggggctggacacagatattcagcccccagtgtgttcactgagacagtgctcagggctaagaaggaaagtggaggggtggggtggatgtacctagggaggaaagaggactgtgctgcagataacagagcaggagccactaaaatagggttctgaagcatgcataggagtttattgagtgggaaaagggagcaaacagcctctatgaagacgtgagggtggctggagtgtctcaggatccccatctaggtttgcctggtcttatggcacttttgactgggaggtaatgagagccagaagcaggggaagaggggccttgaatgtcacactgagcagcctggccttccccttggggttgatgggcagccacaggaggttttgagcaggagtagggcattgccctcaggttgggtgtggggcagactggagacttgatgagctgatctggcaagagaggatgagttcctaactagggcaggggcttagaggggtggagaggtgtagacagtgcaatcgatgtttgtggagtttcacctataagacttggggaccaactgggtagatgttggggtgagggaggaggctgggagacctccagatcccccttgatgatcttctgttcttaccaatgcctgtcacttcttacctataagaaccaacatcttcctctatctattataaaataaacaaccagccaggggcagtggcacatgcctgtaatcccagcactttgggaatctgagatgcaaggattactcgagcccaggagttagagactagcctgaacaacatggtaagacactgtctctacaaaaaaattacaaaagattagctgggcttggtgggtggtggcatgtgcctatagctccagctaccggcgaggctgaggtgggcagatcccttgagcctaggaggctgaggtctcagtgagccgagattgcgctgctatactccagcctgggcagcagagcgagaccctgtctcagggaaaaaaaaaaaaaaaagataaacaaccaacctactaacttttgtattatgttcatactttatctagtcctagactttttttttccgagagagaatcttgctctgttgcccaggctggagtgcagtggcttgatctcggctcactgcagcttctgcttcccaggttcaagtgattcttgttccttggtttcctgagtagctgggattacaggcatgtgccaccatgccgggctaatttttgtatttttagtagagatggtgtttctctatgttggccaggctggtctcaaactcctggcctcaaatgatctgccctgggattacagacgtgagccaccacgcccagcccagtcctagtccttataacatcctcatggataagaggcatcctgcttttgagcaggagggagtttgggatcagatttctgtctggagtggtatgggggttgggtggaaacagaagaccttcaacttagggaagaacttggggaggcagatggtgagctggcctccagcaggcacttaacaaagatgtacttgtgattccagaaacagagctttatagtttggttgaggctggtaagattctgggaggtctggttgtgtggccgtgctgaatggttcttctgcattccccaaagcatgggtggggtctgtgtctgatgtcttgggggctctggttagagcctgagggagagcttccagctttagtattctgtcttttatgtatttcttcatttcatcatccagcatttcctgagcctttgccaagcccgggtctgggcaatgctgcagagggaattaggtccacatccaggccctgctctatgggccttgtaggctgcagggagacagacctggacatagatgttcctggcccagaggaatgaaggttataatgggatgtgagaaccctggagagggggcatctaacccagctagggggcatcaggaagaggcctggtggtgggaagggataatatgttgcagacagagggagaagcttgtacaaaggcccagctcccattagagctgtaagcagtggggtgatttgagacaaagcgagggtctgaacagcaggttagggacctggactttctcctagggtggtagggagccatgcagggctttggggcaggggagggacggggccagatgttgagttgggaagatcagagactcatgtcagg

SEQ ID NO: 97689 - DNA, 38463 bp, Homo sapiens
ggataacacagcaagaaggccctcacccttctcagcctccagaaccatgaaccaaataaatttttttctttataaattacccagtctcaagtattgttatagcagcagaaaatggactaagacaactggttttccaataatgtagatttctaccatcagtgttccataaatgaaaagtttattaatttacaacagaaacaattttataatcaatatctggaatatttattaaatcatcataaatgttatcaggagccttattttatgatgccaacatagtttaaatacttatttgatttgtaagttaaaataatatctttgttttagtttccactggaggtatattaaggatttaaaaatctatccactaatatatatcaaaattttaaatgcaattattttcaagaccaacaattccactttgcggaatttatcctacaaatttattcccacatgtgtacaaaaacacgtgcaaggtttaaaagatgggtactccagccttatggtaatagcaaaagggagaaacaagctaaatgctaaatacatcagagttcacctatgatggaatgatatacagtcattaaaaaagacgaaggtatataggcatgtgctgtctatataacagtcttatttatgcaaagtaaggaaaaaatgtgcttatatagatgcagagaatagttctagaaaggattcacaaaaactggcaagagttacctttgataaatgggactggatgaaaaatatggatttactttttactactatattcttttgtaccttttgcattttattttattttttgaggtgaagtttcactcttgttgcccaggctagagtgcaatggcgcgatctcggctcactgcaacctctgcctcccaggttcaagcgattctcctgcctcagcatcccgagtagctgggattacaggcatgcgtcaccatgcctggctaattttttatttttagtagagacaggtttctccatgttggtcaggctggtctcgaactcctgacctcaggtgatccgcccacctcggcctcacaaagtgctaggattacaggcatgagccaccgcacctggcctgcattttttataccacaataatttaccacattttctattaaaagtgtggtattaacatgttttgatatcatcaatcaagatcctaacagcaatcattttattaatttgtaaaagactaggtaacaaatgacatacgtaagattcctgagaaatgacaagctaaatttacactgaagtctcctcacttccttgtttcaatttttttccccatcagaagccccaataccaaagtcaagcagaaactgacatttctgttcttgctgccatatgccagatacaatttaataatgaaaaaagtggagcccagttcgaggatgtagaagtaagaccctgtctcaaaaaaaaaaaaaaaaaaaaaaaaaaaaaaaagactagaaataaaatgtcataccatgcagtagtacatgctacaataaaattaaaataaggaattatgacagaagcaaacatggtgttcactttagattgggtgatcaggaacagcctctcttaagagactagaacagccaaaggagccagttataagttccggggaaagagtatttcaggcaggaaaaagagctaatgaaaagtacctggaggaccttaggaagaatgctctaaataaggtaagtggtacagtggcttatgtctataatcagcactttgggaggctaaggtgggtagattgcttgagttcaagaccagcctgggaaacaaggtgaaaccctgtctctacaaaaaaaaaaaaatatcaaaattacctgggcatggtagggcacaccggtaatcccatatacaaagaaggctaaggtgagaggactgattgagcccaggaggttgaggcagtgagctgtgatcatgccactgcactgcagcctggacaacagagcaagactcggtctcaaaaaaacaagtgtttgggtaataaaattcaacaataaggttgtataacctagacacagtataacctagacacagtgatttaaggggatataatttcatatgactggtgttttaaaatcgcatgtactaataaacttttttggccaggtgcagtggctcacacctgtaataccaacactttgggaggccgaggcaggtggataacttgaggtcaggagttcgagaccaccctggccaacatagtgaaaccccatctctaccaaaaaatacaaaaattagctgggtatggtgctgcatccctgtggtcccagctactcaggagtctgaggcacaaaaatcacttgaacctggcaggcagaggttgcagtgagccaagatcgggtcactgcactccagcctgggcaacagagggaaaacctgcctcaaaaaaacaaaaacaaaaaaaaaaaaacaaaaacaaacaaacaccatttggccaaattcttaaattatactggaatcttttaccatagggctaagatcactaagacaattctatagctgaaagggactttagacattaacttaaagattagaaaaatgaggcttagaaaagtaaaacaactttctcaaagttactcagtgaagaaaaggcagggcagggacttgaaccagacttttgattccactgactttcccaatgctcaaactaaggctccaacctacgttcactgtaccccaaacatgtgcctccccttaaagagaacaattatcactggctgactctgcactgactggtctcacaagaggtcttatcaagtgaaggtcgtttagtttccagcctgagaaggagctatccatctcaatgtgtgcatttaacataatgtattgttgatagtaaatactagaacttgggctcaaagagctggatcaaatttaagtcaaattgtagtactgcatattccagccagtttatagtaaaaggtaaactggttgataaaattgaatttaccatgttaattttattttcctcctagggaatggcatctttgtgaaatgggcaattttaattcctgaaactctaagagcagcgtgcacacttacagctaatatgtagcagaacctggatttagtggacttctgttgactccaaatttttcatgcgtcttttacttccactctacaattgtttttgctttctctggtacgaaagtgggtgaaagtaacatcacagaataatactgttgaatggaaatgtctgtgaaacaagctgccagtatattttctagcctatggcttttaaaacttgctcctttacatgtttcagagctgctcagtcctactcaaaaagtttgacctttagctaggatgatgacttttcttccagctgaatcaaagacatctgactacatgacaaaaagcctgctgccagccatggggaaaatatttagagaagagattatttcctgcacctgattttcctctcaatcagcaagctgagagctttcaaatagtagtttcaccttcatgagcctatcattttcttacctaagcccaaagatgtctatttttgcctcttagtctcaaagtaaaagtttcaaagtaaaaacaaaaaagttattctgactgctgtcaaagataaacccagccagacattcgttaaagtagtgaaaacagattttattcagtaaaccactgatagtaggggaaagggctgagctcaattctcatttgtgcagaggtgactggccattttaaaaaagagagtaagggagtggcagggagccagccgcaagaagagtcagagaagagaaaccttaaagtgttggtcagtgtaaacgccatactacctggcaattagtaagttactattctatcctctcacacagactgggagacaaagcccctatccctcctgatgattacgtttcaaagaaatggctctcaaagatacttgaagggacacttcagagttggaagagatacatattaacaattgtaagcctgtttcgtaaatgctctaaaaagggaacgagaggggtctatcaattaggtgttgactagaacaaacagtaaattctccccctagctttgagctttttcaggcaggcattttaatggcgggggcggcggggggcggcctggggtcaccctaggggcaggccttacattgctagaagataaactagtgtcgatgtctttcagtgcagaagttttgactgagtcatcacgtcctaggagttctgcagttgtcactacctcgggatagtcctcatctttatttccccacaactagcttgctgcctacttagtgcaaacagctattagaaagtcaacaggtgaaggtaaaaaatttaaaaacttcatttcattaagagctatttagtcaccgggcagaaagaaatctgggcttcaggtttgaatataacttttattttaagcatcctcagattctctcaaaggacagaatgaggaaaaacaacaaaacacccccacagagataggaccacaataaaagggtctaaatgtcagggtcaaaactgattttctgcttcctcactgaaaagaaaaagggaaagccaggcgcggtggctcccatctataatctcagccgccagggaggctgaggccggaggatcacttgagcccaggggtttgaggctgctgtgagctctgatcataccactgcaccccagcctgggagaccctgtctcttattaaaacaaacaaacaacaaactaaataaaaataaacaggatgaggaggagaaagggagcaagttgttaggcacatttgagaaaacgtcaaaattttccttacaaactagccaaacacctacagtgatatgccattttcctgacaaagaattcaggccccaaaagaaaggcagcccacaactgagcgtattcccaagcatgagttctttcaagaaatatttttttgtggaccttctatggattaagacactctttcatcctggagagagcccacagtctagtgggagagaaagacacataaacaaatatctactttacagcgtgatgaccggtattaacacaggtctgaacaaggtgcagcggtgagagagcaaaagcagtgcctcagaaacacagggatatcctctcacagcaggtgacatttggcgggatcttggaaaatgagtaaggggatccaagatcgaatccgagggctatgctagggcgattcgattccatccccactttggcttagggacctcttctatatcctcagtaaacttcccttctcagagcatttattaaaacctccttggcctttccagacgaatgtctggctacgtaaactgtgagctctgtagggcagaggtggcgacggttcagttatataaatccagtgcccggctcaataagggtatgtggaatggatgaatccattaatgaataaagacagcagacctccacaaaagcccgccggccgggcgccttttcctaccggctgggatcgcttcgtccagcctgattcactcaggaggaatgcgcgaagaggccgtcaggaagcctcgccctagactcaagaaaagaacctgggaaaagctcaggatcctcccaggaaacaaggaccctcactgtggcccagggtctgaagggaccgcgctccgggttcctaaacctgtgaaagcggcttatcccattcctttacttacattcgcgagggaaagatttcaattcggtctttgcccgacattctgacgataacttttcggctcgggtccccggccgggcaaccgaggctgcaatagctccagaactggcctccacagtgtcttcctctacgggagtcagctggttgtgtcacttgacccctcttgttgctaagaggcagcagggacacccattttcacttccgcttccggttgtcacaggcgacgaagggggaggacagaacagaggcgttgcccggatgtcgaggcgcgcgcaccgcggaaccacccctcaattccggttcgcctcccaacccctccccatccagcttccctgcggctgcgcaatacgcggcacgcgccaggccaaagactaggagcgaagcgtgcacgccttgtctttctccacctttcgtctttggtcacagcgccatctcatggttagctgaaactttgaaagaggattcattcttcagaggcaaggaatcggagtcctatgtctttctcgcgccttgaaggttacttagctaaagctaagrtagcgagaaacagtacttttcaggtcyttccatgatctacattcrtccttgttctcggaggacccagactctatggttaatgatgaagaggggcctctattcgttcagcgcttgcgsatgcgaggaggttccgcatgcgcggtggagtgagcgaagcgcacgctgaggaggatcggcggccggtgagggggaagcaagtctggtctctgtgattgaagaagtcggctctgggctccagtgcgggaatcacacacatacctcaggtgactaatcccaagctcggtttctccaggaactcactttggtttgtgtccagtgacatgggtgttcgagagcgggtaggccccgggctaatacctccctttcccgtccctgcgcgggaagtggctggacagcaccgccaccacccgcgctgtcgtgggcctcctcgccggctccgtgtaggtcatcctgtgttccagaggcatcgttgttcgagcagaggaatctcgtgaaggaaagtgggccgagtggattgtacagcctctacaatatgccgaaagtgagaatgccatgacgatggggcggtctcaggagaacgctgtgacaccgtaactcttaaccccrgctcaggacgctgagcactttgctttttccaggcttgagaattccatcttttcttccgccccaacagctctaccaaaaatttcccctgcgtctcagtggaaaccaaactggcctcttacctgagaaacctgtgggacgggcaccgtgttggaaagagcggggtccgagtagtttttcatctgataattgaatgagtcaccccttgaaccaaaactaaatgagacttgagtttattactgttactatcagtttgtcgtattttggcgacaatgagaatagaactgtgttaagcatatgttaggttaactatgttagttaagcataactaaaacctaagataaggatatattttcgggttaaatacacagtcatgctgaggtctctttatcctcaaaacttaggctttttaaatttttattaagcaaaaaacatggtttcttcgagaaaaagtatagcagagaagtctttatttcccctcaattgagttgttattcaaggaacaatctctgtcaatagtttgggggtgacttgtacagaactttgctacctattcttagttcatctggtgccaaaagatgtagttgtctcatgcacagtaatgtttgtagagattcggtgataactttctttttcaactataatgatgaaataaaagctttacttatgtagcactcctataccaagaactagcattcagagagcattcctaatacgtgttagatccaaattagaattatcacgagagttgtccccatcacataatatattttggaaaggaatgtgaacttctatatccattatagcagtttgaccatgcactgttttgagaaagaagtcctacctaccatttgtcatgcaaaataactgactatgcagggtatttgaaattagcctggagtttggttgatatattttgaaaggtggctgatactttttacatcagaacacataagagtattmtagcatgttgtgatattgaggttctgtgggttaaagacattctggatttgatgtcggattacttgagtttagctcctacgctagtacttattaagcatttgttcttaaggaagtattataatttagtatttctgttccacctttcctgttcattgcttcactgtgccctttcatagtactttgtattgtaattatttgcttgctagtttgtttcccactctatacttaattacttaggtaagagtcttttttttttttcttttttcttttttctttttttttttgagacagagtctctgttgcccaggctggagtgtagtggcacgatctcagctcactgtagcctctgcccctgggttcaagggattctcctgcctcagccactatagtagtgggattacaggtgcctgccaccacacccagctaattttggtatttttagtagaaatggggtttcaccatgttgaccaggctggcctcgaactcctggtttcaagtgatccacccgcctcggcctcccaaagtgctgggattacaggtgtgagccactgcgcctggcctggtaagagtctttcttgttgtatcattagtgcttagtacatagtagctactgaaaaaaaaattaacaaattattatattacaaaatggaaataccttctttttctttcaatattttatgtttgactagcacataatggttttcaaaatgtttttacgtatacatgtgataccctcagtaaacctgtgatgtacatggcacagatgagaaactacagttcaaaggatgttatctttcccaagcagccacttctagtaagtagcagagcaaggactggaacacaaggctagagttgttccccgagtttactatgttaattgcctgatttgacacttcttgaggaccaaataaaataagaatgctgtgaaaaagataaagaggtgaagtcacctagtgtgacttcgatattgcggaatgatttttttaagttaaaaaaaaaatttaagttattagcatttcattaggcaatatgttcaaaaattgtcaaccaatatgcaggtttttgtggtatggattctttttgtacttaactactatctatctttactatgaataacataccatcaacagtattcctttacttaccctttatgttgcaaagagacttgtgcctcctgaagaaatagtattcatagtcatatcscttcaggattctcttacatgattgcccatgttttttaaccatcaaattaagccttgcttcccctaaaagcatcacctttactgtttggagaagcttggtaagtaaatgtggttttcactggtcaaatgtcttgcaactgttccatacatttctgtaacatagtttatttttatgcccaatttgaaactttttagctctcaaatttgagagctttacatacacatattcaacaacagtttccccacccccaccctcgaaaagccctgtttaaaaacgaaacaaacagtcagctgtttcttggtgggtaaggccattgaatgtctacttctctttatttgctaaatccctattttgtagggattttgtattccctacaaagaaatacatctctgctactgtcattaatatgctgctctttgttgtcaaacagatgagtactaatagtttgcacttattggtgttatgtactctggcactgaatatatattaatgttgctttttaagtaaaatgtttctaattataatatatttatgaatagttttgagagaatatagtcttactgataagaggacagactctggatccagacttcatggattcaaatcctgactcatcacctgttagcagtatgtgaaagaacaagtaacttaacctgtgcttcagttttttaatctataaaatggggagaactagggagaaagttgtaccacaaggagataggcaatggccagatcatataggattctgtaggtagtggaaagatacataagtcagtgggaagccactgagaagatataggcaggtgccaattaataagttattatatgaattttcacaaggttttcttaggcctttaagttctgttactacctacgttttgagcagtgacaacagtgaaggttaacagaaaaacatgaaaatcatcagccatgattagtttgagagcttccttttttaaatatgcttctacccaggctatgatttcaggcttgtggatcataaaaggagtagtgctgaaagtaggttgggtggatcaaagggaataattgtaaatatctttaatgcttggaggttaagagaaacttgaactttgtagtaatggagattaaagctattctcaagattaggtatacctattcaataaaagaaaggaatatttgggagtattggggatargagaagctagacattgtgaattcaaggaaaaagaattatgagaggaggatgcattttagtttattttgtgattaaaatttttttagtttttgttgttttgacatgtgacactgtaattttggctataataaatgacagaatgtatcatttggtatattggttagggtttaggtagaaaattttttcctttatatagtgagtggtagcgtatacaatgtttgctcacttcggcaaagagtagctttagttttctgattagttataatagtgatgcttcccatcatttgatatgccttaaagtagtattttactcttgaggtattcctttaatccttaggtcttggagtactttatagatggtcattattttttatgattcctctgaaactaaaggcagagaatcacccaagcattacaaaaatgttgagcaaaataaaaattaaagcttggttcctgaacattatctgttttctggtaccacttaagaagtttcaaaggatgagaagactaagactaataactatttttttcttcatcttttctttcagtggcaggatgtggaaattgattttttttttattttcaccttaactgaatacttacttaattcttttgtttaaattgcagaatgccgggtctaagttgtagattttatcaacacaaatttcctgaggtggaagatgtagtgatggtgaatgtcagatccattgctgaaatgggggcttatgtcagcttgctggaatacaacaacattgaaggcatgattcttcttagtgaattatccagaaggcgtatccgttctatcaacaaactcatccgaattggcaggaatgagtgtgtggttgtcattagggtggacaaagaaaaaggtaagtgagaaaaatatctgtaatataaatttcagatttaaaatggtttatttaaaaatacattttttgtaaattgcaagctgcagcttaaaaaaaaaagctccttttatacttaaaccttttacatacaaagttgttagaaaaggatgccaattagctatctaagcaagatctcttaatagtagtttaattagtacatcctaggattttatggatcagataacttgaattttatttctagtgtttatcaggatcttgataattgactcatggtaaccaaacttagagacaggtaagtcagagtactagttcatttacattggtaggcctgaatatgttggatgcctttttcttgatttaaagctaaaatagtaatgagatcactgggtaagcatgaaaatggggcaaatggattttagggatcttttatataagctttgaaaaagcaatatactatgcgtgtatatacacacctgaaatccaacattgtatatcttgctggtaattagaatgtttgcatctaccagatctcgtggtatctttcagacagttttggatgagcattcattttttacttattggatgccttttctgggccccatgtaaatcatcacctttgtgaatactctttttttaaacatggtgtacaataccattacgtaggttttagtttcagccatcttactataatttgttaggtgttagttttaggtcattagttaccatcatgtccgaaaggcttcatatcagtcaccttgattcaacttacccttctgaatctcctcagccgtctggtttactgatactttctcacttctgcaagtgattaattttatacatactgacattttaattttttttattatagccttagatgatacatagattttgaggatgtcttatgccttaggtagtgactgctacttagcacatggattgttttaaatgttttgctatgacttagctatagccccgcccaaaattattaaactactttgagactatttgttaaacttaggtaagtcttcacatcactgtcctagtagtacctaaagtagtgtctaatcttgtactttttttttttttttttaagaattggggtcttgctctgtcacccaggctgcagtgtagtggtatgatcataggtcgctgcagccttgaactcctgtgttcaagtgttcctcaagcagtcctcccaagtagctggaactacaggcatgtgccaccctgcccagctaactttctttgtagagatggggtcttgctgtgttgcccaggctagtcttgaactgggctcaagcgattctcctgccttggcctcacaaagtactgggattacaggtgtgagccactgtgctcagccttctttttctattgtataaaatatacacaaaaggaggaatcaaatatgtttttagttgcaatcagaaaaaatatggaatggcatacttgcttacgtacagtagatacatgtaaagatatttccatagcatttgtttgtatggcattaactaaaaccaggaaatgaccaaaatggggactggttaaataaatcagtacaaatgcgtgcaatgcaattttatgcagaatgagatctgaatattttgatatggaagatctccaggataggatgagaaaaagcaaagtgcaaaagagcctgtagagaggattcattttgatactagagaattatgtcctcctagacaagcctttcaacgtaaatgccataaaccctgaacaagtatgaaaaataactacctaaagacaatgagaagcagccaaaagcaggccaaaattgaaaatttgaaggtgagtcgacacttataagaaagggtatgttttctgttttacacctttttttttgacctaagtacatgctgaagacagcttcaagccaggcagctaaggttctagcagaaaatttatggtcttattggctttagaactggaggcgagagttgtagacaaccatagtagatggaaactggtggtgatagtggtgagggttagagaaaggaggcggcaggcacaaagggagatcccctaagtctatataaattcttcccaaatctctggtttgtccctgaactactgaaacacagggtggactccaggtagcctaataggggaaaaatctgaacagatttcagttgcttaccatctggggagacagagcttatagttttgagttcagattctgactgcctgctaaaacaaaaaatctatattctctttttttgggggatggagtctcactctgtcgccaggctggagtgcagtggcacgatcttggctcactgcaacctcygactccctggttcaagcaattctcctgtctcagcctccagagtagctgggattacaggcacacaccaccatgcccagctaatttttgtatttttggtagagacagggtttcaccatgttggccagaatggtcttgatctcctgaccttgtgatccacccgccttggcctcccaaagtgctgggattacaggcgtgagccaccacgccccaccccatccaggtcactttgtgctaagtgttctacacttggtcagcattctcataaatacggtgcatggaatggaacacggtgggcacgttgcgtgaactcacaaattcaagaccagctggggcaacatggcaaaacctcatctctacaaaaaatacaaaaattagctgggcgtggtggtgcaccctgtagtcccagcttctcgggcggctgaggtagggggatggtttgagcccaggaggcggaggctgcagtgagccaagattgcaccgctgcactccaacctgggtgatagaaccagaccttgtctcaaaaaaaaaaaagagagaggtgaaggaagttctttaagctgaagagatgtgatgacctgacatggaaaatatataggtaaatgtaaaagactatttttgcccttcttagtttctttaaaaatatatttaactatttgtctcatttgtgcctgtgggattgtaatctatagaggtgactgagtgatgacacagtccaatgcccttgaaagaaaacttttactacttatattgcctgagagaagggggcttgatgtgccatgcagggccacatggggaagcaccagttttagtcaggagtcacaaggaactaggggaaaaagtaggtcagagcttttgttggagtttctgcaggaaaagcaaggcagagcagcgtaaacggcttgcagttggctagtttgaatgcttttggcgggccttggggcataaagactgccctgcttgtctaatacctggcccttgacttacagcagggagaattttggcttggtgtatgagtttatgggctccagattggctgctctgcataagaaaggcatgctaccaagcaagccctttgctgactcctccccacctgacggaggggcagtctctccacaaatgtcagagcctcaagaatacagaaaataagaaaatatttagttactactaataatattaataataaaatatatagttaatacagttggctctgtgattaatggatgccaagtagttaaatatagaagctaagaaaacagaatactgtttaaagcaggcttagtacacttgacaacttaatcacaaaggccaggaggtgtggggtaaatagatctatatgattcttaacgattcttacattttatgtgcagtagtaaaattaaaaggttaaggatgtatattgtaaattctagaacaaccattaaataagccagttgcagtggtctgtgcttgtagtcacagctgttcgggaggctgaggtgggagagtcacttgaggtcagtagttcaagaccagcctgggcaacatagtgaaactatctctagaaataagtaagtaaaatacaaaatacactattgtaaaagccaaagatatattaaaatggaattctagaaaacattaacctaaaagaaaactcaaaagaaaaaaacaaaaaccagaaagaacaaatagaaaacaaatacctaaaatgtaggtattcaattattcagttattgatacaactgaattcatttatatcagtaattaaatgtaaatcaagtaaatattccagctaaaaggcagagattgttaggatgaattaaaaagcaagactcgacgataatcctgtctacaagagatatacttggttgaaaataaatggatataaaaagatatgctatgcagacaataccttaaggagacagtgtctattaatattagataaagtagatttaaagacatagtattttcagatttaaacagggacattttgtaatgataaagggtcaatttgttagaaggaaaacaacagtcatcactgtgtatgtgcctaataatagagttcaaaatataaagcagaaattgaattcaagagagaaatagacaaatctataatcatagttggaagtttgaacaagctctgaacaattggagaaacaattagatcaatgaagaccttgacttgtttgatacctagaacactgcacccagaaaaggcaaaatacacattattttcaagtgtgcatgacattcaccaagatagacaataaggtgagctataatattaatacaactctaaataaatttctaagggttggaatacaaatatgttctctgatcacactggaagtaattttgaaatcagtgtcatatcttgggagggaagagtttgcagtattaaataagcccttccaaataattcatatattaaagccttaagggaaaatttatagctttaattacttatattagaaaagaataaagatctaaaacagttatctaggcttttgttttagaagataaaagaaaggaaaggtaaactcaaagttgctgagaccagctctgttggggagaccctaacccagaggcgctagaggaattaaagacacacacacacaaatataggggtgtgaagtgggaaatcaggggtctcacagccttcagagctgagagccccgaacagagatttacccacatatttattaacagcaaaccagtcattagcattgtttctatagatactaaattaactaaaagtatcccttatgggaaatgaagggatgggccgaattaattgcagcaggaacacgtccttaagacacagatcactcatgcttttgtttgtggcttaagaatgcctttaagcagttttctgccctgggcgggccaggtgttccttgccctcattcctgtaaacccacaaccttccagcttgggcgttaggrccattatggacatgtcgcagtgctgcagagattttgtttatggccagtcttggggccagtttatggctagattttagggggctttctcccaacacaaagtaagtagaagaaaagaaataataaggataagataatcggtgaaaatagagtaccagaaaatcagagaacagtatcaaagttaaaaacttgttttttgtttttttaaaaaagagcaaaattgataaacccctagttaggctgatgaagaaaaggaaataacacaaattaccaatctggaatgagaatggggctatcactgcagatgctacagacattaaaaggctaataagggaatatcattaccaattttatgccaatcatctcaacaaatcaggtgaaattagtgaattccttgcaaaattttacttactgaaactgaccaatataaaatagaaattttgagtgtcctatatgttagagaaattgaatttattgtaaaaaatcttttcatcaagaaaattcggtcctgaccagcacagtggttcatgtctgtaattccagcactttgggaggttgaggtgggcagattgcttgagcccaggagttcaagaccagcctggaaacatgacgaaacctcatctctacagaaagtagaaaaattacccaggcatggtgttgtgcacctctagtcagttccagctactagagaagctgaggttggaggattgcttgaggccaggagaacaagtctgcagtaagccgaggtcatgccactacactccagcctgggtgactaagaccctgtctcaaaaaaaaggaaaactctaggccagatggttaaattgatgagttgtatcagacatttaaggcagaaataagatgagtcataataaaatttcagaaagttaaggaggtaggccaggcacggtggctcacacttataattccagcaatttcrgatgctgagacaggaggatcgcttgaggtcaggatttcaagaccagcctggcaatatagggagaccccatctctataaaaattttaaaaaattagctgggtgtggtggtgtgtacctgtaaagtagttccagctacttgggaggctgaggtgggaggacggcttgagcccaggagtttgaggctgtagtgagctgtgatcacactgctgtattacagcctgagcaacagagcaagactgtctcccaccaaaaaaaaaaaagttaaggaggcgggaacactttcgaaatacagtcatgtggtgcttaatgacaaagatacattctgaaaaatgtcttatcatgcaaatttcatagagtgtgctgcttacatagaccttatagcctatacacacataggttgtttagtatactctattattcctaggctacaaacctgtacagcatgttactatactgattaggtagttgtaacacaatggtaaatatttgtgtacctaaacacagaaaagatacagtaaaaatacagtattataatcttaacagcactgctgctatatatgcaatctattgtttactgaaatgttatgcagtgcatgactaattttatgaggccatcataaccctgataagaaaacccaacaaagacatgtttttgtaaaaaagcaaattactgaccaaatatgtgattagcatagataaaacaattaatatgtttttcaaatccaacaatgtataaaaaggataataaagcatgaccaagtggagtgtatggaatgccagtttggtttaacagtcataactttatgttggctgggcatggtggctgaggcctgtaatctcagcactttgggaggcctaggtggggggatcacttgagcccaggagttcgagaccagcctgggcaacatagcaggacctcacctcttttgttatctctcacttctttttatttaaaaaaaaaattaaaaaatttatgtgtgcttttatatgatcagttaattaacaaaagtacaaaggcagctgatcaaagaaaaaattatctttttaacaaatggtgctgggacaactggatgtccatatgcaaaaaagaacctcaattcaaacacctcaccttatacaaaagttagcttaaaatgaatcatagatgtaaacttctaagtacctctagaagaaaacaggaatctttctgaccttggattaggcaaagatttcttagatagcacactaaaagcgttatccatgaaaggaaaaattgattaattggaccttrtcaaaattaagaacttatgttctttaaagacactataaagagaataaaaagacaamccagcatattttaaaaactcttgaacaacctaaaaaatcctgtatctaggctgggagcggtggctcacgcctgttatcccagcactttgggaggccaaggtgggcagatcatgaggtcaggagattgagactatcctggccaacatggtgaaaccccgtctctactaaaatataaaaaattagcgggcatagtggtgcgtgcctgtagtcccagctactcaagaggctgaggcaggagaatcacttgaacccaggaggcagaggttgcagtgagcggagattgccccactgcactccagcctggcgacagagcaagactccatctcaaaaaaaaaaacaaaaaacaaacaaaaaaaccctgtatctaaaccatcaatttttaaaggagcgaaagttttgaatagacactttgccagagaagataattggatagcaaatatgcacatgaaaagatgttgaacatcattagtcattaggaaaatgcaaataaaaaccacagtgagatgccactgcacaatcaatagattgactttttaaaaatcaattgagagacatggagcagttctaactgctccacattgctcatgggaatgcagagtgccacattcactttgggaaagtttggcagataaaattaacatgtacttaatatataacccagctgtgccatttctaggaaaatttatgttcacagagaaacttgtgtccagtttttagtggcttcaggggtgatggaacttgattttggtggtggttaaatgactgttcttttttttaaacacaaagaacttaacactaaaagtggtgaattttactatatgtaagtcatacaatttttaatgaaaaagaatgctcagaatctgaaataaaatcagtgtatatgaacagaatataggaggaaaactacaaccaatttaatagatgtgaaagggcatttgacaaaatttgtcacccattcataataagtcagcaaacaagaactaaaagggaatttcctaatctgataaagagtgtctagaaaaacaccacagacatgctgtcctccagtattgagaacaagacattcactctcaccactgttactcagcattgtactggaagtcattgccaggcacaggtttgtaggtttcagccatttttggctatttgacgttgacaagttacttaacctttcatgggttttagtttcttcaggttaaaaagactggggggcgctgtgggaaagagagtgataatctaccatgcaggattgttgtgagggttcaagaagatgtttaagcacctaacatagttacttgtatatggtagtcatacagtagattagatagttttaatttgttcagtgtgtgtgtgtgtgtgtgtgtgtgtgtgtgtcttctgtgacgatagcctctttccttaaactaaatgaacatcttagtgaattttcctattctggagaaggaaaaggaagaaataggggaaagataggcatttgactacctttcatttggataattgaaaattattagttctctccagtaaggtaatggarwatatataattacctgataataaaaatttatttctgaaaacaattcagaatctctcatcttgtacagattgagtatcccttatccccaaatccaaaatgctccaaaatctgaaacttttgagcaccaacatgacactcaaaggaaatgttcattggagcatttcagattttggattttcagattcgggatgctctaactagtaaatacattgcaaatattccaaaatctgaaatccaaaacacttttggtcccaagcatttctgatgagggatactcagccttgtaatacttatgcagtattttgttgataggattttagtaggaaataattataagtatgccaatcaaacacttaatttggtcttcaaagctggttacaatagtacagtggcatctggacagagatgattttttcacaatttttttgtacaggatatattgatttgtcaaaaagaagagtttctccagaggaagcaatcaaatgtgaagacaaattcacaaaatccaaaactgtaagttgatctttgagtcaaattagtccactatctgtgtgtttaataaataatwtgaaatcttaatttcatactgctactaccttaaagtattgcttatgatctaatattctcaaattagtactagaagtgttttgaagccgttttaggttaaattaactgtgggtgacttcaactgctttaacttgtttacagttggaatgcctcataaaatacggggtttttttgtttgtttaaatagaaatgaggtctttctattttgtccaggttggtctcagaccctgagcttcaagtgatccttgagcctcagcccyccaaagtgctgggattacagaagtgagccaatgcacttggccaaaatacagttcttgattttcaaccctgttctgggatgagggtaacggagacaaccagctgttatatgttaagaatgaacaggggtttataaaatgtctgtgaatccaggaaagcaaggcagaggcctgttactagttttggtttttttccccctccactagcgtgttaggattatttctttttgcattcttatttttgctattacttcctgcttgtcatccacagtaagcagcagcaaagcaaagatagccatttaatttcttctgtcagtatttctcttttctcaggtcctgtttaagttatccttcatcctctacatcctcagttctgtgtgtgtgtgtgtgtgtgtgtgtgtgtgtgtgtgtgtgtgtgtgtgtgtcacaaagtctttcccagactggagtgtagtggcgcaatctcaacttactgcaaccacctcctcctgggctcaagcgatcctctcgcctctgcctcccggaatgtttgagattacaggcgtaagccagtgtgcccagcctatcctcagttcttagtggtactgtttgtattgcttctgttttctttgcccttctctggtgtctgttcttttctgccatgagtgtttctgtcctcaagataaaatatcaaaaaaaaaaaaaagtttcaatgaagagattttaaaaaatcttgcttaatcccagtaagagagaaaataaaggtctaaaagccatcagttacccaaatcatttcctttgttttactgatgtatttacagttatgcagtgtggtttacacatttgaaaacactgtcagtaaaatatcttcttaataaactctaggaccttaccacttagaatgtagtctctaaactagcagcattgacatcacctgtttttttagaaatacagactctcaggtcctactaacttttgagaagcacttttctgggaaaatttcatatttttttgtctccttaggatattgttaaaatgagtgtgttaatagatcttattgagatgttaaaatggaagagttattcagtgtcagtaccttttctcactcaatttttatgtgtaactatgatgaagaccttaatactttttgtctacaccctgttaattttaggaggtaagaaaaagtttggcaggtgggtaagatgacagaaaaaaaattttttttatcgtgattctctcctcagggagtaataataacaacttgtatttgtatagccgttttccatttatagtgtgtggtttctatatatttgatctatgcgagcaytctgtagtaaggagagatgctagtttcttctttttccagaggaggaaacaagttcagagatactgtgttactgtcaagacttgatccaggtcttaggaccctaaattgtatactatctctactttttatacccacttaaagtgagtatttccctatggagatcttttattgttaaggaattattgtagccaaattatgttatttactaaaatgtaaaaacattttttataaatctcttatctttgaattgttgagcttttcattttatttctaggtttatagcattcttcgtcatgttgctgaggtgttagaatacaccaaggatgagcagctggaaagcctattccagaggactgcctgggtctttgatgacaagtacaagagacctggatatggtgcctatgatgcatttaagcatgcagtctcgtaagaataccttcttgactctccttctaccttgatatcacaactcttggcctgatatttaacagcatagcatccatgtataaaatacttgccaaatttagattaaaatattttgtattggccagtaaatgggccaatcctatatggtcaagtctgtgtagttttatgtatcatagttatgtagattcataaaccatatggtttatctcacacattttcctttcctagttattgtcctaagtggctatgggactaaagagcatgtctcaccaaaaactataacctcttgttttctctacctcttttgactctcctttgactttcagcccacaccactttagccagtcttccatgtagccttagcctgggccttactatcaccgggatttgctctgccactaaaatctttaattcacactttctgttcttttgcccctgcctcctattcatctagctcccagttggtcctattatttgtcatcttaattctgtatgttaggatctgattccaaaccttttttctccctgtcttttcgccatttcctgccttttctctcttatccaacataggcacaccatgatacatcattttaacgactttgttgccattattgtgagcttttgccttgtttttccttccatccatccagccttggatcaatgttcctgccttctctgtacttgtagactgctgggtgctactaggaaaaatcagtcttgcaggttggtccactgcatattcatggtctccagcctcagctgttccacattctctctgctcctggtcagttcttcagtagtggctattttagagcttttccacgttcttcctcagaaaaccactctatccctgctccctgcctcttggctggtatgctcactacctattttattttataaagaaaatagaaaccattgcacaagaactacttttccactgtctcaacaaacttacatatctctgtcccacctgtcatttcttcctatgctgctgtcactggaatttgtgtcctaattgctctcaaactagtcttgccacctatgcccagctgctgctcagagatctctattagttactttttctcttgggtcacctttccctttattgcttttactccatcagcataaaaatatctctagtttcttccatttatactataaaacccacttctcaacttttcctttactttctcttggagcaaacactgcgtcctctgcttttaacagccacacttggctatgtgtggtagctcatgcctgtaatcccagcactatgtaaggctgaggtgggaggattgcttgaggccaggagttggagaccatcctgggcagcatagcaagactgccatctctaaaaaaaaaaaaaattaaaagtagccaggtgtggtagcatttgcctgtagtagtcccagcaacttgggaggctgaggcaggaggatcacttgagtccagtggtttgaggtttctgtgagctgtgatttgtgattgcaccactgcactctagtctggatgacagagtgagaccttgtctcttaaaaaaaaaaaaaaagccagactctttcagttctctatacttgctgtctctttacctcccactccttcctaaatgttaagagttagaggggggaaaaaagagaatgagtaggacccaagaccattaagagtcccccagaaagccaactcatctggggttccaaatcccttcaagtttattctcatgtgactttttttttttttttttttttttggtatatcacgtggtagaaaaggtgggaatagtaataatgataactaacatttatataattctaacaacaacctgtggtataaatgctattattatccttttcttacagttgaagaaactgaagctgagattaaataatttgttcaaggtcacacagctaacaaatcatagagccaggcagtattcaaacgcgtgcattctggctccatccagagtttgcactattagccattaaacacaactttatatttctgtcctgcagtcctcagtacatttcttaacttgtctcaactgtcatcatctggcttctttagttacctctttaacttctagttccagcaaccccttgttaccactaaaccttggcgtgtgttattcccttttccttagcactcttttcttgcttcattcatgtagggactgtccagatttaactaatgctagttctttgcatttttcttttaattacataaaatttctgacatagttggaaacaatgttttacctttccagacctattttcctcacttatcagtgataaccactattctgaaattatgtatcaatatcatttgtttttattgttttactacatatgtgtctattatcattttttatttaaaatgtaacctattgtatctttttgtagcttgcatttttacatataagcctattattaagcaggattcccccacaatgatagatgtatacttgatccatattaatctctatatagtatttcattgtgagaatatgctttatctgttcctctattaagagttgtttaggtaattttcccttctgtgccatttgtcaaacagggctgtgatgaatagtgtatgtgtctctatatgtagttgtttgagagtttctaatatatatgcctaggagtggaattgttgggtcataggattgattatatatctttaaactgacttggtttcaccaaatccttgccacaatttggtatatatctgattttttctcctttttctagtctaatgaattcacagtagtatcttttgatttgcatactcctgattgttggagaggtcaacagtttttcatgtttcttaaccatttgtatttcttctgtgaaacatctgttcacctcatttgcccattttctgtttatcatcttgtttcttatacatttatgttggttgtcttctcgttactttatgttagctgagtaaaagttccctccacccaaattctcttgccttttattcccaataagaccccttgcttattaagcctgatgcttgctcatgctattccttttttacatgacataactttctttttttctttttcttttttttttttttttttgagacggagtctcgctctgtcgcccaggctggagtgcagtggcgggatctcggctcactgcaagctccgcctcccgggttcacaccattctcctgcctcagcctcccaaatagctgggactacaggcgcccgccactacgcccggctaattttttgtatttttagtagagacgaggtttcaccgttttagccgggatggtctcgatctcctgacctcgtgatccgcccgcctcggcctcccaaagtgtctttttttctttttaatagagatggaggtcttgctatgttgcctagactggtctatgaactcctggtctccagtgatccccctgcctcagcctcccaaagtgctgggattacaggcatgagtcactggtgcccagccttatgtatcataacttttttacaatagttctacctttactttttacagtgctactcctcttttagtctttatttcatattttcatttgctcactcattcaacaaacatgccagttaataagaccctggtccctgtcctgtggcacttaggagggtcagatgaaatgctactttttgcatgaagcccttcctgacctcattaactggaagtaatacctttctgtcctgatgcccacagatgtactgttacatttaaaagtttttccatgttttttttttctattcaagatagattataaactccttgaggcagggacagctaattgcatggaagtaatcaattatagtagaatatcagatgtgttaggcattaaattgcttgttttagtcagatcactaaaattttgatttcactaataatcagttggggtgtaagtgcaaagctaagatttgaattctaattgtgacactaaagccttaactattatatgcattaactattatatgcttaactattatatgcattgttccatagtgtttggtttcacatttatcagtaatataaccttgaccttttgttatttatttatgtttttgaccagagacccatctattttggatagtttagatttgaatgaagatgaacgggaagtactcattaataatattaataggcgcttgaccccacaggctgtcaaaattcgagcaggtaaatgattttttaaatgatttttacagtattttgcatgcatcaaaaaagctattaaataatgagacttaccaaagaatatgttgctacatcaacatctataaatttttctaaatggttgttttttataacaaaagcttaagaaattattttggcttctgaatcataaaatttatatattgacacaagtagaaacagtcttgtgagttcagctaacctaaaggtagccctttttttaaaaagaggggtttgattgttttgttttagtgcatactttaaaatattccaaatttttacaaagatgagacataccatgcggaattttctccaactagccttttccacccagtgtatcataggtacccttccattgcagaacataggaatctttctcattcttttttatgctgggtaatgtttcatagaacagataaaccttaacataaacccgtcccctcctgatgaacatttaggttgtgccagttttctcacagttacaaaaaaatgctacaaattagcacccttatattatacatacttaaccatttacacaaatgttcttcaagacaaattcctaaaagtagaatttctgagtcaaagggtaatgcaatttctaaaccgttttagataagttgcagttattgttatattccatctttaccacactcctccttgcctcccttttataaataaggaactgcagtatagagaggttggattcagtataagtatttgaatactaatatatctgccacgtgtttgatttcctttaaacttttaaatattttttgcattttttatcaacttttgaatttttgtaattgtagatattgaagtggcttgttatggttatgaaggcattgatgctgtaaaagaagccctaagagcaggtttgaattgttctacagaaaacatgcccattaaggtgagtcatgagttgtctccctccctgctgaaatgctcacctaaaccaaataggatctttgatctttgtttctttttttttttttaatcacatttcataacaaaagtgggttttttactcttaaaattgagcagtggttcttggtaatatttctagatgtttgtgatttatgtttaggctttgttggtttctactgttactatcacagtggatggagattcctattggtagaaagccagcgatgccaaacctcctttacaataaagagttgctgtgcccaaaatactgagagcactttaaaaaagagtaacactttcttctatctgtacacatacaagttttatgaggtttgatcagaatctttcattagtgataaaattaactggatggctgtaactcagaaggattcttccatcagtttagttcagagacaaattatccattatactgatgataattgcagttagtttagccaccaaagatacayggaaatgataattctttctattcagtatcgcagtgaactgtttatactattgcattagatccctgtgttgatttgcttttgctayattaacaaatcaccccaaaacgtaattgccaattctgtaggaccctaaattactgtcctgtagaattggcaattacgttttggggtgatttgttaatacagcagattaataaaatctcaagcatcctaatagttgtgggttctgtaggtacattcataawtgaatttttgtctttctcttttagattaatctaatagctcctcctcggtatgtaatgactackacaaccctggagagaacagaaggcctttctgtcctcagtcaagctatggctgttatcaaagagaagattgaggaaaagaggggtgtgttcaatgttcaaatggaggtgagatcaatagattyatttttaataatgactcaggaggttcctaaaaggagttcttgtaggyaaataagagctgtcggccttggaatgtcatattgtaggatggtcattcaggcctttgatcactaatggtgttagggtcaccccccgtccccagccagggggaagggaataaacaatataaatgagaagtttttttatggtttgaatttgcatgtggcatgtctaaaatttgatctcagaattggagaaaaaaaaagttgtctcctgtcttttccttgtccaacaagaaagaagtgtgtgtacgtgcgtgcgtgcgtgtgtgtgtgtgtgtgtgttatggttccttctatggaaaggactagtaagctagtaagtagtagtttgagcctggaagacaggtttttttaacaggatatctatttgtggtcttgaaagatacagccattggggttatttcatgttttcagttttagcttataaaaatgacagaaaataattttccattttaatacatacatcctttttctatactattctcataagtttcacctcttatttatgtaatggaatttattgctgataagtcactcaaaagtgaacagatatgacagagttgttagaaaagtgttaaagagagaaaacattaggcagtaatagtattgaaattaaatttgtatagtatttactacttcagtttgaaattatacctctgcttccacagcccaaagtggtcacagatacagatgagactgaacttgcgaggcagatggagaggcttgaaagagaaaatgccgaagtggatggagatgatgatgcagaagaaatggaagccaaagctgaagattaactttgtgggaaacagagtccaatttaaggaacacagagcagcgcttcctggctgtaaatcctagacttgaaagttttccagtattgaaaacttcaaagctgaatattttttatttctaagtatttaaatgttctaacagatcagaacatgaaatgccctcctaaatgtcagctgttgtcacacagtagctccaacactttgagcatttttaagggagtgrcctcatttcactagagacaaatctttaagaatagttctaaaattgggcttgtgatttccatttctgatgtctccagattggcacccctttctagttcaatgcctcacgagatttgccaggggcatccaaggcaaacaatcccaatctttctatataaaatgtattcaagcaaacatcaaataaatttctgggatatttaactataggcttcttccttcttgtcaccagttaaaagcattttaatactaagaccctaattcttttatctttattttagtcttgatgtggaactgtaggagcaggtgaataaaggatctctataacagatcctttcaaaagaagagttttagagaaaataaatttaactttaaccacagtgaaagttgacccttagcgggacaaagccttaaaatgcattgaaagaattagatcggttctgtgccttttatctatttgagattgatgacaacctgtgtgagagaatttatcacaccacgtccttattggaataataagctacttgccttgagtttataattcagggtggtaaagtatgtttttaaattttaaaaagcagctgcattttttatttagttggaatatcacccaattttttatttttattgctattaaaatatccactagatgccacctagagctccagttctttataacaaaacagggatctgtttgaacacttactgttgtttttttttttttacatgtttccatcatttctgtctttaagaactaattcgtacataataagtttcataggtaacacattatttgaagttacagctacagtagtcaggtgtagaaaatcttgagttgctttggtctgcttgtcttcataaatttattctcttatgatacttgaggtaccagttgtatttaattttattcattatccctagatagctattaagatacttagattagacctaacccaccatagtcaatccaagactagactactcaatattaaagggtctggaaaatagaagagtgtgttgggcaggtagtttgtaccatttatgaaggtttgttcctttgttaaatttagcagcctgtactagcttttgaaatccagaagttttaacttccagtggctggtttctgagagagtgccatgattgctagccagcattccatattgggaatatgtagaggagaacctggatgtacttaagagtggcatataattttcacttctgtctgttgaggcatcaaaaaaacaagtttagaaagctggcaacatgaagaatgcattcaaaatataacaggtgcttctttgttgtacgcagaggaattttttcttttgattttgtttactgaaatttgttatacttcaaaagccataacttgaaaaatactggtggcgtcgatggtgagtgatttttatcccacgtgggccttttgctcagttccatggcaattttgtaaattgaccctagccagagaatagatcagtatttcactgataccacgaggaaaagaacaaacaaaacttaaaagtattcatacaccttgctaacctaaaagacagcagggacaagatacatrtgaggacaaggtatacacccagttctgaataacttgaagaacaggcttggcaaagaagtaagtttatccaaatcttgaatttctgccaggcatggtagctcatgcctgtaaccctggcacttaaggggccaaggcaggaggatcacttgaggccagtgagctgtgatcactccagtgcactcgagcctgggtgacagggcaagaccctgtctcaaaaaaaaaaaaaamaaccaaaaatcttgaatctcccatcaaagccttttcattaaaaatacaatttcatctactccctactgtacctttcactgatgtcaagtggctatcaattcatatagctgaaaattagtgatagtttgggtctcatttatgcataaattaattgaaaatcagtaatggccaggaagaaatatgaatattcaaaccacttttttctttttttttttttttttttggcaaatggtgttatattgcctgggcaggtctcgaaatcctgggctcaagctatcctcctgcctctgcctctgtaagagtgtgagccaccatgccccacccaaaccatttttcatatcagttatagcaaaacaagacaaaccagttcttaataatgttcaaagttggacccatagagacatgctaagcactacatcatgctaagaagaacagttattactcagctgcyatacttcagccattctacttttacaccaagaacaaaatggctagagatttttttaaaaatacaaatgccagtaccttgccgagacttgttcactgatttgccccaaccccaaggtaatggtcatctactttgcaacctatggagatcctgatagctcccatacaaagtgaggtacactgttgccaatttggaggcaggaagccatcaaactaaacgtagtttaattcagatgaacacctatcgatattcaaaaggcaaaacaaaaaaactaattccagggacattagaccttggtgaaatgccaaatggaaaatggtgctttaaaaggtagtctcttaccatataaggaataagtaaaacattagcttgtgatttctcattattcaggtcaatgttttagacacgactaacaagggacagttcaaactattaaagagaacaaatttttacttaagcactttgaggtatccactccccttaaatgtaagttatgtattttatctgttgattaaggggaggtccaagcatttgtacttggcaggaatgctggcaatagcttgtgccagattactgtataaacttgaaagtaataaaaatgttctttaaaagtattgtatgatacagacttttcactacagattaaccttccaactggtgaagtttcttggtacctatttgtctcagcttatattcattttaaaaccaaaatttaatgccttgatataaatcttccccatttacatctttttctgtcctttagagcgctcttactctgcattgctaaatgcccatttttcatagaaaagctatgtaatgtatttttcgtatacgtgattatgttctccgacagagtccatgacttctgtaatgtataatatttatgcaggcttgttttctaaagcaaaacaatattctcaatgtacaaagtttggccaccatccccactttaagatgaactatgtcttaatgacagagatacttgaaacgttgctcgaaaactataaactttgtatgggattctaatagctagaaacaaattgtcagcttttactaattccaaagaagttaagagagaacctcataagaagagagttttattcaacattatggcatggccagtgtaattgttccaacaaagggaacctactttggtgcccgaggaaatggctgtttgtgatgctggggaaaagtcaagatgctgacgcctaatggctgttctagcctttccaggtttgtaacatgaagatggggaaggaaatggcaccactgctgtttgtaatctgaggaactcttggcagcattcactctccaaagcagtacaaaacttacaaagaagtcaaaagtcttaacactcccattctccaggaactcttgtctgtgtcatctggtaggagggaggaatcctggttccctcaggtccttgtcatgttagctttttgatagcttcaatccactcggctcgctcagccttgctgctggcctgaatgtaatagtgtgtgtcatccttagtaatcactttgaagaggtttccctggacattccctttaacccctaggcagaaaaaagggggaaaaaaatcagtgattgaatagccatgtctgctttcatcttgaaccagcagaaagtcaactgagacatggacaaaaacatacaatgatgtatttattaaataaaaggtttacagttagagaatcctatcagatgaggtccccttttcctcccattccctgtccctcaccagtgccctaaggccttccaatggttatgtctggatattcctggaagccctcttgcctgctccctatgctcaagatggtagcatgccatagatctaccatttcatttacatcaaagaatccagtatgtttatgttaaaagcaagcatagaatttggagtttgatctcaaattgtttaacttattggaaccccagtttccacagacacaagatgggaataatatcttcttactatggctggctattgtgaaattagtattatgatacatattaaggtatgttgttaaccctaaagcattgtgtaagcctcacctattatttttaggcggaagcttatgggccatcagcacagaaactgaggggaaagattattaacataaggattacttagttgtattcttaaaacgccaagaacataccctttgttcaattctgaaattcacttcaaaactcacaccactctgtctcatggagaaagccctgctcggctcccaaagctgtcatttcattagtgggacattactgaggtgcaggagggaggcccctgagatcttcaggccagggctgaagttgtaccttaccagtgggaacgccattatcttccagagcagacacgagtgaaccacgaagagaaaacccacccactggcctgttctcttcctgtagaggaaaggagacccaattaggaatttgtgaatgaacaaaagggaagagttgcactccccttacaactcaggccagctaaagaagtgagtgcaaatcatttgtaatagaagatgaagctgaacttggacatcacatggccaaagctgcatgcatcagtaaggaagcttgggcctcttcatttcacagccagcagcagtagtgcccatcaatgttgcagttaccaagtctcacagacttgcaaatctgcttttcattcctggagatgtctcaaacagagcctctgatccaatatgctacccggaaaaacattcactggcttccttaacccttgtgtgcatcttacaaagcaatcagaaatatatatttatagtaatcatttctttttttttgagacggagtctcactctgtctttcaggctggagtgcagaggcacgatctcggctcactgcaacctctgcctcccaggttcaagcgattctcctgcctcagtctcccgaggaactgggattacaagcacacgccaccacacctggctaattttgtatttttagtagaggcaggggttcatcaccttggccaggctggtctcaaactcctgacctcaagtgatctgccctcctcagcctcccaaagtgctgggattacagacatgagccactgcacccagctatagtaatcatttctgcaaagttgatagattcctgcacataggacatcgttacacaaatctagtatgtgcctagcaagaaacttcgtgtgatacaaaactgcgattggtggtatccctggacgattcagggcaactttacacacctcgtgcctcaggccctaggagcccttcaattaatcaataatcaacttcatactgcatgttgggcccagcaagaggtagggcaaaaaataaaatggttaaataaaatactggaaatatttgtactactaaatgccaacgggaggaaagttcagagaaggaagggatccgccccagcctggagggttcaagggcagtctcagggaggacaggagagtcctgtcctggataggagagtaggtccccaggacaggagaggggcattcagcctaaacaggaggaagagtgggagtaaagtgcggaacaaattaattgcagaatgcttttgagatggttccttatcttgtacctgcagcccagagatttggcaattcttttatttcctttgcacacttgctttgagtaatctcttctgcactgtttccatctatgtatgtatatgagcatttgtgcatgtgtacatatatatgtatatatgtatatttacatgtatatgtatttatagataggtgtgtataggcacgtatgtgtgtgtatatattttctcagtttcctattttaaaagctgagacagcagactcatcaggggcacaaagaaagtaggttaggctagaccatggtgagagttaaatacaaaactaaagtgttttttttcttttttttttttttaagtgttttttcatttgtttattttttccttgcttcaaacaggatttgaggtagccagaaaggaaggagtttgaactccatcctgtagccaggccaccatgccccacagagaggtcaactggagctttttggaggctcctcctgccacatccctccctggccctggcctagctgggtccaggcaggggttcctgactgaagctcagtgaggaaggaactgcccactcttcactgtttcaacaaaaactaatgaaagtcatacattgcccaagacaaggctgaacagctaactaaagggccctttttctttgcttttgactggaattagatccacttagcatgtggtaatacctagtatcagaaacataaaaatgatttttttttaatttgccatcaaagttttttaaaaagcaaattagtaaattatggcttaaatattatatggtgacagaaacttttcaaaacataggtggggaaaagtggagggaggcagaattaatgggatctttgaatggaaagtgtggagaggctgggaagtgccagtaggagtctctgtcagcctacctcatcctccctactcacaaagcaggctttggggaagaccaaaagatgcttttcctctgaaaatgataaagatgccctcccatgggaaagtgggggattaggcatggaagaaacggctcaagaagcaggcacctatgtgatgacagggcagagcagcttggactgtggaaggaaaggcatggtgcagcagactttacggcgggtgccaggggaaggcaggatatccagccagctgcccgccatgccaggagaggagtgtctgggggcatcacaacatgggaccaacatggagccagcatgcgcactcactttggaagggtcatagtaatgcaggaaagctggatccttccttagaacaaagcgacgcaccttccagtttttcctcttgtgtccctgaggcaaagaaatggttcaaagctcattggtgacagctgcatgtccctctctcctgtatctatgcatgtaatgccaaacccccaacaagccagcccgctccaatgggactacattctaaaaccagtccacaggaaacctgaggatagcaatgacatgtcacagacctccctgccaacacccccactcagtgacactgtagcaaaaatgccatcaccttaagtcaagtcagcagagccaaagagagtccatgcagaaggaaaggggacacacaatactcagggcataaaggaggacagggaggcagcaggtgtcagctgggctgggagcacacaggcaaacttgaacccaagggcaccagctaagggccaagtcagtccaaaaacaaacctacagctacatgtatatttgtcagtctacacgtgtgcccacatgtgcagtaaaaccactttcacattgtgcattaggaaaaaagcaagaaacgatcaattatatgataaaatctaaatgtgtaagcagctgatatgtgtgtgtgtgtgtgtgtgtgtgtgtgtgtgtgactttctttggcctcactgaccaggagggctaaggttagatcacaaaccttagccctcctagtcaggaacaccctcagagtccctcccacaccctcctcaagctcccctaggggcctctcttcctcccctcgggaaggactcctatcaggcccagcagaagcagggccttggtgtagacaggcagcagtggggatgataagaatctaagagcagatgaggatcctgatatgcaggaagcaggtgacagcaacagcacatgctccgagtaacgatgggagtggtgccgagccgtgtaggtgccctctgtgcagacacacacattcacatggtatacaatatgtgcacaaacacgaaggctgtgcaaaatgtctgctacacttcctgggccaaggacaggtgattttgttcacagaataccctttttgttaggcacaggtaggaatgccgcaggacacggcttgcctctggttcaacatagctgctctcccaaacacggtttaggagtagtggccatggccaggctttgaatagggagccttacagtggagaatctgatcttcaacctaccgacatggtggagaaaattgtttttagctcagaaagtgtatcaaggaggcgtgcagaatctcacaagggaaggcagagaccccaggacgccccaaggaacagaaggccagcaaatgcaaaacctcaagccagtcagcaaaagcttccaagacaaatatgtgaagctgggcaattgtgtagaagttgttttttgatgttgtgataattgtgtgtgtgtgtagtacatttttcccgaacagcccttgtgtctggtacacatgtgtgtgtgagtgtgggcatatgcctgttctttgacttgctcctggaggctggtgctgggctcttgctttcgtagattttgctgtaattggtgccctccagcagcctcagcccttcccttcttctgggctcactgctccctcccctaagcttgagaactgtccatctctcttccctgctcatagcagccatacctgcttggccaggtagccttgtttcaccaccgtgccacttaactccacagtgctcaggctaatttcttccttggggcttatcttctttttgtagctctcagcctagggggaaggagggagcaaggactctgctacagaaaagacccaggcccaggctatggcggct

SEQ ID NO: 97690 - DNA, 246146 bp, Homo sapiens
cctgtaatcccagcactttgggaggcccaggtgaatggatcgcttgagtccaggagtttgagaccatcctgggttaacatggtgaaaccccatctctacaaaaaatacaaaaattagctgggtgtggtgacactcacctgcagtcctagctacttgtgaggctgaagtgggaggatcacctgagccagggctccagtaagccatgatcatgccactgagctctagcctggacacagagcgagaccctgtcccagggggaaaaaaagcatatgtactggtactattagtgtattagagaaattaggttctaaagttatctcccatccattattatttagtgatggttgatgacatgtagtgaatatttctgaaggatcatttatttgccaaacacttactgagccttaagttcaaggcactgggtttggtaccaaaggatagaaagacgaatatattgaggtctctgttcctgaggagcttaaaattttgtgggggagataagacaaagataagtaacaatataggatatgggattggtgaggataaagagtctgattttgagaggaggagggcaattgggagtgaatttttagctaggtctttaaggacaataattttgagaggataaggataaaggttaatgagaagcagaggaaacagaatgagaaaagcatggagctgtgaaggtgtgtggtatatttttgaaatagtaatccagtgtgtctggagtgtgggttgtatgtaaatgtgggttattagcttaaaaggcatgttggagacaaattatggactttgaatgaaatgctgtttgctgtgggatatacagtggtgatgtctgtgtgtcatatcatggccaccattgatgacccaagatgggcacttgccccaaaacactcagaatcttttgctgggagttttcaaacttgtactggaagaattaaggaagactagtagagggaatcttagaaataatgcttgggaattctcagtgatcaaggtatctgcatgtttaggacactgataagcagtaggtgagatgaagagtgacctagtgagtcacatgggctacagtggagagaagacatcctggcagagactgagtgccagattctagtcatctcccaagcatagcagcactcttacttttttatggtgatatgaatttccccaggatccagagaccccacttgaactggcctagggaagaattgttcaaattggcagtaagggaaaagcagcagagcctctttgatgaaaatgtaaaatgtgagcttggagctactgggagccatgtttctaaggttttggagaaagctcctttgaaaactaacctgatgagaaagacagaggcaagtgaaatgggatagcaggtcttcaagtccagccagctgcactcctgctcttcacattgtttgatattgtgatccaataaattcaactttttgcctaggccagttcaatcggagtttctggttcctgaggaagttcacagccaataaaggtgtcatgccaacccctgtgccagggggcaggcattgtgattaacagacctagtagaaccacatacatgtggggtgagggactaaggactatttcccaaaagaagtggagtagagatgctgtccttagtaaagggagaaaacagtaagtatcctcttccgatgaggaaagcccaacctgggtccatagccttggggctggaaaagaaggtctgcatttgagaaacactgtcccattcccatagaatctactgttaactgaggtaggaatgctagaggatgagcagacttgggaagagaaataagggcctcaatttttccacttttgggattcagctgtcttcagaaatgtatagaccaatggaacagaacagaggcctcagaaataacaccacacatctacaaccatctgatctttgacaaacctgacaaaaacaagaaatcgggaaaggattccctatttaataaatgctactgggaaaactggctagccatatgtagaaagctgaaacttgatcccttccttacaccttatacaaaaattaattcaagatggattaaagacttaaatgttagacctaaaattataaaaatcctagaagaaaacctaggcaatatcattcaggacataggcatgggcaaggacttcatgactaaaacaccaaaagcaatggcaacaaaagctaaaatagacaaatgggatctaatgaaactaaagagcttctgcacagcaaaagaaactaccatcagaatgaacaggcaacctacagactgggagaaaatttttggaatctactcatctgacaaagggctaatatccagaatctacaaagaacttaaacaaatttacaagaaaaaagtcaaacaaccccatcaaaaagtggacaaaggatatgaacagacacttttccaaagaagagatttatgcagccaacagacacatgaaacaatgctcatcatcactggtcatcagagaaatgcaaatcaaaaccacaatgagataccacctcacaccagttagaatggtgatcattaaaaagtcaggaaacaacaggtgctggagaggatatggagaaataggaatgcttttacactgttcgtgggagtgtaaatagttcagccattgtggaagacagtggggcgattcctcaaagatctagaactagaaataccatttgacccagccatcccattactgggcatatacccaaaggattataaatcatgctactataaagacacatgcacatgtatgtttattgcagcactattcacaatagcaaagacttggaaccaacccaaatgtccatcagtgatagactggattaagaaaatgtggcacatatacaccatggaatactacgcagccatgaaaaaggatgagttcatgttctttgtagcgacatggatgaaactggaaaccatcattctgagcaaactatcacaaggacagaaaaccaaacaccgcatgttctcactcataggtaggagttgaacactgagaacacttggacatagggcagggaacattacacaccggggcctgacgtggggtggggagatgggggagggatagcattaggagaaatacctaatgtaaatgacgagttaatgggtgcagcaaaccaacacaacacatgtatacatatgtaacaaacctgcatgttgtgcacatgtaccctataacttaaagtataataataaaaaacctaaaaaaaataaagtagtaaaacaaaaacaatacataggaagcgtaagtttcatatgtatagcatatagaaaaatgcataattttgaagttcagaaaatgaaaaaaatttgttcttagtcaacaaaaattcataaagaaaaagaatttgtaaacatatgaaggttcaccttggatgaacacgttggaaggaacttaagcatgattgaatttttgtgttgagacgaatgtgtttttaacctttcaaaattatatgttatggttgataaattattttctcctaaaaaaaaaaagaaatgtaggaaacttgagtttggtggttttctacataggctgaggttccatttgaattaggaacctggtgccgtcagtgctttcctcctcaaagctctctgaccattccatgttattcatccccaccagtgataatgatgtacatttcagagcttctgtaatgtatgaggcattgtattagggcctttatgtatgtctatgtcatgtaatttaatcattacagcaattttatgaagtgtattatatgcaagaaggaaacaggaacgggaggattggaaatttgcttcaaacacaggtctgactgatgtaaaagaaggttgggctcttattattatattgtcccgcctcttttagataatactactgccagtatcctaatgctaccattaataatggccagcagttactaagctcttactctatgctaggtgttttaaatgaagtatcttttattctttacaagtactatcctgaacttagaattgggaaaactgaggcttaaggtcatataaatcatgtgatgaagccagcacttgaattcagctctcttggtactagagaccaaatctataagtgctattttctactgtctttaggtccataagtaaagcttatctgacagatttccaagtcagctgttgctaccatgcttccaagttagtagtttcccacctaggaaaaggataaagcttgtagcattgctgcttctcacaatctttagtgctttctttgccttaatcttaagttttgggagaaaggaaaagcaattcacttcgcaacgtggttggggtctcatcttcaaagacgtaattaaaactgtcctggatagctgggcatcattacaggctcatgcctgtaatcccagcactttgggagcctgaggtaggaggactgcttgagcccaggaattcaagaccagcctgggcaacatagtgagatcccatttcttaaaaaaataaaataaaaaattagctgggactggtggctagtgcctgaggtcccagctacttagaaggctgaggtgggaggatgacttgagcccaggagttcaaggctgcaatgaattgtgatcgggccactgcactctagcctgggcaacagaaggagatcctgtttcaaaacaaacaaacaaacacacaaaaattgtcctagtggcaataaactataatgccatctgagtggatgacctcaatgtagtattggctaaaaattttatttgcacatatgacatattcattctttcaccagaagtttcttgtatgttatcagctgagcttacatgactatgcagttataaagaagtataaagcacaggctattaaatggtccaaaatataaagtactagagttgcctttgttcttgaagagcttcactctgaatcatgtaactggtctggatgtggtctttcaataagacaatagcagcagcataataagcctccgggtcagcatagtagcatagtatttggtgttacctattttagtaagtttatgtttggttaactcctgttgaggaacaatattatgatcaaagagatgatatggtttatttattagatgaatccttgatgtcttcatactaatgtaaagctctgtcacagcctgctttgatctgctggttcctgggtgtggtatccagctgtttgtcagcatccctctctatacccatggaaatcccaactgtatttttgggttttgggttccctaccaggttcactgtttaaaaatgtgaattgaatgttcctttttattgaaaagaacacaagttctatgatgagttaaaattactataaatgtttatagcttatactcattgtatcagattatttgaaaaatctagtttgcatgttcccttctgatggagtttgggtcagatgaaggtggttacaaaaaatgtttgacactaaaaattttcacattacactattgtttgatagtcattcattaattcttcacttagtctacttactcattaagaatcaacaaatctttattttggagatgaataagatgtgtcctttacagtgggaaagcttattatttaatagagctgtttacagacttcaatttgccttcttgataaatgtgatgaacatggtttacaatttacaaagatattcaggctatcagatcttggaattgcagaactaaatttttctgtatgtattcttatatgattttttcctaggtatttggggaaataaatactgtctgatggagtagatagctttttcatattttgtatctgcgaatgcatattatcagctgagctgacatgactatgcaattataaagaagtataaagcacaggctattaaatggtccaaaagaaagtaagtacaccgctcataaatctttgaaatcatgggaatgtttccagacagaacaagatggaatttatcttcctaattgtgacacagtaccttgaaaaatgcaactgggtgcgtggagataaggctttgtataatttgccattttaaaagttcccctgtcaaattcaaggtattaagttgctttrtggaaggctaagaccaagccctagatgcaagaccgggggaactgactgccggaacgtttgtgttgcagcgcctcgccccttgccggtgctctttcgcgaagggaccgtctctgccaagcgcctgttggtaggaacctgcttggtcgcgtctgagggggcttgtaggtggctctggctgaaacaggcgcctgcgagagtctgtaggagggaaaccgccatggacgatcagggttgccctcggtgtaagaccaccaaatatcggaacccctcyytgaagctgatggtgaatgtgtgcggacacactctgtgagttgggcggcagtggattccctgggggagagacgcgctgggtgggaggagaggaccgggagatgctaggcctcgtcttgggagcaaagggcgttgttagtttcaacactggggaggaaaatgggaaaagaaggcgttgtgactttaaatagactgtagccgctagccccgagcggctytggcctgctttgaacwgcgggttctcagtgtggcatccagcagtttgtcaggttcccccttccatagccaatgagtatcccgactgtatttccaggctttgtgttgtttactgggctctggacatcgctgattaaaagcgtgggggattggagtgtttatttcatatgaaatgtttttattgaaaaagtgcgaaagtgctatgaaaacttaaaatttgcttgagtatatactgctgctatttattgtatgagttaattaaaaaaccctgtgtgtatgcccacttgtcctgatggagttcggttagactcccatcactaaaatgaagaaaacccggactgtaggtagttaattttgaagatataataatggctggcatttgagtgcacattttgtgccagacagtgttctaagcgccttaccatgaattatctcagttcattcctacaacagtcccatgaagtagatactggtatttccatttcacagggaaggaaatcgagactgctcaaggtcccttattaagtgggccttgagagaattggaacccaggaagtctgactttagaacgcccattttcaggggaagggggcagaaggagggaggttgagtttgtgtattttgaaacagggattggtcaaagtgtttcttgccagatttcttgtcagatgtggtttagtgaaggtggttctagaaagcactttgagataaaaaggtgccatgtaatggcgagcatatattcctgtagtttctttcaggtttattggaggcaaaaaataatggataatctacagtgtgtagacaaggtctcctcccaaccccccaagtgctgacaaaaatgtagagcaatgacagggtctttaggtaagcataaattgcatgattagctgtagctataattattatatggaatttattagcttacttaacttttctaattgatctttattttcctttgctttactctgcaaagaagtatagtagagctgtgattgaatgatttaagattagaagtaaggtaaaagtaatcaagaagaatgcatggaaaagggaattctacatggaaaaacactgtagatagactgtttttagagagatttcgttcaatttctctccatttttctttatcaggtttgttatggtggaacaggaaagagagtttgtttttttttttgggaaggatactaactaaatgtaatttaccagaaggatgctaaatgtaattttctggcctagcagcacttagccattcagggaagattatacgatttcagtaacataaatggcattttaattgggcaagtataaaatatttattttaattgaaattgcttttgttgtatcctcagccctttttgttaagatctaagagttaagacttttgtctaattcattctggtgttgcatttaatgtggttaatttgctaacctgttagataacaggctacattttacagtccttttttgacttgaaatgtgaacaaaatgagtgaaaagctgtagcgtattggctgagagaacaagctttggaatgagcctgtctgatttcacattctttactcttaccggctctgtggccttagggaaatgactaactctttgttagccgttcttcttgttggtacaatagagaaaatagtgctgcttgtatcacggtccttaagtattaaataatatatggaaaatatttagagatatttagtattctgtcacataatatttgtttactatatattggctattttattattattattctttgtgtggcatgggtgataagcagaaataaaattaaaacaggacttatttggcctgctatgaaatacttgcacaataatgattagctttaaatgatttcagtacactatgaaatgtgaaaatacagctttaattataaggactctgttgtaattttcttaatatgaactctttagcatgttgtctaattaatcatccttttaaagaagtactttaatctaggctaacacactgctgtttctgaatggaggagagaactcactgatttttttggcaatcatttaaaaaatttaaaattatataagctattaataataaaagcaacgtaagttattaagtgaaaggtaaaaatttctgtggttcacttctccagaggtgacaacttttaggttgtttgtgtatattttcggatattttctatgcatatacaaacatgggtgtgtttgggtagaaaactttttcttcctttagcataaacaggaatatagcataaacatatatatatgtgtgtatatatatatatttccttgcttttttcattatgtatattggataatctctctagatcaatatgcatatgttttcctcttttaacaatttgatagtagtccattgttcaaatataatttatttaccccaatttttaaaattaatatttaattatccagtttttccttggagtaagcatccataaatatgcatatatatgtacatatatgtctttgagcatttaggccagtatatcataagatataacaggtaaaaatcacaaggtaatgtccagtagtagaattgttgggtcagagtttgtggcttttaaatttgataaatatggcccagttgttctcaaaaaagattatgtcaagacaggcatggttgttcctacctgtaatcctagctacttgggaggctgaggagggagggttcgagaccaacttggacaacatagggaaaccctatcctttttttttttttttgagaaggagtctcgctctgtcgcccaggctagagtgcagtggcgcaatctcggctcactgcaagctccgcctcccgggttcacgccattgtcctgcctcagcctcccgagtagctgggactacaggcgcccgctaccacgcccggctaatttttttgtatttttagtagagacggggtttcagcgtgttagccaggagggaaaccctatcttacaaaaaaaaaaaaaaaaagatcttgtcaattatgttaccaacaactgtatggagattcctattgccacacaactttgcctatattggctaatattattttttaaaatcttgcattttaaaagatgtttaaaagcatcttatcagatgcttttctgataagaaaaacatcttggatttttttttttttttttttgagacgaagttttgctctgtcacacaagctggagtgccgtggcatgatctaggctcactgcaacctccacctcccaggttcaagtgattctcctgcctcagactcccgagtagctgggactacagtcgcatgccaccatgcccggctaatttttgtatttttagtagagacggggtttcactatgttggccaggctggtctcgaactactgacttcgtgatccagccgcctcgatcctcccaaagtgctgggattacaggtgtgagccactgcgcccggcctgagatggagttttgctcttgttgcccaggctggagtgcaatggcgtgatagctcaccacaacctctgcctcccgggttcaagcagttctcctgtctcagccttccgagtagctgggattacagacatgcgccactacctctggctaattttgtagttttagtagagatggggtttctccatgttggtcaggctggtcttgaactcccgacctcaggtgatccacccgctttggcatcccaaagtgctgagattacaggcgtgagccaccgtgtccagcctcattttggctcttaatgaaaaattttttgatagtttgttgagtttttatggcatatatttcatgggattgaatataggcatttttataatatgcttgttagtctgagaagagcaggtattattttgctgaatgattctggctcggtcttaggatgttgtaatcaagttgttggctaggactgcagtctagatttgactgggcctggagtatctgtttccaaggtcactcatgtggctcttgtcaggaggcttcagttcctccccatggactcttccatagggctacttatgacgtggcttctcccagaactagtgatatgagcggaggtaaggaagattggagagatggaggggagaagagagaaagggagggaggaagggaactggaagctgtagagccttttaaaacctaatgatagaagtgatataccatcacctctggtgttttgtagtgttataatgtgggagagtacacacaagagtgtgaataccaagagtgtgaatatcattgggctatcttgaaggctggcttccgcaggattttattaacttatttttttttttttcatgtcctcaagtagcaaagactttttggaggcaagtgataaagtgagtaggagtagtgcttcataaaagaggaactatagggttatggaaaaattaactaggagttttacttatgggagaaaatacaggagcagagaggagagaaaagaggtgaaacattattaaatacctttgtctcttagctgctagcaattgaagaagcatatttccctacttatcaatttaatctagcaaatgcacaaatgaattgattgtatgcatatagaagaagattggatttcatgttctttttttaattttttctgttcaaggatgaacattgtctcaattacagaaaatggtaattttttttctttatcaggccacctatttcaagaaatgggccttccattctgaaggcatatagaattagatggaggcagtggtatctaattctcatttaactacagcctttaataatttaatttctgtctgggtgcagtggcttacgcctgtaatcccagcactttgggaggctgaggcgggtggatcacctgaggtcaggagttcgagaccatcctggccaacatagtgaaaccccgtctctactaaaaatacaataattagctgggtgtggtggcatgggcatgtaatcccaggtacttggggaggctaaggcaggagaatcacttgaacctgggaggcagaggttgcagtgagccgagatcacaccactgcactccagcctaggctacagagcaagactccatcttaaaaaaaaattaatttctatcccaaccattcttggcaaaacctgtctctggaaattttatgtgctaaatctacttttttcatcacgcacgagacgcaaagtacaagataagcaaaatcaagtacctaccatcttgatatataaaggcaatgttttgtgatagttacttaacatctttctctttctttttttcccttttttttctgttctcctatttctctctcatttactgatgttactggatagtttatcctgaagagtccgaattttgcttattgcatctctgtgatattgttaaatatgttcttctgttctcagtatttcctctaaattgttagttatgtttaaaagttttatcagattaagtttgaatttatttgttgataagaataataagtggtgttaactcatttaatatactgatcttattcagtacctttgtgcaaattgggaaacagagccccctctgggtagaaaattaggaaaaggcacttattttaggtggaagatttagaacaggaacattctagatatattattttataattttctgttgtgataagaggatatactctataaaatttcagtcttttgaagttttctgaaagcttgcttatggtccagcatatggcctgtctttgtgaacaatcagtgtacatttgaaaagaatatacattctgtggttgttgggtgtagtgtagtataagttataaacgtggtacatattaccatacccatcttggttgatagcattaccagatcttctgtatctttattaatttattttatctactcatcttatgaattactccactatgattatagatttgtcagtttttcttgtaagttttgtcatactttatgcattttggaactctcttgttgggtacatatttgggattgttatgccttcctaatacatttctccttttatcattatgaaatggccctctttgtctcttgtaatatgctttttcctgaagattctgtctgataataatttggcactgtcagatttcttgtgcttactatttgatagtgtgcatttttccgttcatttactttaaaaaaattttttaacccatgtaatatcagtggcacaatcataaactcctgggctcaaatgatcctcctgcctcatcctcttgagtagctaggactacaggtgcatggcaccacacctggcttatttatttatttatgtatttattatttttattttttgagatggaatctcgctctgttgcccaggctggagtgcagtggcgcgatctcagctcacggcaagctccgcctcccaggttcacaccattctcctgcctcagccttccgagtagctgggattacaggcacgggccaccacgtctggctaattttttgtatttttaatagagacagggtttcactgtgttagccaggatggtctcgatctcctgacctcgtgatcctcctgcctcggcctcccaaagtgctgggattacaggcgtgagccactgcgcctggggttttttttttttttttttttttttttaatttttagtagagatggggtcttgctatgtttcccaagctggtctcaaacgcctgagcgcaagtgatcctcctgcctgggcctcccaaaatgtaggtattacaagagtgagcygctgtacctggcccccatccatttactttcaaccaatttgtgtctgtctctgggagactctacttcactgggtcttgccattttatctggattgacaatctctgccttttaattggtgtactagtccattatatctaattattgatatcattgggtttaagtctacatgtttccttgtattcctttggtttttttgttgttcttttgctcctttcctgccttattttgaaataattggattttttaaagtattggcctattagccggtagctttttattttttatttatttttatttttttttaaataagagacaggatctcactctatcacccaggctggagtgtggtggctttatcacaggtcactgcaaccttgaactcaggggttcaagggatccttccacttcagccaccccagaatttgggactacaggtgtgcactgccacagccagctaatttttaatttttttttgtagagctagtctctgactgtgttgcccaggctggtctcaaactcctggcctcaagtgatctacccacctcagcctcccaaagttctgggattacagtcaccttttatggccaacaattaactcctcattgttattattattattagtggtttctttcagcatatcttttatttgtatttgtgatttgttgttatttttgctttaaacagtcagttgtctttaaggaaaggtatgtttttaaaaaactacttcactgaatataattcacgtaccataaaattcacacatttaaagtgtacgtttcaatggcttttagtatattctcagagatgtacatattaccccacaaagatacctctcaccacttagccgtcacactcctcaactcccccctcccatagcactaggcaaccagttatctactttctgactatgtagattttcctattctggacctttcatataaatggaatcatacagtatgtggttctctggactggcttcttttacatagtgtaatattttctaggttcatccatgttgtagcatgtatgagtacaacatttctttttattgctgaatattattccattgtatggctatactacattttatccattcatcagttgaagaacatttgagtcatttctactttttggctgttatgaataatgctgctgtgaacattcatgtacaagttttcgtatggacaaatgtttttgtttctctcatgtatatatttaggagtagaattattggatcatatggtaactctttgtttagtttgttttccaatgtggctgtaccatcttatagcagtgaatgagggctctagtctctctatgtagttgccaatgcttgttatagttgtcttttgattatagccattctagtgggtatgaagtggtgaaatatagtctcttattttcacctatttactatctttgatattgcccttcttcctttggatctgattttatagtcatattgatttccatctgcctaaagaacattctttagcatttctttttttttttgagacggagtcttgctctgtcgcccaggctggagtacaatggcacaatctcggctcactgcagcctccgcctcccaggttcaagcgattctcctgcctcagcctcttgagtaactgggattacaggtgtgtgccaccatgcccggctaatttttgtattttcagtagagatggagtttcaccatgttggccaggctggccttgaactcctgacctcaggtgattcgcctgcctcagcctctcaaagtgctgagattacaggcgtgagccactgcgcccagctccttagcatttcttatagtgtaggtgtgttggtgaagaatatactctgattttgtttataagaaagtgtttttatttcaccctagtgtttgaaggatatttttgctgaatatagaattatgggttggcatttctttgaccatacaaaagatatcatttcattgttctctagtgtttctgttgagaagttaattttactcatatctctttctccctgttctttagattatatattttctattgatctatcttcaggttcactgttgcctgtctgccatttctaatctcatccaatagatttttcatttcttattgtattgttttggtcgtagagttttcatttttatcttttttatagttttcatttctctgatatttcccatctatatactcatcaagaatatatttttctttagttctttgaatgcattttcctttaattttttgaacatattttccattaattcctttaaaatatttatgatagtcaatcttaaggtttctgtctgtaagagttaactccttggctatctcagggttggtttcttttttgtttgtgtttttgagagagcctcactctgttgcccatgctggagtgcagtggcatgatcttggctcactgcaacctccacctcttaggttcaagtgattctcctgcatcagcctcccaagtagctgggattacaggtgcctgctaccatgcctggctaatttttgtatttttagtagagatggggttttgccctgttggccaggctggtcccaagctcttgacctcaagtgatctgcgtgcctcggcctcccaaagtgcggggattacaggtgtgagccatcacgcccagccatctcagggttggtttctattgactgcttttatttgactgtaggttacagttttctgcttatttatttttgcatgtttactactttttaattgtaggtggtatattatagagattctggattttgtatttttgtgaaaagtgttgattttaaaaattcttgcaggtagttcagttactggcagataactttgaacttgtgtaggcttggttttactctttgctagaatgatatgtggagaacccattgtttccttactttagtgtaactcaacctcacatttttaatcccttcaaaaacttgttggggcttgattttagtctttgttagggtgcacctagaatatgccttattctaggatgtggttcttactcttagttgaggcatttttgatatctcagctggatatctgagatgttaataaggtgttaatgtgatttctctgctctggctggtgggaactctaggtatacccagtactcctcaactctagtgtattttcctctcttaaccactctcttttaagccttgattggttttgccctacacatgtgcagcctatttcttggccaaggatttatgggggaatcctacatgtcttctagcctctctgccttgtggatttcagccacatcaactaccctgcattctgatctctgcctatttggcttagcacaatcactattcccttgttaaactcttgcttgctgggccatggtyatggcaattgttgccatatagaaagctgaggtatttgtagggctcaccttgtgagtttcccatctctcagggatgtcctgtcctgcctgttgtctaatgcctgtaaacagttgtattatgcactttattttatggttgctcatggtgggaaggctagtctggcatcagttactccatcatatttgttagcaaaagctggccttactgttgttaagcatttacttcctcctgtagtcttgcagattttctcagttctatatgtacctcttgcttttcttttttgtttgagacagtctcgctctgttgcctaggttggaatgcagtggtgcgatcttggctcattgcaacctttgcctcccgggttcaagcaattctcatgcctcagcctcctgagtagatgggattacaggtgtgtaccaccacgcctggctaatttttgtatttttaatagagatggggtttggccatgttgcccaggctggtcttgaactcctggactcaagagatctgcccaccttggcctcccaccttggtctcccaaagtgctgggattacaggtgtgagctgttgcgcccggcccctgtttattttctttgcctcaaaattggcagtaccctgttaacattttcttttttgttgtatagttctgattacttttttgtttttactacctcagctccttccctaatatttttgtaagctttcttttcttttaatggagtgttttgaggttgattagcagtatagtgctgcagaacagcgcttagagaattggtgcctcctgtcttctgactggtaattacagtgaagatctcaagattcttctgaaggggaggtagtttgtgctttcaaacatatgtaagagttggtgttgtatgtatcttaattatccagagacaggttgaggagtagaaagaacaccaaatctcaagttagaaaatctaggctctagtttcaccatagactagcgagttataggccagccatttaactttggtttgttcacttgtttataataggtaacatccagccccctgaagctcttaaaatttgtgtaatttaatagttaattagaaaattattggctgggtgcggtagctcacacctgtaatcccagcgctttgggaggccgaggcgggtagattacgaggtcaggagttcgagaccagcctgaccaacatggtgaaaccccatctctactaaaaatacaaaaaattagccaggcgtggtgggtcatgcctgtaattccagctactcgggaggatgaggcaggagaatcacttgaacctgggaggtggaggttgcagtgagccgagaccgcaccactgcactccagcttaggtgacagagtgagactctgtctcaaaaaaaaaaaaagaagaaaaaatcagtgtagtctgtagtcttttctttgaccttgcaacattaataaaactattcgtattagctgtaatttttttttcccagtatgagggatggtgctgatcactctgcagaatatgaatacttcattacggattgcttattatatggctctaacatatattttttgcttgatcaaaaatgactattagtgtactttagtctttaagatgcagtgtgctaatatacttagttacttactgagcgtaacttatagttctttaaaactatgtttacaagatatttactaattatattatttgtaatgtttctactctcctctaattcccttctatactgggaatcctttttaaagattcatttcatatatatatatatatatatatatatatatacacacacacacacacacacacacacacacacacacacaaaattatgtctttttttttttttttgagacagagtctcgctctgtcgcccagtctggagtacagtggtgcgatctcggctcactgcaagctctgcctcccaggttcacgccattcttctgcctcagcctcctgagtagctggactacaggtgcccgccaccatgcccggctaattttttgtatttttagtagagatggggtttcaccatgttagccaggatggtcttgatctcctgaccttgtgatctgcccgccctggcctcccaaagtgctaggattacaggcgtgagccaatgcgccctgcccaaaattatgtcttaatgatgggtatccattctgagaaactcatgttaggcagttttactgtgtgaacatcatacagtgtgcttatggtgtagtacctggtatagtctattatatacctaagctatatggtgtagcttattgctcctaggctacaggtctgtatagtgtgttactgtacggaatgccataggcagctgtaacacaatggtaagtttttgtgtatctaattatatataaacacagaaaagttacagtaaaaaaggataaaaaatgatacgcctatatagggcagttaccctgaaaggagtttgtgggactggaagttgttctgggtgagtcagtaagtagtgagtgaatgttaaggcctaggatattactatacactactgtagacattataagccctgtacacttaggctacactaaatttataaaaaaattttctttcttcaataataaaccccagcttatggtaacaattttactttataaatttttattttcttttgaactgtttgactgttttgtaatacctagcttaaaacacaaattatgcaggtgtacaaaagtattttatttatgtccttattctataagacttaagctttttttctattgaaaacattttaaggccaggcatggtggctcacacctgtaatcctagcactatgggaggccgaggtcggcggatcatgaggtcaggagatcgagaccatcctggctaacacagtgaaacaccgtctctactgaaaataccaaaaattagccgagtgtggtggcacccacctgtagtcccaagctacttgggaggctgaggcaggagaatcccttgaacctgggaggcagaggttgcagtgagctaaaattgcgctactgcactccagcctggacaacagagcgagactctgtctcagaaaaaaaaaaaaagaagaaaatattttaaatttaggttttccttttttttgagacagggtcttgctctgtcacccaggctggagtgcaggggcatgatcacggctcactgcagtcttgacatccctggcttaagcaatccttcagctgtagccttctgaatagctgcgactccaggttggcgccactgtgcccagttagttttttgatttttagtagggatgaggtatcattatgttgcccaggctggtcttgaactcctgggctcaagtgatcctctcgccttggcctcccaaagtgctgggattgcaggcgtgagccactacacgtggccctatttttgtttttactttttaagctttttcattaaaaatgaagatacaaacctacacattagcacatacattagcctagacctacacagggtcaggatcatcaatatcactgtctcccctctccacgttttttctcattggagagtcttcgagagcaataacatgcatgaagttgtcatcttctgtgataacaatgccttcttctagaatacttccggaatgatctgctgaggctgtttcacaatgaacttttttttttattagtagaaggagtacactataaaataacaattaagaagtcacagtatcgtaaatgcataaaccagtatcgtagtcatttattatcattattaactattatgcactgtgcataattgcatatgctatattttcatacgactggtggtacagtaggtttgtttaccccagtatcaccacaaacaggtgagtaatgtgttatgctaagatgttaggatggctacgaagtcattaggtgataggaatttttcagctgtattataatcttaaggaacagacatcattgtatatgtggtctgtctttgaccaaaatgtccttgtgtagtgcatgactatatatagttttgaattttggaggaaatctatccagatttgtacctgcaggtatcagaaagtttcatagcatctttggctttgtgaacattctctttccatggaagttatgttctcaaacttgtattccaagagtcaaacaggtgaagctatctattggacattcaaacttatttgttaaaatgcaagttattttattctgtaaggatctaaagtagtagttcattagtttcctttagggatacaaatacaaatagaaatggaattaattttttctcattgctttttttctgctgtgggcataaaaatattatgtctaacaaatatatactgacagtatgattgcctgggttggaatcctaggttcgctacttattattagctatgagatttagggaaaattactgattcttattaaaactttttctcatctgtacaatgggttcactagtagtgataccttacagttactatgaagattagatgaggcacagttcgagtaaatttaagaattcaagtaaatctatgaattcaagtaaatttactctataaagagttattttcagtagtctatgtgcaaaaaatatatagtttttcagcttaagtttcaggaatcttttggcaatttattttcagtttacttagcaacttgttcctgagacagcaaatagaatgagaataattgagtgaaaattaaatgagattttaatgattttcttcaggtttcaaatgtgttaagcctattttccaagaaaaaaataagacaacagtaatttactagttgttggtgtttactaataaacgtatttgcagtctttctcagacactcaatacattttccaggccagtgattccaaaacttacctcatcctaagaatcatctggggtgcttctttaaagtacagatttctgggccctaccatagtctttcgaggtggggaccagtattttatactatctaggtaaattttgtggtctaagagggttgaaaacacagttctggggaaacaacagtgaatgtggcagacatggtttctgcccccattacttttatagtgtcttagttcttcttttgagtcattaaaaataaattcgtttttctttctttctttttttttttttgagacggaatctcgttctgtcgcccaggctggagtgcagtggcgcgatctcggctcactgcaagcttcgcctcctgggttcacggcattctcctgcctcagcctcccgagtagctgggactacaggcatctgccaccacgcccggccaatcttttttgtattttattagtagagatagggtttcaccatgttagccaggatcgtctcgatctcctgacctcgtgatccgcttgcctcggcctcccaaagtgctgggattacaggcgtgagccactgcgcccagccttttttttttttttttttttttkgaaacaaggaggaaaaggaaagtttatagttatagaaatattctttgtagttaagatgtgaaagtgggctttattgttaaataagctattttttaaaaaaattactatttgctaaagaaacataaatctgaaatcttgcagcctgattttagctgttctgctgatttaggaaaaggtcctttggggaagcaaatcattttggttggttgggtacaggttttgcaaagttagcatcaggggaacaaaaatgtctgggtgataccaaatatacaaatgttgtacgtggttccaaatatggaaatggttttgtctaaagcagccactgaagagaaattatctaaatattagcccctttaggaaagtggaatgtgttgtctgatttggctctcaggcttagtatgaaagtttgtgcaaaagtacagcttacaaaatgctatttgttttattaaaaggattgataggaagttgacatacttagttaatttaaatttggaaggagctcagcaaacatctttctagttgtattttatgtctccctccaccttcttttttttttttaatcaaatggggaaactgaagcctaagaaaggatatatggttgcatagcccacctggacagctccagtctctttttttgtgtgtaaatcccattcagaaattaaatttcaaaattaattttcaattacattttgattacctgttgactaaatacatttttttttactgtaatgcaactgggttgtaactcaaactcatgcataagatgaaaaaactacaatattaaaaatcattttgatctacttagaacaattttctctttatattttattttctagggtgctagcttacgataaaaagcatctttgaatattcaataatgatatttttcctgatattgtatttgccacatctttattttttattgatgatatataagcaatgacatagtatttggtttttgaggtatartcagatgtcaactaggaagcctaaatgaattgtattgttgatgcagtgaaatgatttgtaggataacttattttatagtatttttatttttcatatttatttttaaagaaatatagattatttacatgtacaaacaaatatatatattctctacaaaaagataagaaaatttaaaatttaacagactttatcagaaatgtttggagtgttaggttttcttttcatttactaagttggaatatgtaaaaaaaaaaagaattttgagatgaggacaagtgattgtatacctcactcagtttttttagaacacaaatatgatagtggttatatcattgaaaatcaatgaagcctccatcaatatggtgcagtgcctctgcaccactgatttatatatatttaatgaacttgctgttctaatttcaggtaactgaagcaaactgcatctagcactaactggtttacttataaacaattcagctcattaaaatataaatatcttgaaatttaccaatattagatataatttctttataaatagttctactgtgtttacttcctggtgttaactgacatgtttctaaaaaaatcatcatattttggtactgtttcagataatgttaccaaaatatgttgttttatttgatcttatttcttgctactgatctagaatggatttggaatagaagatatgggacaaaaaagctttcaaaagtgatgggatttatgaagtatgacatgccagatgctgtatttttgagatctattggagcataagtgaggaccagttaaggatctatttctatattctttgggattaggaatatagtttttaatatttgcattttttaaaaaatgtattttaaaatagatttattttaagcatgtctattatgttttattgaaaaaatgccacaagataatattaaaaaatgttttgacaaaagaaaaaaattatacataatactttcacagaggagttcttttaatktttatcttcttatttgtatgtgtgtgtgctgtgtagtctcagctgctctggaggctggggtaggaggattgcttgagcccagggggtcaaggctgcagtgagctatgagtgtgccactatattccagcctgggtgacagagtgaggctctgtctcaaagcaaacaaacaaaaaacactttggagaatgctgttttaagttttgactcagtaactaattttgtaagaaatttcatattactctaccattgtactacttattattattattttttgagatggagtctcactctgttgcccaggctagagtgcagtggtgtgatcttggctcactgcaacctctgcctcctgggttggagcagttctcctgcctcagcttcccgagtagctgggattacaggtacgcaccaccatgcccgactaatttttgtatttttagtagagacagggttttgccatgttggccaggctagtcttgaactcctgacctcaggtgacccacccaccttggcctcccagagtgctgggattacaggcgtgagccaccgcacctggcttgcactagttatttattgctgtctaacaaattatcctaaaactaaatggcttaaaataacaaacatttattttctcacggttcttgtgcatcaggaatttgggcatggctgagctgggtagttttggctcagggtgtctcatgagattgcaatcaagtttcagctggggctctattcatttgaaggcttgactggagttggaggataaacagttgaccattaaacaacatgagtttgaagtgtgtgtccacttatatgtggatttcaaaaaacaaaacaaataagaattgaaaatacagtattcacagtatgcaaaaccccatgtatatggagggctgactgtattaagctcactcatgtggtttttgtcaggagtcctcagttctttactgttattttttggctagaggtgtcagttctttgtcacatgggcctctcctaaggatttcttcagtgttcgcacaacatagtagctttcttctcctcaggtggatgattcaagagagagacaaacagaagccacgatgtcttctatgaacatcattcagacaccatcgtttctgctgcattctgtttgttcagagtcctaaatacagctcacattcagaggaaggggaattgggcttccccttttgatgaaagaagtataaagaatttgtggccatatgtaaaaccacaccaaccacatatgtatatttatcactggaataccttgaatccaagagggctcccagtgatttttgtctcctactttttatgtccttgcttagtttctccctgattgtatcagggttgcttgtataaccaatcgaatatggtagaagtttctcatttccaaggctaggtctttaacaaagactttgtggctttccatgtggttactctctatgttcttgggcaacttgctgtcatgaaagacagtttatgtgtcgtcagcagccttatgaagttccgtgtggttaagaactgagaccttctactaaccgccaagtcagtgagccatcttagtcttcagtcccagtcctgtcttcagatgactgcagccccagctgatatcttgacaaataagctgctcctggattcctgacactgagaaattttgtgagataataaattgtttattgttttaagctgtcaagcttggtggtgttttgttatgcagcaacagataactaatagaatcccttcatctttattaaaacaaaaggcacattgccaaaagctgtacacatattagggattttattttttttttaataatagggagaaatttcttcttttttttttttttttttgagaccgagtctcgctctgtcgcccaagctggagttggagtgcagtggcacgatcttggctcactgcaacctccgcctcccaggttcaagcgattctgctgtctcgctctcctgagtagctgggactacaggcgtgtgccaccacacctggttgattttttttttatttttagtagagacggggtttcaccgtgttagccacgatggtctcgatctcctgaccttgtgatctgcccgcctcggcctcccaaagtgctgggattacaggcgtgagccaccgcgcctggcaatagggagaaatttctaagggcgcatgttcaacaagccattgtcattagagaagtggcttttgttcagaggcatatgaactacttttattcagaagtaatcaagggggaatctagtagtattgtaaaggtaaacattttaatatcatgtaagatgtgataataatttagtgtttttagtgagaatcctgtaagcttcctgtcattgactaaggtctggattacattctataacgcatgaagtagcaatttgagaaactaattctttataaaaatactttcaccttgttaatagatttgtttctgtaagtaagaaatacagtggagttgaatcttatgtggaatttgtatatacgtattttttttttccagagacaaaatctcactctgttgcctgggctagagtgcagtggcatgatcacggctcactgtaacttcaaacctctgggctcaggaacccttctgcctcaacctcccaagtagctaggactataggtgtgtgccaccatgcctacctaatttttttttttttagatgcccaggctggaatgcagtgaagtgatctcagctcactgcaacctctgcctcccaggttcaagtgattcttctgcctcagcctccagaatagctgggactgcaggcacgtgccaccacacctggctactttttgtatttttagtggagacggggtttcaccatgttggccaggatgttcttgatctcctgacctcatgatccacccgccctggcctcccaaagtgctggtattacaggcgtgagccactgtgcctggcctaattttttattttttgtagagacagggtcaggctttgttgtccatactggtcttgaactcttaggctcaagccatcctcctgcctcgtcctcccaaagtgttgggattataggctagtcactgcacacagcctggaatttgtattctaaagtcatgtaaagcagaaaatatagtgaagattacccttaatattaaggatcagaaattgtccatatgggtaaataatttttcattaaacctagcgcagccagttttccttccagcatagtaataaatcagtattcctcacctgaacagcagatgaagtaattggctcttgttttggcattatactgaaaagacttacctttaaacactgtcatatatagtccaataagatgcttgtcctaggagaggcattgaaactgagtgcaacagagggaacagcagagtgacatctctcattttatgattactctggggtatagagatagtcactgagaggagaggctggggaaatgggaccgctttctaaaaatgtatctctgtctctttttgctgaacatatataagtgaatttgtgtaagtatgcacatgatgtgatgccattgtgtaatgcttctgaaacgtaaatacttgtctttttttgggaaatgtagactttttatttctttcattatgatgcttagattatttgatagcctatttaatggactatgggataagaaagattgagttttgttaacttacatatagcacaatgtgggaacctctgttcataacgagctgtctatgtcattaaggaaagtttcagtgatagtacacaaccatacacatttgttgaacatatgcattaaagacagagttatattgaaaaaagtttagaatagaacttctgcattttggagtatgctacacttgtctggaaaagttactgtcagataatgttttgttactcttggaacatgcgttattgtacatgaaattctgaacttttatagagtatgagctaagaagtgcttttcccattactaaggaggctgaatattcaagagtgatcatggaagaattttaaaaaatagtatatttttatacttcacagtgtcttatggattgcttaccatttaacagttaagctggaggatggaaaaatcttgatgtaagtggtaggaacttctgccaactggaaatcaattaaaatgaaaataaagcaagtataaagttttagtgttactgggaagataccatttgactcacaaaggtgtcattcatgtgctctttctggctatatacctgtggcctaaagctgtggtcttttggggatttaattattaatacagaaatgtgttttacaaaatagagccatgtctattttgatgccatatagtttctttttaaaatgtataaatgcccttgcgtttttttgggcaaaatcaatcatgctgtcttgtatttggaggtaaatgacaacaggatattcacttccagtttaagtagtagcctacagtttctcttgaatttagtttttggcttggttaaaccattagtgtatttgacctggactagaacttgattttaagatgtcatcagctgtgagttcccaagtgactggctctcacatttcactgagagagaacaggctatttgacttgttagtttgaagaaatcatatgcaactttctggtactgcagaagttgttcagaaacataacacagagtactaagaagctaaaaatttcctgtttaaaactaacggtgtatggagtaatttattttgtggaatctggagggattggtgtttgagatggaaatacatactgatctgacagtttcttactcttatttacctctttcctcagtttttggtgataattccaagttatattaatatatagactgtatcaagccactatgaaaattttatctaaatgcagttccagattttgcagtattttagtgcatttttttttattgtccacacacacccacacacaggctagaatgtttgacattttctggtcatcaattgagacactgaaatgtcttgtttgataaagttatattttgtttcaaagatatttttaatagactgttcctaagcatttgaaccaaacagcagctatgagcttagggctttagggcaagatttcctagaatatcattcatgttactcctagtttacatcagaatataggagacaaactataatttagtttcagttaatactttccaaatttttacccctgtggcatttgtctgagaaatactgatgagtcacagagattccctttctgtccttaactagaacatatgtagaataggaaataggagaaaactgttcatgcatttccgtgcttttaggtttttttctgctcttggcagtgtattgattctgatgctttacttattttgtaatttttattttatgacttcctgtgtacaaggagttgatgatgcaaagttgaatcagaggtaatttttgccctgaggtctcattgctaagtatggaagatagacaaacaaaatgttacaatacactacaataattgttatgatgagtgttgttggaaccatctaaggagcataatttagatggtagagggcagtgggaccaacaaatataccagatattcaaataagaaatctgaggtcatactatatgtactaggcttatttctaagccctacgaagttgtgcccataactgtctccttaataacttccaaattacagattttatcctattccccttgtagtctatgtcttccttatctctacttggacttttttttttttttctttttgaggtagggttttgctttgttgcccaggtgagagtgcagtggcaagatcatggcttcttgcagccttgacttcagggctcaagcaatcctctcatgtcagcctcctcagtagcaggaactacaagtgtgtgccactacacctggctaatttatctttttgtagagacagagtcttactgtgttgcccaggttggtctcgaactcctgggctcaagtgatcctcccacctcagcctcccaaagtgctgggattacaggtgtgagccacgttgcctggtccacttggactatttcaactgtctcctggccgaggactgcttcaagcttaattaacatggatactgcttactaccgcccactcctcccaaccctccaaaaaaaaamccccaaattcagaaaacaaaacaaaaaatagtcttccccttttaaccatgatacttcctgcttaaacttctttggtggtttcttgtgtcttccaccaatgcttctcacattttaaaaagtaacattaacaatggaggaaaacaaatttgtacccctagtttgtctggaggtgcaactagaagtgtcgctttgaaagcccctttgaagttttggttgaccttaaaaatgcatgtaagattttaattttttaatattttctgttagtattaaaacaaaaagtatatgccttcctaattttttatctcatacccctaacctttgcataaaattgatgttttaggaagacgcaccacgttttcctctggctttatgtaatccctgacacacagaccccacatcatcctgtagttcagtattttcaaactgtgttgcctgagagatttcaaactgaaactctgagagattgtttgaggcagctgctcattgtcatcccttaaactagagcagtctccatttatctgtttacatattaggtttctgggtaacatttagtatgaagaaagagttctgttattaaagaaatataagcctgaaaaatgctactgtaatatatgctaaaaatccaaattccttagcttatcatgtaaagatttttctggtctggtctctgcctattttacttttctttcttctctctctcctcagcttccagcacctttcctagagattgaaacttgaaacctgagggtgaaattaattttgtttggccctggagtgttggcttgcacagcatttaaattaaaacaaaacaaaaaatgaattagttgccaacatgtaaaaatgaggagacatcatgtaaaaatttggatctctcagttttgttgaaaaactgctagatctggtaacattttggctccatattctcaacarcatggagttgatgagtagccatcattaacatgagatgcattctttagttggccagtttgatgaatgttggaaattgttgatgctttgaatagaaggtataccaataaccttctcaaaaggagacttttcctgttgttgtttaaaaagtaactttctacatgccatactattcattgcaggtatactgtacttaatctttgctttgtaagtgttagttaggcctaagttaaagaaattagacttataagtaaaactgctttatgcataatatttctctagtggatgatttgttaataaaatcatatctagccttaggtcaaatatttataatcattctattatttaaaagaaatttttttaaattataagaacagtttttacttatttaaagttctgttctgcccagagagcatagtataatatggaagtaggtcttctgattagaatttatttaagtagtagaaaattcaagccagcttgggtagggagaatatgaagtgagagaaactgaaatgtgaaagattaaagttgcaaacagttttggtacaattaaatatatctattccaagtggacaatataaacttatgcattaatgaaatgatatggtcatattatttgaaatttgcagaaatggaatcatactatacctttacctttttttttcagttagtggtagattttgagtatcagcatatgctttacctcctttttagcaggtaatatttctttatatggatattgcttctgttgatggaaatttagaaatatgaaattttgatagctctttctaatttttttttaaagtgcactggttaattccctgcaacagtgtacaaaagtgcctttcccccaccacacttgcgtaacatgcaggatttcataaaggctctattagttttaactcactggggttacaattaacacctcactgcctttcatatttgtgtttagcagcaagtctccaatatgattgtaagaatacagacataaagcattttttttcttaatgtttgtgctttaagcaaacacacaggttaaagttttcatttaacattatttaactttctgagcaataaaagtctgaaagaaaatttagaaatacaattgtatgaaatagctattgtttgtaagcactttatccacctcttatttctgtaaaagagtcatattacaattactatgagatctattctttgggcagctggaaagcaggacaaggaaaaatcgttctcctcttgtctggtagaaagtacattgtgccctctggtaccagacttgggcttattcaaaggctaatggattccacacaggtgagtcagtcttttgtgttcttaccaggtgcattattgattttcatgatggtagcctaggtgttctcattcaacagcagctttagcaaagtctccaaaatatcacaaagaaaaccaaagattttgcacattttgggtgcaagaaaatgaatttttctcaactcttttggccattgtactttttttcttgctagacgcttatgaataactcctttggaaaatgtattaatatgtaatgygtttacttctttgtttttgggcatggattgtgtgtcatgatctatttatttaatttagagtgtgaagcaacgtgtactggcttgtggtacttttttttgcccacagactgagttaagttagggttggaagggttccctgttgtagaaggttatccacataccagattctaggaatagtcaagttcagatagtcatctggggtcaccaatcatttgatattcacttggcccttaaatcacaataccacaatacatttgagttttaactaagacaaacatttcagggtaaccttcaagtaggaactctttgaacagtgttctctaagtgaaaactataatttacctgagagcccttaataattgaggagaagaaagtgacttttaaagtttgggattatctaattttcaggttttcaaattgtttatttttcaatccttagcactaaggtagtagcttaaactatgacagcactgaaaaatttatgttgatgcttattaaatttagatattttcaaaaagttgcaaagcagctctctttgtttaggttatatttcctttattgcatgtttctttttagggttatgttttccttttacagtcttcactgctgcttttattcaacaaatatttgggtaagactatgtgccaaacatattcatagttacagaatgatcttatcttttgccctagtaattaggtttctttccttatcaagtgtaacactaattaaatgtgttatgagctgctttccctttcttatatcttgttttgtaaataatggttttgtttaaatgtgttatttagttatttaacctattttgtgtggtttgacagtttttagcatatataaattaatgtcccggctgtaagtgggatcaaactatctagatctgtgaactggtacgttctaattctagtgctttatacattgcaacattaaaaaatcagatattcattttttctttttcccatgttttactgattctatttttcttcaagtttcttccttcttttcctattacatcaatcatctgctcttttaacacagcaaattgctgctttgatttgagtcagtgacttgaagtttgggacaccataatcatctctctttgtttagaaatctcatcccaaaatctcaggaggaaaaaaccctaaagaattatttgatgtatttattgctttctgggcaagactcagcttcatgaaaaaatttttagggaattcttttctgtaatatcttatgatggattataggtggtttcaaatagattatcaggagagtgaatgatgggaagtatgtaaagacactgtggccaggcacagtggctcacacctgtaatcccagcaatttaggaggtggaggtgggaggatcacctgaggttaggagttcgagaccagcctggcccactaatgtcatctctactaaatgacatctctactaaatgtcatctctactaaaaatacaaaaattagccaggcatggtggtggatgcctgtaattccagctacccgggaggctgaggcaggagaatcgcttgaacttgggaggcggaggctgcagtgagcagagatcacacctctgcactccattctgggcaayagagcaagactctgtctcaaaaaaaaaaaaaaaaaaaaaagacattgtgtggtaaaatgattatgatattctttttttttccttcccttacattatggtattttgtcagtaatttttctatatgctaaaccaaaaactaaattgtgactaccacttggccggaaatttttactgagctcagtggtaaatttatataaacaaaataaagaaaacataatttcttgtagctcagtttgcagtttggtttatcagttgttgtatagagatagcttattatcatgtatggactttaaagccaaaaggaaccttataaatcatctagtacaacttcttaattttaatagataaaagaatatatttttcttttaaagctgtttcagcattgaaacactgcagattcatacctggctttttctccagttaaactaaattagggaagttaagaaaaaagtcatgcgtagggagttaatttacacaattttcattggtgctaatggaaatttcttactgagattcaaaatgatcacacttatctttatcatttatctttaattaatttatagatgaaatggccattgctgcattgctggttaggactttttaataaatgcagcagctacaacctatatcattttaaatgaataattaaagtggagtggtttattattttccagcataggtacatataataattcctttgaatcatatgctctttatgctggaagagatctcagagaatatctagtccatatttttattttatagatgaataaaatagggtacagagtgattaagtgacttgtctaattttccctgactaaagcattttatgtattggactccattgtaatttagtaaggttagagaccttaatgttctttcagttcaattttcactcggttaaatcccagtttatgaatgtgctgtgtgtatcgtctgccttcctactctagtgtaagtcatcaagcagtgaaaactcagaatttttggtgagtaataattgagcacaattatttctctaaacctatcattatctttaatttggaactacaatgaccaggaagcagtgttagtctaagcataatttaataaatccatattaatccacctggcggagtataacattttaacataccttttagatccacagtgatggaaaaatgattaaattacttattgtcaaaacaaagggctgctttagatatggttatttaataaactgttttgcttcatgtaaactagttttgcttaagcttcagagatatagtcacatggatttatctttccatgacaattgcttactgtctgggtttatgtttaatgcaggtattggtgacagtttgtaattcttgagtcattgcctagcatggaaaatagttgattttgctagctatacacagtactgtcttttaatgatcactttttaatgcggttaagcctgacttaattgttctctttttagagtgttatgtaatakttgttartggtatgatatatctgttaaactacttatatatgtaaagtgaaaagtttatgtgtacatgttattttctgcaataatgttgaagctcaaaaataaaaggggttatatacttatgtacttaaaatacataatcctggtgtagccctctttttctggaagatcaatgccatttttcttcagtacattctttcttttctcttgtttatgattttgtgtctgctataccagtgactgtttttgtctatcagatagtgaagctaattgtcttaaagcttatcacaaacagccagaagttaatgggctatttgggtttggaacccatacttttggtcccttgttttaccttaagtatgaagaagacattaaagcattagagttgaattgaagaaagtagggaagatttgagacagatttagatggtaaattgagaggatttggtgattctgtggctgtgagggtaagaagaagcggtctaagataattctcacattctggattttgatgcccargtgaagaatgtaattttcaagattcagtgaaatctcttctggaacaaggcaaggaatgtgtatacgtaaataaataggcaaataaataaattarcaaatggtagtagctgaaatggtaggtctttggagtctggcctgattataaaaggaagtgtaagtaggagtaagctgtaattaggagaaaaaggaaatataaaggattggagatctggatgagatcaaaggggcagtgtgtataatgagggactgagagctcccagttcagaaggttgtgaccagagtttggaatataggccaggcgcggttgctcatgcttgtaatcccagcactttgggaggctgaggcgggtggatcacctgaggtcaggagttcgagaccagcccggccaacatggtgaaacccccgtttctactaaaaatacaaaaattagctgggcttgcggcgcatgcctgtaattccagctacttgggaggctgagacatgagaatcacttgaacctgggaggcggaggttgcagtgagccaagatcgtgccactgcactccagcttgggcaagtgagccaagatcgtgccactgcactccagcttgggcaacagagactccatctcaaacaaacgtctcactcataagtgggagttgaataatgagaacacatggacacagggagggaaacatcacacactggggcctgtcggtgggttgggggctagttgagggatagcattaggagaaatacctgatgtagatgacaggttgatgggtgcagcaaaccaccatggcatgtgtatacttatgtaacaaacctgcacgttctgcacatgtatcccagaacttaaagtataatttaaaaaattaaaaacaaagtttggaatataactaaacagtctgatgctatgtctagtgctggagaagctagtgacaagaaagctgtataacacacacaaaacatgtttggaaaattaaaaaacaatagagctttcataagattaaaataatcattggaaaacagaggcctacccagactagattattgatgatggcttctatttatggttagactgaatataaaaatcttatacctctaggcaatctaagacatacagtactgtgttaaaaattttgagcttttatttgtcatatggttgtgactctagcagaggttggatatattctttattaaagtgtagaatcctcaaaatctgcctctataaatttaaaacctataatcttagaaatatataaaatcttgacttataaaattaaatgtataacttaaaaatgattaattcttttaaaatgaaaattttaactttctaatttctcttttaagtgatttttaagaagatgatttagataatgtaaaaggattgcatctgttaaataacaaactccactgggtgcagtggcttacacctgtaatctcagcactttggaggcctaggcgggtagatcacaaggtcaggagtttgagaccggcttggccaaggtggtgaaaccctgtctctactaaaaatacaaaaattagccaggcttggtggtgggcgcccataatcccagctacttgggaggcgtagacagagaattgcttgaacccgggaggcggaggttataatgagttgagataaagccactgcactccagcctgggtgacagagcgagactctgtcaaaaaaaaaaaaagaaaaaaaagaaatacaaattactcccccttactccttttttgggtattcgtcttgttttaaaaatctttttgtggcctggcgtggtggctcaggcctgtaatcccagcactttgggaggccaaggccggtggatcatgacgtcaggagatcgagaccatcctggccaacatggtgaaactccatttctattaaaaatacaaaaattagctgggtgtggtggcgcatgcctgtaatcccagctactcgggaggctgaggcacgagaattgcttgaacccgggaggcagaggttgcagtgagctgatcgcgccactgcactccagcctggcgacagagcaagactccgtctcaaaaaaaacaaaaatctttttgagaaacttttagatatgggacaattaatgaatatctaatactattcattgtatgactagatttcattttggggaggcttattaatataatttaattattttgaacaacaagatgaattgggtaggtgtttgttagaacttcaaatacattatagttgaaaacttgaaacagtaatacaaatgcaagaataaatattcttttagaaataggaaatggtttcagataatatggagaaaatataaggaaacaattcaataataaaaactattgtttgtaagtaaatcaagtttgagagtttctgctttaataagttgttaaggtttggattcagagatctgtttctcttatagtaaacatttttaatataggaacagctcagggaaatggtttccatatgcttcttgaggtgttaacaatacacttttggattggaaatgcaatataaacctaaactacattctggaaggcaaagtggaggagcatttcaatggtaatatgtacaagaaacccttgtgctttgtagatttgtgacttatggttttgtgagttcctggaacattcaggttactctgcaaacctgtagtctaacataccttgctttgtctggccagcttactgccttagtctggctcagtatttctttttactacagtttgtccatctgggatcttttttggatactctacacttgtggggagaattgaggccagttttggggcctattttaagggacttaagatacatagaggatggctgaagaaagtaaataaaatccaagtggtaattatatctgtgagacccttccgggttttctaattgatcttggaggcaagaacagttcagttttttttttaatttaaatttaaattttatttatttatttattttgagacggagacttgctctgttgcccaggcaagagtgcaatggtgtgatcttggctcatcgcaacctctgcctgctaggttcaagtgattcttctgcctcagcctcctgagtagctgggattacaggcgcatgccaccacacttggctatttttttgtttgttttgagatggagtctcactctgtcgccaggctggagagtagtggcacaatctcagctcactgcaacctccgctccctggttcaagtgattcccttgcctcagcctcccaagtagctgggactataggcacacgccaccacacccagctaattttttttgtgttttagtagagacggggtttcaccatgttggtcagattggtctcgatctcctgaacttatgatctgcctgcctcggcctcccaaagtgctgggattacaggcgtgagccaccatgactggccttattttttgtatttttagtagagtcagtgtttcgccacattggccaggatggtttcgaactcctgacctcaggtgatccacctgcttcgacctcccaaagtgctgggtttataggcgtgagccaccgcgcctggcccagtttagttttttgaattatggctaacttcattcctgcttgaggttgagtgtataatattattgtattactcatttattaagagctccggaatgtgtctgctcataaataggtggttgtcttcaatagtatttgtaattttgaagagttacatgtttaataactttctccctggttgacttttaaaggtcttggytgacttcttaaaagttttgttttggttttaaatgatatgttctacagaaacacaaggacaaattacaaaggttttaggagttatatctctgaacaggatttttctaacctttctttcaggtaatatcaaaatctttcaaatggaggtggagaagagggagatgagaataacctgggagggttttaaaaattactactacttatacagaaatgtttactgtgtcctaggcataatgctgaatgctctttattcgttatctcatttaatctttataataactctaattggtaggtattgtaaatatccactttttatggatgagggaattgaggcttagagattctaagtaacttgcctaaggaaacaaactagtaaatggctcagcctagattcagctaggcctcattgatgacaaacctttgcttctgaatcaccatgccataatacactttgtataaaccctttttgtttttctcctttatatcagaatgtggatgatggcaacgctatgtgcattttcaaaaagttaccctactcctaagattataatgttgagtttacatttttaagttatttttttgcatacaaaaagtgtatatataatatgtatagtttaatgaataatgaaaacaaatcaaatgcttgtgcactaaccccctgggttgagaaatagggtattactggtaagtttgaaccctctatcttttttctattatattttctcctcctcccatagaaatgactacttctttgaattttgtcattctttttcttttcttcatagattggccagatattgttggatctctaaacagtatactatttagttgtggattctatataagtgtatacattatatatttgtgttcttttttaagatatattttaaaaaatttgaaacaggatcttgctgttacccagggtagagtgcagtgggacaacataactcactgcaactttgttctcctgggctcaagtgatcttcctgcctcagcctcccatgtagctgggaccacaggcatatgccatcaggcctggccaatttttttattttattttattttttttcagatatggcggtctaactttgttgcacaggctgatcttgaactcctgggctcaagtgagccttctgctttgacctccctaagtgttgcgattataggtgtgagccactgcacctggctaagaattattttactgtggtaaaaaacacacaacatgaaatttaccattttaactgctttaaaaattaaaaaaaaaatttgttttttttagagacagggccttactccgttgcccgactggagtgcagtggcaccatcaaggctcactgcaaccttgaattcctggggtcaaatgatcctcccgtctcagccttctgagtagctaggactgcaggcacatacatggctagtttttaaaatgtgtttttaaaatgttttttttgtagagacagagtcttgatatgttgcccaggctagtcttgaactcctgaggtcaagcaatcctccttccttggcctcccaaagcacgggggttataggagtgaggcaccattcctggccaccatctttacctttatttttaagtgtatagttcagtagtaagtatatttacattgttgtgcaatgaatctctagaactttttcatcttgtaaaactgaaattctatacccattaaactaattttcccttcttttctgccctttgcctttgacaatcactttttaactttctgtttctgtgattttgactggatacttcatacaagtggaattatgtagtatttgtctttttgtgactgccttattcactttgcataatattcttgaggttcatccatgttttagcatgtgacaggatttccttttttaaaaggtgcataatatttcattatatatatatagtatccttatctattcatccatcagtggatatttgggttgcttctgcctcttgactgttgtgttaatgctccaatgaacatgggtatgcaaatatctctttgagatcctgctttgaattctttggaatatttacccagaggtgctggatcatatggtagttttattttaaagttttttttaggaatctttacactgttttccataatgattgcaccattttatattcccaccaaaatgcacaagagttcttaatttatatatttgttattttcatatattctgttcctttcacatattcttttcaaatattctgttctgctcaaatatgttttgaaatattaacccagcagtgggattgtgggatcatatggtagttttattttcaatttttttaggaatcttcatactgctttccaaaatggttgcgttattttatatttctaccaaaaggcacaagggttcttaatttgtatatttgttcttttcaacttactttgttcattcagcattgtgtttatgagttatatttttgatattcacaatgttaatgcacatagttgtaatttgttcatttccactgttatatagtattccattgtaggactgtactgcattttatttatccattctgctgttaatggacataggtattgtttccaaatttcttttttgctataggaaattatactgctgtaacattcttgtatatgtccactggtgtatatgagttatggtttctctagtatatatacgtagaataaaactattaggtaataaggcatgtccatttttaactttactaggaaatgccattttgttctttaaagaggttgtacagtttacactcctatcagcagtatggagggtttttttgtttgtttgttttgttttttacatctttgccagcatttggtattgtcagactttaaaattaaaaaaaaaattcagatgtgaagtggcattttactgtggttttaaaatgcatttccctgattgtttccccttttcatgctttttggtagtttctgtttcctcttctgttaatgcctgtataaggtgagaatttgtccactttttactctcccttctgttacttctttttcacgaatttatggtagtggctcatacattagtttgcctgcttttgcctttgtccctatagtctgctttcacacacagtggccaagaatgagccttaaaataagtaatttatgttctgccacttctgtattctaaactctgtagtggctcctcatttcatgcagagtagaagccaaagtccttatagcgtcccttctgtcttacatgatcattctccagcttctctgatcttattacaatccttgcctacctcactctctctactatcctgagcacttttcaccctgccctacattttcttctttccctagctcttctcttctaacactacgtaatttatctgtccatgttagtatataggctctatgagggcagggatcattgttttgcttattgaagtattcctaatgcctcaaacagtgcctgctacatgatgggcacctaatgaatatttattgaattgctttgaatttggtgaaaaagtgtccattttctatgatgggtaaattttctttgaaggtattttagttctctgaataataggagttttctgtaaaactaaacaataatggagagcaattttatgcttgctttcagttgtactggaaggtttcattttcccttgttgaacacttgtttagatgaattaaagagcgcatttttaagggctctaagattatttttgattatgagttttattacagggtaatcactagggaatttaaaattaagatcaaaaccatactcaggaggctgaggcaggagcattgcttgaggctaggagctcaaggctgcattgtgctctgattgcaccactgcctccagactgggcaacggagtgagacccccacatctctaaagaaattgacataaataaattaaaagatgatgaattggccgggtgcggtggcttatgcctgtaatcccagcactttgggaggcggaggcaggtggatcacctgaggtcaggagtttgagaccagcctgaccaacatggtaaaaccctgtctctactaaaaatacataaattagcccggtgtggtggcaggtgcctgtactctactactgtaatcagctactctggaggctgacacaggagaattgcttgaaccaggaggcggaggttacagtgagccaagatttgtgccattgcacaccagcctggacaagagtgaaactccccatttcaaaaaaaaaaaaaagccaattcttggctttccaaaaaaaaatcaaaatcagatatttagattagaaactcagattgcattagtggtttcatcacaggataacctcatttcttgttaatcacaaagtatataatcttatacgtctaaaagtaaaaagctagtctgagatttcttgattgtgttgtagtgaaagaggaagagttccagagtgctaggtagaaatgaagagtaatcccaaggctttgaggtgtctgaataagcaaatgaagtaaggaaggcaaagtccaagagctgctgttttttttttttaattttttaaaacatttatttatttatttatttatttatttatttatttgagacagagtctctctctgtcgccgggttggagtgcagtggcgtgatctcggctcactgactgcaacctctgactccctggtttaagcgattctcctacctcagcctcctgagtagctgggattacaggcacacgccaccacatccagctaatttttgtatttttagtagagatgggggtttcaccatgttggccaggatggtctcgatctcctaacctcgtgacctgcccgcctttgcctcccaaagtgttgggattacaggcgtgagccaccacgcctggcctgttttttattttaataagttgaaattgtgatagactgtagagaaactttgagagttggagttgttatgtttgatgtagtgagtggaagtattttactaaggtgttacattcattcaaccactatttgcaccaaaacacagggcttgagataccaataatgagcataacaaatgtgatcactgtgttcatggaataatatatttggggagacagatattaaacacaaaaattaagaaatataagattcttgattttgataagtgggccataaaaagcaggatatatatcaattggggtttggtcaggaaagcaaaaaccaccctagatatttcaagccatgaagaatttacttcaggcaatwacaggckkacaaacctgttaggaagggctagacagtaatgtaagagaaactgccccattcaraaagtcagaaagaacaggaattgttgaaaaactgctgctgctgattccacttgtctcttatgtttgaagcaggtggttcacagaagagtacctgaaagctgtgagtgaaacctaatgtgtcatatgctgatgcccatgtgctgtcctttgctgttgaaggaacagtaatgcttctgttgtctttttgccttccaaagcttttcagatgtttctcaagatgttctcaagaggtagaagcaaaactggagctttggtcttagggattttggaaaatgaatgtagtttccagatttctagtccctgggaagagcacagaatgatgaaaatggttttaagttgccaagagacaatctggcataattagctatgagagaaaataacagggtcatcaattttagattggatggtaaaaaagtcctctttaaggaggagatattgtctgatggataagatcttttaaaagacagatcaatttctaacaagaattttggctgttttgtggcacaagtggaggaagacttaggagtagggataatttttccagtaagagtctttctaaagaggtgacatttgatttgatacttgagtgatgagaggaggcagccatgggaagattgggaagaacagaatgtatggctgagaagacaaatgcagttgccctaaggcttgaataaccttggcatgttggaaggaaagaaagaagagaggggtagaatgataggaatgaagctgragagttaggtaggggtcaggtcatgtagtatcttcagtggtgtggtaagtcatttgtattttatgctatttaatatgagacaccattgggtcatgaacaagggtgagaaatgagctaattttcattttaaagataygattttggctgttctgtagagactacatttggaggaagaaggtgggtaagtgttggggataagtagtcgaagtaaggagaacagttgggaaatcttagcagtacttcaagtaataagtgatagtggcatataacagtgcaaatggccaaaagcagatgtattttagattgtattttagatgtagagtcatcagtcttggtattaattagatgtgggtaattaggaagtggaaaaatcaaggaagcctcctaggtttttggcattagcaactatgtggattgtgtgacatttagtgaaataggaataactgggggaggagcagatagagcagtatgaaataatcaagtattctgctttggacttgttatgttttgtcattgtttaggagtcaaaacttgtcatgttttgtcattgattaggagtcattgattaggtggttggttgagctgagggatgagatcagggccgtaatcagatttgggaggcacatttacagctgtttcgactggatatgatcatttgtagggggagaagaatgcccacgacataactctggaacacttcaacttttaggtggtttacagaggagaagcagccagaaaaagaaacagagaaagagagacaggtaataggaaaactagttaagtgtgaggtcacagaagtctagagaataaagtgttcccagatggaggaagtggtcagttaatgctgctaagaggtggtattggatgaggacagaaaattcttctctgttaattaactattggctttggcaagattgaggatattggtaaaattcatgagaattgtttcagtggaaagtcaggaataaaagactaatcagaatgagttaaagagaatgggacatagcagtatagacaactcttgtttcaggaattttgctgtgaatgggaatggggaaattgggtagtagctgcaaaggaatgtagagtcaatttaaaaaaatggttgttgatattaaggtatgcttgcattccaataagaatgattcagaagaggaagaaactcataatgcaggagaaaggggagataattataaaagtaaaatacttgagtagggattaggaagtgggatatagagcataactggaggggaggtattgacttgtagataacaacagagatatttttttcattttaacctgaaggaatgcagttaatatggttatagaaacaggtagattgatggcattggtgtttagaaatgagattatttttgtctctatagtatgaggctaggtcactagctatgattgaggtgagaatgggaaatgtgagaagtctgaggagagagaagaaagtatgaaatggttcattcagggaatgggaaaatgactttaattaaaaattgtagaaggaatgtctggcagtgttgagtcttcatctgagatctgtggtgttaattttagtgtgaataattttagtgtgaacttcagtaaggttatgagatgtttttcttcagcaaaatttagctgctcagatacagtcatggactggtagatagatggcttcaaccatagatggatcaggtggaacaacagtggagaggagcaagtgagttaaatgcatttgcaaaggattggttttaattctagatgctgtaatgtatgcttgtgtaaggatgaggttaggaccttgagaggggtgataaatagggaaaagtagtagtgtcagtggatgggagctccttgtgaggtcaaaggatagagtagtggtatttaatgcaagtcatctgaaaggagagggaaaggtgttcagagagtgagatgctagaaacagacaacccagcagagagatatatatatattgataatgacaagattgcaggctgaaggtatgagggtgagtgacttaagtgggatggggcaagagatcattggagtgaggcagtccaaggaattaaatgtctaggataatgcctggcttatttatgaggatgttcaagttgccaaaaatgatgataggtatagtggtgaacagggagaccagaccatataagccagatgctgaaaactgtcctggggggggaggagcagatactgttaggggaggccataactgaggataaagatggtgggattccagaactagtatcactgattgaagtgtctgcaatatgagtatgtattacgtattgagaatactttggatcatattcactataagtggttccagagggtgatggggaggacatgagaatacagtgattgtgatcatggcaggaaaaaggtgtacaacatttaaatttaaatggacttgtatagtgttgtggttttttttgttgttgtttgtttgttttggtttttgtttttttgagacagagtctcactctctttgcctaggctggagtgcagtggcatgatcattgcctgatgcagccttgacttcccggctcaggtgtttctcctaccccagcctcctgagtagctgggattacaggtgcacaccaccactcccggctaatttttttgtatttttagtagagacaaggtttcgccatgttgcccaggttggtatggaactcctgggctcaagcaatccacctgcctcagcctcctaaagtcctgggattacaggcgtgagccaccatgcccagcctttgaatagtgttttaggaagttaatttgagtagttgggagaaggggaaatatgcttaaatagctttaggaaactagctctctaggtaaggtatgtgtttctctttgtataatcccattattgacactctactacatataagattttgtttttggatgggtgcagtggctcatgcctgtaatctcagcattttgggaggctgagttgggaggatcgcttaaggccaggaatctgagaccagcttggacaacacagcaagacctcgtctttacttgtaccccacctctccccccccaaaatttttgtttttcagtctattttaaaattttgatgtagcataagcagtccaaataaaggtatttgatttaatctcatgtattttctgcatacttttaaatttacaattgttttctttaccttcatattggatgtttttttaattgcttgtatggctagcctgttgaggtcctctttttgcttagtccccccattctcattccataatacatattgggaaaagattataataaatattgggaaaaggttatctctacactgatacctttcatgtttacatctttgtttaccatagagtctgctcttgtgccatcaaagtatctaactgaatataaaacatagcattaggagtatctatcttctatagatgctatctatagaagcatcttctagtggaaagattaggatgagaacaaagtagaccataacaagtataatagccatacaaatagctagatggttatgcttagttggctgaatttaataggctgggttctggagcaaaccagagcagtctgagaattcatttctattggcaacaactgaaggaatgccaggcagactttgaaatctgtgctgggtctaayttggtgatagtgggtttgttttgattcttttaagattctgagtcactattcagcccagttactacttgatgcttgctctgctagtcatcttcagtgattcagttttggctgcaaacctatgaagaattattggtcagagtgaaatgacattgaaatctggggacctaaagtgctatgacctactcttgttagaatggggaggggtgtatgagactcagataattataataaatagagttctggcccagatttaactcacagtgtgtctctgttatcagagtcctttctctggttcctagttttgtaattggaatcaacatacatggtagttggcagaattctcaacttggctccttgaccagtttggttaagtgctttcctagtgggggaagatcaagtggaagcctctaaaactgtaccttccctcaccttggaagggacagcatttcttctagtttgggattaacacatattctgggtccacatgtttgctttttctgcccataagtccacagccagcaccactatctgaggacttacagagtgtttgatccactaatacgggatcttgagtaatattgtctcttaccaagagtcgcactttacaggaaagatgtgtagcagtgggccaaagttcatgaatccactggtcttaactcatactgctccacctataatcctctggattgatagaacagttgtaatgggctcataaaggtacaactgagatgccagattggaggtgatcctctacaaggatgggtttcatccctccagaatgcttggccatcatatggatattcattatattaagtatcctcaacaggtaatatgtacacgggttcaacaaccaagggatggaataggagtggtctcatttactatcatacccaatccttacttgaggaatttatgctttccattcatatagctttagaccctgtgggcttagaggttcttgtctccagaagtagaaatgccctactagggaacagacacaatgagagttccattaaattttaagccatgcctgctgtctggtcactttgggctcctcttgccaaaatcactagggaagaaaaggagtcaccatcctggtaagggtaattgactctgatcattatcacggtatggacagagaagaatatgtctggcattcaggggatccgctgatatgtctcayggtgttcctaagcccattattttaataaatgtacaaatacagtagccattgcctaaaaagggcatggtaaccagagtttcaaacctcttagataaaaggatctggatcgctctactggcaagctgcttacaccagcataagtgctagcagaggatgaggggactctaaagagggatgatgatctgttatggccaggaaatcaactacagcattgggactatagtttgtcttcttctcttgaaagtttcccgtggaaacaaaataagtagaatccttaagaagctgtttccggctgggcgcggtggcccacacctgtaatcccaccattttgggaggccgagcaggaggatcatgaggtcaggagatcaagaccatcctgaccaacatggtgagaccccgtctccactaaaatacaaaaaattagctgggtgtggtggtgcacgcctgtaatcccagctactcaggaggctgaggcaggggaatcgcttgaacccgggaggtggagattgcagtgagccgagatcgcaccactgcactccagcctggcaacaaagtgagactccgtctcaaagaaaaaaaaagaaaaaaagaaaaaaaaaagaagctgtttcctgctagagtgaacttactctaagaagcaagtggatggtctttacttttgaaactcttggcggggaagtgctgttggagccgctgtggttgctgtccgtgtagtgaaagcgcgtgcctttgtttgtgtccctggccatgtgtccctggccatggcgctgcagctctcccgggagcagggaatcaccctgcgtgggagtgccgaaatcgtggacgagttcttctcattcggcatcaacagcattttatatcagcgtggcatttatccatctgaaatytttactcgagtgcagaaatacggactcaccttgcttgtaactactgatcttgagctcataaaatacctaaataatgtggtggaacaactaaaagattggttatacaagtgttcagttcagaaactggttgtagttatctcaaatattgaaagtggtgaggtcctggaaagatgacagtttgatattgagtgtgataagactgcaaaagatgacagtgcacccagagaaaagtctcagaaagctattcaggatgaaatccgttcagtcatcagacagatcacagctacagtgacatttctgccrctgttggaagtttcttgttcatttgatctgctgatttacacagacaaagatttggttgtacctggaaaatgggaagagtcgggaccacagtttattaccaattctgaggaagtctgcctttgttcatttactactacaatccacaaagtaaatagcatggtggcctacaaaattcctgtcaatgactgaagatgacatgaggaaataatgtaattgtaattttgaaatgtggttttcctgaaatcaagtcatctatagttgatatgttttatttcattggttaatttatacatggagaaaaccaaaatgatacttactgaactgtgtgtaattgttccttttgtttttttggtacctatttgactcaccatggagttaacatcatgaatttattgtgcattattcaaaaggaaccaggaggttttttttttgtcaacattgtgatgtatattcctttgaagatagtaactgtagatggaaaaacttgtgctataaagctaagtgctttcctaaatcagatgttttggtcaagtagcttgactcagtataggtagggagatatttaattataaaatacagcaaaggaagtctaaatattcagaatctttgttaaagtcctgaaagtaactaataatctataaacaatgaaatattgctgtgtagctccttttgaccttcatttcatgcataattttccctatcgaatcagtttccaattatttgactttaatttatgtaacttgaacctatgaagggatggatatttgtactgcttgatgttctgtgatacagaactcttaaaaatttttttttgtgttttataaaatcaagttttaagtgaggaaataagtttgttaaaaacaaaaaaagaagcaagtggatttgtgtggtgtaatttgcctgctcatataatccactcatttttctatagcatcatttattgatttgtagaacctctttatatagtatgaatattatcttttatgtatgatgaaaaaattgttttctagtttgtggcaagtcttttaatagtattgtgtttcccctcccacttatgaaaagttttaaatttaaaattgttgtttttagagatgatggggtcttgctgatctcaaactcctgacctcaagtgcttcttcagccttggcccccacaaagtgctgggactacagatgtgagccaccacacctggccttaaattttgataaaatgaaatttatcaatctcctttacatggtttaaatttttttagttacttttaggaaatttctgccctgatctcgtaattatattctcctataatttgataaaagtttaaagttttctctttgatctttagtcatttgttcataggggatttctttttgtgtatagggtgaaagatagggatctagtttttttctctccttatctagaagcatctctccttatctagaaagcatttatttagtgtctcaagtatttatttagtagtcatttatttccacattgatttgtaatactacctctttcctatgccgtatttccatgtatgcatggattttgtttgtgtgtgtgtgtgtgtgtgattttttttttttttttaacagaagtatacttgttccttacagtgtgctgttatgttggtggtacatgaatccatagacatcttcctggaatgtcaattttacctaaagaatatgaaaaagattgagtaattgaataactggtaactatttgaggacatttttcaatgaaataaggctgtttgaattatggagtcaaatagaactttcatgaagttttagctttttaagctaaaacgtgatacaatttgaagacatgttgagcttatgggggaccatttgaggccatttccccaattttccaggaagttcattctttatcatttaagaatactgtggtagaaaagggtgagaaggactaccttacatggactgtttttattttttgtcaaaacgttgtgtttattgttccatgtatacactgtgtgtattgatacctttattttttttgtgatctctgcctggaatgtcatccttctttcatatttcaaggccagcacatttttcatggcccagctcaattcaacctatttcttgaatcctttaacagttgtaatccttgttactggctcctttgaaatctggtccttactgggtattccttgtattaagtaatatttctaatggctaatgtttattgagagtgtactatgtgtctggtatatttctaagcattttacctgtattaactaatgtaaatctcatcagctctgaaagctaggtttttacccctatgtaggtattctttttatttctcacaaggaaggaaacagaggcacagagaggtttaataatttaaataaggaaaagcaggcaaactggcttcagagtctgtgcccttaaccagtatgctctgctccctctcagttgctcaataaataattgctcaggaatgaatttaccacttatattaacacttagcagacataactttgttctgttgttttatgggtgtgttctttcctaactatataatacatccctgaaggcagggataaaatcttatacttctttatagtatggctttatatttcatacttcattagacggatttactacttataacaaatccctagtagatgttcgtaggtgatgataatgaatttggtatgacctttagatttgccatagagtaacataaacctaatcattcattgtcaagtgggtctaagctttctaataagacctgttggtttgaatactccagaaccacagataaataacactatgagatctcctggttctgaagctgtggggtttggctagacctgtaacattctattcagttggtagagagatccccagagattaggtgacagatttctggcctgcacttaaactatgacctggacaggtcattttgtcttgctatctgtaaaaggagaaaatcatatttagtgcagcttttatttttaaatcatggtctttatgtagaccatgctttttagaagcaaagttatgtaccttcaaagtagcatattctcttactttgttataataatacataccattatgttggtacaaatttggaagaatgtattattaccagcaaagctgtgctctagcccaggctggagtgcagtggtgtgatcttggctcactgcaagctctgcctcccaggttcacgccattctcctgcctcaggctcccgagtagctgggactacaggcacctgccaccacgcccagctaattttttgtattttcagtagagacagggtttcmccgtgttagccaggacggtctcgatctcctgacctcgtgatctgccttccttggcctcgacctcccaaagtgctgggattacaggcgtgagccaccgcgcccggcctttagttttacttttaaataaagagcaaaatatttacgtattttttgagatagggtcttactctgtcacccagggtgtaatgcagtggtgcgatcacagctaactgtatctccaacttcctgggctcaagcgatccttgcacttcagcctcccaagtagctgggactacaggccactatgcccagctaatttacttttattttttattttattwatttaatttgagatggagtcttgctctgtcgcccaagctggagtgcagtgacacaatctcggctcactgcaacctccgcctccgcctcctgggttcaagccgttctcctgcctcagcctccctagtagctgggattacagatacgtgccaccatgcctggctaatttttttttttttttttttttttttttttagtagaggcgaggttttgccatgttggccaggctggtctcaaactcctgacctcaggtgatccacccgcctctgcctcccaaagtgctgggattacaggcatgagccactgcgcccagccacccagctaactaaaaacattttttttttttttaaatagagatgagggtcttgctgtgttgctcaggctggtcttgaacccctggacttaaatgatcctcctgctgcggccttccaaagtgttgggattatagatgtgagccactacacaaggctgaaaatattttttcccccgcaagacagagtcttgccctgtcacccaggctggagtgcagtggtgtgatctcagctcactgcaacctccgcctcccgggttcaagcaggtctcctgccccagccttctgggattacagttgcccgccactgtgcctggctaatttttagtagagatggggtttctacatgttggccaggctagtctcgaactcctgactttgtgatccgcccacctcggcttcccaaagtgctgggattacaggcatgagccaccgtgccaggcaacgaaaatactctttttacagttagtttctggaaagtgtaagaattctttggtcaagtggaaaggacttgataaatgtgtagctatagctaacacttttttttttttgagaacgagtctcaactctgttgcctaggctgcagtgcagtggtgtgatctcagctcactgcaacctctggctcccaggttcaagcaattcttgtgtctcagcctcctgagtagctgggactacaggtgtgtaccaccatgcccagctaatttttgtatttttagtagagatgggatttcactatgttggacaggctggtctcaaacccctgacctcaggaggcctcagcctcccaaaatgctgggattataggcatgagccaccacgcccagccagctagcactcagtgaacatttactatgtatcaggaattgatttaagttcttttacctataataactcatttaattaagttgattgttgggtggccatttgattttttaaaaggtttccatttccccctctttattagtgtaattcaaaaatagttgtcaatactaatcagaaaaataaaaaattacaaatataaaatataacttaggttttgaaacaatctggggaacgggtctcaaacttgtctgttattttattaattgattttccctagtgtttattagggatttaaatgattaattgaaaatgttagcaaatgttgagcaaacattgatatactttgctttcaagaaaacaaaaatgagaacattgtatttttagaactatttcaccttgagttaagcattgcttgtcataaaccaaatacagttcttgccttcatagccccacattctctgtatggatcttctggaattttctgttgttgaggtaggagatgatagtttattctcacacatctgctttatatagcttatataatttagtctataattatttgctagtatcaactgtttttaattgattcacaagaatgtatattcttgtactcatcaaacatttgagggttcagctttgcatttgacaaggcacctggcatagtactgagaggatagccaactgtttagcttaaatatttgaggacctaatgaatagaaatagcatcttgactagttgttatattttattctatttaaaaggtcataataatggatgcttgataaatattgacctagaagaaatagtttaaaaaatgaattatatatattttttcatggcctcttaaaaatagtagaaaagtacaaactgttgtggatatgaagagtgaaataatgaaaataaacccagtgttaaactctaagaaatagaaacaaaatataattaagaaaaattgaataaaataaataatagaaaagtagaaattagtaaattggaaaacacacaaaaaattgtgaaattcaagtttctttatagtgattctttaaaagggcctttatacaacttagacaaacatgtagcatttctaatcaagaaaaagaggtagaaaaacaaaataagaagtgaagagagagctagaacaatagtaacagtggaaaatttaaaaaatattttactcagtactaataaatgagaaaatcttaatggcttgggtagtttggggaacacttaaattatgattgcattcctttgagttcatttgttcattataagcaatcttttattggtcacatgtaacagtggttctcagactttttggtgttagtaacttttataattttaaaagttattgatgaccctcaagacctcttatttatgaaagttatatctgttaacatttatcatattaggaattaaaatttggaaactttgaaatgttcatttattcatcaaaaattataaacctattacatgttaccacaatgtatttttatgaaacataactatattttccaaaacaaaaaaattttgtgagatgagtagcattgttttacatttttgcaaatcttttaaaaatgcttggcttaagagaagaaaactagattctcacatctgcttctgtgttgagtctgttgtatgttttggttgaaataaatgaagactatctggcatctatagatacctatttggaaaagggataagcattttaataatagccttttcaggtaattgctgacattgtttttggacatacttagttacatgtatttttaactcctttgaatcatggtggaagtaaagacataccttatttagtgcagtggcattaatggaaatcagagtattagttgaatttgcccttcctttccccgaagtagaattatagtaaaggtctgtatgcaaatgctagcttggtttagtgggacatcgttctttcaagtctccaaagtcctgaatgctcctgtggccatggtgctttcccttattactcgtatgcagacatacctcagacatattgctggtttggtttctgaccaccacagtaaagcaaatatcataatacaacaaatagcacaataaagtgactagcacaataaagtgtgtcacacaaactttttgatttcttagtgtgtatgaaagttatgtttacactatactgtagtatattaagtgtacaatatcaatatgactaaaaaacagtgtgcataccttaattaaaatatactttactgctaaaaattgctaacaatcatctgmgccttcgaaagtgactataatctttgtgctagtagaaggtcttgcccagatgttgatggctcctgactgatcaggatggtgattgctgaaggttggggtggccttggtgatttcttaaaatgagacaacaatgaagttcgttgcatttattgactcttcctttcatgaaagatttccctggagcatgtgatgctgtttgataacatttacttactggaaaattcctcgcaaaattggaatcaattctcaaaccttgccacagctttatcaactaactgtatatgttatttctgaatctcttgtcatttcaacagtgttcacagcatcttcaccaggagtagattccatatcaagaatcatccctaagaagcccaaactcctcatttgttcaagtttgatcatgagattgcagcaattcagtcacatcttcaggctccacttctaattctagttctctcgctgtttctgccatatctgcagttattttctccactgaagtcagaccctgaaagtcatctgtgaggattggaatcaacttcttccaaatgccttttaatgttaatattttttatcttttcacatgaatcacacatgttcttaatggcatctagaatggtgaatcctttcaaaaaggttttgaatttgctttgcccagatctatcagaggaatcattgtctgtagcagctacagcattatgacatgtattacttaaataacaagacttcaatgtcagaattastccttgacccatgggcttttgaatggatgttgtgttagcaggcatgaaaacaacattcatgtccttgcacatatccatcagaggtcttaggtgaccagattcattgtcaatgggcagtaacattttggaaggaatctttttttccgagcaataggtctcaacagtgggttcaaatattaagcaaaccatgctgtaaatagatgcgccatcattcaggctttattcttccatttatagagcacaggcagtatagatttagcataatatttaagggctttatgatttttcaaaatgacaaatgaacattggtttcaatttagtcatcagctgcactatctcctgaaaagacacccttgcctttgaagctttgaaaccaggcattggcttctcctctgtagctatggaagtcctagacggcatcttccaatagaaggatgtttcatctgcattgaaaagtctgtttttcagtgtagccaccttcatcattatcttagatagatattatggataacttgctgaagcctccatatcagcacttgctgcttcaccttgcacttttatgttatggaaacagcatctttccttgaatttcatgaaccaacctctgctagcttcagacttttcttctgcaacttcctcacctttctcaacctttataggattgaagagagttaggtattaggatctggattaggttttggtttaagggaatgttgtggctggtttgatcttttatccagaccactgaaactttctctgtataaatgataagactgttttgctttcttaacattgtgtgtcattggcgcagtgcttttaatttccttcgaggacttttcctttgcattcatgacttggctaactggtgcagttggcctagcttttgggctatctcagcttatgatacaccctcctcaggaagcttggtcatttctgtcttttgatttaaagtgagaaacctgtgattgtttttttcacctgaacacctaagagtccattgtagggttattaattggcctaatttaaatattgttgtgtctcaaggaatgggaggtctgagaagagggagagagttggaggaacagtcagttggtgaagcagttggagtacatacaacatttattaagtttgctgtcttatatgggtgcttttcatggtgccctgaaacaattaaaatggtaacaccaaagatcactgatcacataacaccatgtcagatataacgataatgaaaatgtttgaaatattgtgagaattaccaaaatgtgaaacagagacgtgaagtaagcatatgctgttggaaaaatggtgccgatagactcattccatggcagcgttgccacaaatcttgaatttgtaaaaaatgaaatatctgcaaagcccaataaggcaattcgcaataaaatgaggcatgcctgtaattgtcagttctcccagtctgcagtattatttctgaagcccttcataaagttagacagacttttccctccaatttctagcttttaccttgtttcctcaaccatatccctgaaggggctttgagcctctaatgtcttaaatcttaacatccagcactatcacatgcacaccctttttagctatcaggatgaaactgttcatcagtggcagaaagaatggctacagaatagtccacatatttcagaaaatgttcttggcttagagcatttggaatatgatgtgttattaacacatgctggctaggagtatgtagtataatttgttgagctgttgctcattggctgaaagcttacgatagtattcaaagtatgcttttgtaatagagttactttttctttctttttttttctattttcaccatagtatatgaatgtttatgcacaaagttggtgtatctgacacagacagaagaatattggttttgagtatgttgagtttgaggtaacttgtgggatatcaaagagtaattgtgcaatgggcagtgtgtaataggaatttaggagagatttttaggctagaaatagatacttaggatgattattttcataggtcattgtaaaaattgtaagaataagatagaaggagaaagtgtagagtatgaagaggactgtaaaagggaaataaatcttgggacccccaaaatcactaagctaaagggaaaagtcaagctgggaactgcttagtgcaaacctgcctcccattctattgaaagtcattcctctgaggctcatctgagacaaatgaatctctgattgcttcctctgccctattgtttatgtaaaaatgcagattcactgagccagactaaattgtgtattcagtggaaggctgatcaaggactcaaaataatccaaccttttgtctctcatctacttctaacctggaagcccccacttcgacttgtcccaccttactggaccaaaccgatgtacatcttacacatattgattattaatataaaatgtatgtcatgattatcaatataaaatgtataaaagcaagctgtactcgaccactttgggaacatgtcatcaggacctcctgagggtgtgtccttaactttggcaaaataaacttcctaaattgactgagtcctgtctcagaaatatgggattcacagggtaatggtgaattcttactagttatatgattttaagccagttatttgacttctccatgcttagtgccctcatctatgtagtaaggaaaataatatctacatcatatcgcaaaagccctaattaatgttattttctttctatgttccttcatatatttccaacctctttctagaaaatatttatagtgttattccataaaggatttaaatttggcttaggagttttctggcaaaggggcaaaaaggaaaactggatagattccatggtccttgctgtctgtcaggaggatacaaacccatttttttgaaagtgagtttttctggcacagctttatttaattattaactctttccttttcccttgagtacaaatatttgtttttacacagctccgtttttctggctcagaatggacttaaatatactatttgaatttgtaccttatattatttgcttgttagttgaaaattgctatgctaaatgataatagccaacagaagattgattagacattaattttgagttctaagataatgaaaaaatgggtaaacatgcttttttaaattttgagggcaatatcttttcttctgaaagtctactatctcttcataatgttttaatacctgctcccaggccatcacttctctacctgtggatgaattcttttgcttcatattccaaaagcactttgttgaggtagtttatataaattttttctcaggatttggaatacatagattctgagttcccttttaggtatcaagtgattcatagcaatttagcctaaaggtatgaaaggactgatgaggaaatttaacagcaaatattccaaagtttaaattgagaatgccacataagtaaatgtaacacattcctattttagttgctgagataaatgagaaatgattatcgtagacaaagttaactggatcccgtggctaattggcttgaaatccatgtatgcaaataagtaagtctctacttttattaagattgtataccccttctatcaaaagttattcattttgaggtcataagttttttaaaattacaaatatctgggctttaagaaaatgtgaaacctttttaaggtgaagattcaattggttactttctggggactaaaacttgtagaatattcttttaaaattccagtttaattcccacttgaaagctgatatcatcaactcatggtgacggttaggaaggagagaaaaataagaaaagaaaatgtctaatattttgttcatcttctttgggccagtttagttgaaaaccctaaccatcacatataaatagtttatttgggaaaaatgtattttgagttccaagtagctaatttgtaagcaaactattggaacaaagtctatttgtaaattgactgccttttctaaaatgcaccaggtgttatttttttcatgtgttttccatgaatccttaaacgcatttcattattggatgttgataatattttaattaactggtgatcatttaggtcatttctacctctaaaatttctatgattcggttagagcagagatttttggcaaatgatttagttgaattaaggtttctaaagttttaatgttcaaagatatggcacttcaatcaatattttcttgtatagacaagttaggtttattttgggaggaaattttttaaaaaataatatcctgcttctttcttacagaatttagtacacatgggcttaaggaagaatttattgtaaaaataaaatttttcttttacaatgttattacttgttttttagctttcaagaccataggtttctgtttcatttttaaaagccaaggagctaacgaagaatggaaagtgctgataaaactaggttacttcacagaaagtcttaagtatagagtttttgacaaactatgaatatttcttttaggccagtatgttttaataatatttgaaatttgacatggaatatagttgctctttaaaaagtaaagtgaacaattgactaaaattttgacgagaatattcttgataaaataaaatctgctaaaaatatgtcattcagagagaaraaggatgtcattctgatttttaaaaacaaaaaccataaaaatatttttggaaatggataatgactgaaaatttgggcttcttcagcagatttttctgttttctgcagaatgtaaagttttatttgaaaaaattcctagcactcctagaggcaaaagattgcccatatactgctgttttggttgctctgttgccagataaaatgaactagcaattatcaactactacttcttcttcttcttctttttttttttttgaaacagggtcttgctctgtcgcccagactggagttcactggtatgatcacagcacactgcagcctcctgagtagctcccatctcagcctcctgagtagctgggacgcaagcgtgtgccaccatgcccggctaatttgttggtgttgttgttgttgttttttgcttgtttgtttgtttgtttttttgtaggaatgaggttttgccatgttgcccaggccagtctcaaactcctgggcccaagtgacctgcctgccttggcctcccaaagtgatgggattacatgtgtgagccactgcacccagcctatttttcctgttattttatttatttatttatttatttttggatataggtcttgctttgtcacgcaggctggagtgcagtggctaatcacagctgacagtaaccttgaactcctgggctcaagtgattgtcctgcctcagcctcctgagtagctaggactacaggcatgcaccaccacatctagctaattttttttaaatttttatattttgtagagggagggatctagccatgttgtctaggctggtcttatattcttggcctcaagctatcttcctgctttgccctcccaaagcactgggattataggcgtaagcaactaggcctggcctgttcttttttttaatgattagtttttatatatgtattttgtaaatatgtagaaaaagatgtggccacacaaacactaaactcaacagtagcatattacccgtgggaagtgagatacagaacacaatgaagtagaactttgagttatttttctatataattctatattttataagctttaaagaaaaaatattcttttcacagttaaaattagaaatggaaaatgttacgtaggaaaataaactgcaataaaaaattttaatactatttaaattattatgacaaggcagattataaaaagtggagatgtacaactgattttggaaacaatatattatgtctaatatacaatataacgtttagaaatattaatgttctatattaccttgctgactaaactattgattgagtctaatctccaagaccttgagatatattaatgttatttgtggctctgtaattttgactattttggatagatgcttacttataaatatctttagttagtatagttgtaaagtttgcctgttttcaccttccatggatgggtttaatttcctctaaccacaaagaatagtgaaaatgcaccactctgaaacttcctaagtccagagtggtttatctggggtttagttgatcttgctaatgacactatgatctttggaatttttccctgttattttttagtgacactattaagatagaaatataggccaggagtggtggctcatgcctataatcccagaaccttgggaggtcaaggcaggaggatcgcttgagcccaggagttcgagaccagcctgagcaacatggggagtcccagtctctacaaaaaaataaaaaaattagcagagcgtgacagtgtgtgcttgttatcccagctactgaggagcctgatgtaggacgattgcctgaatctgggagggcaaggctgcagagagctgtgacaacttcactgcattctcaaaaaaaaaaaaaaaaaaaaawatatatatatatatatatatatataaaataggtatatatatacatatgtgtgtatatatatgtctgtgtgtgtatgtatatatttaaagatcaatgttagtattttactaataaccttaaaaattcttatttttcttattacttttcttatttagcttattctgtaagttaaatacacacttggaagaaatcaactcttccctattcattagaatttctctttttccctttgtcttgtattcatttttttgttttgtgaagtttacttagtgagtacttagcattaggcactgcggatagagaacaagataggcaacattctgtctttatgaaatatactgtacttccttgtctaggagacagaacacagaaataaataagatgatgtcagatattgccaacaaaaggagtgattaggactgtgtggtcctaacacatatggaattgggcaagattacacctggaggactacaaatgtttaaatatttatcaaaacattcgaatatttaaaagttataaatcaagccacatccttggcccagcctgatttcctacacagcatgttgagttgccagcagcctataccctcaagactcagaggctaaaggaactgctctctcctcccatccatctttgtaacctgcctgactgagtggtagtatggatctgttggggtagggcagggatgattggggtggtacctagacccatctaaaacagtatattaacagatcccaccaagtccccaggaatctggttatagagaggtttgcctctccagttcattgttttttcaactcaagtcttctaggaagttgtaagcccttcttaatgttgcactaccagaaaaggggatgcaggtatctgggaaacctggcttgcctgggaattcggtttgctttatttggggcaacgaactttaaccgaataaagcttttataagcagccactctttctgggatttctcatggcagaagttgtgttcattttctccctcacacatactggagcgctcaaagttctttatcctctggccagtgaggcctcattcagctagcacctctttcctgtaattgtcatttgctcagttgattactgaactttcaaaagacattcttacaaggaaaggaagaaaaaaacatctgttttagtgcttggggtatatagggctctctaaagagcaggcccctggcagaggcttctcttgcccaggtctatggatgatattgggactggggatggaggtgaccatacagtagccttttacatgctctttgacttctccctatcctgctcttcttcctagtctctcactcaatttgttttaatttataaatttgtttgatctgtaaaactaaactggtatcacttgggatacctatatctgaaaagtaagctccaaatgaaaaagaacattttccagaaagttttttggtaagattttaaatagaagtgactagttttcaagtctcactctccttatcccataggggcaaactattcagatgtgttgtagatttgaacattggcttaaatgttatgttttatttctgtccttacagctgtgaaagttgtgtagatttactgtttgtgagaggagctggaaactgccctgagtgtggtactccactcagaaagagcaacttcagggtacaactctttgaagatcccactgttgacaaggaggttgagatcaggaaaaaagtgctaaagatgtaagtattcctgctcgaatgattcagtcaacaaagaggactttaacaattatgtcagtaattgattattatttgctcataaatgtggacagattagcaagtaaataactataaattcatttaagttcttagagaactgagtaatattatttatctttgttaaagaagagcctcttgattgatggcttcattattcatttgtatttattctttgattaataaacatgtattgagtacctactatgtattgagtacctactatgtgtaaacactactatgtgtaaacatgttatgcatgttaagcagtagttatgaagtgatgagtaaaacagctatgaactctgtcctcatgagacttaccatacagtagcataggatagcaaaaagacaaaaaaacaagtaaaccaaaacaaatgttatttattatagattgagaatagtgctatatagttagtgactcagtgttgctgtggtcaatgatgtcaggtgtgggcagaggaggtaacattaagttgaagtttgaaggctattagagaaaattacgtgttagctatagtttattttggtatgtgtatttttgtgtatatagatatacacacatgggcatagtawatatatgtgtgtatatatgtatatatatacctatatattattaatctgtctttttcatttacaatttaggctttactctttactctttgttaatagttttgggtttccttttatctgttattatgagaaataattgatatgtttatttttatttttggtggtatacatttcaacccaggtaaccagtgttttagcagcatctttctaggtacataaccaataatactttatcaatccgcctagcggctcttttattgtttgtataacttctgcaaggtagtctcttagattttgatctttcattggtaattccttgcaatttactgattctttacaggtacattacaatatwtacagattttcttgatcyagtattttttagactatgtcatgaaaaatggaggagtcgcttcaattttttgtgttttggaaattagtgaatcccttagaagtaaataataccataatttccaatgttatgtcttgcttaagctcatttcccaatctttcaagctcccaatttatctttccctgaagtcttaacaaggattttgcatattgtaccattttctcctgatcctacttcttctccgtagtcataagaatttaagaattgcatttttggtctggttacaaacctggtgtcaagaaaaacagtgttttaggctgggcgcggtggctcatgcttgtaatcccagcactttgggaggccgaggtggtggatcacttgagatcagagtttgagaccagcctggccaacatggtgaagtcccatctctactaaatacaaaaaacattaagtggatatggtggtgtgcgcctgtaataatcccagctattcggggggctgaggcagcagaattgcttgaaccagagagatggaggtagcagtgagccaagattgtgccactgcactccagcctggacaacagagcaagactccatctcaaaaaataaaaataaaaaaatagagaacgatgttttacacagtaagcaattcttttccatgtatcatatatgaattaggtcagaacaagcaaaccagttagataatattaaaagcaatgatatgtaatatgtagatttcttttttcttttcttaaagatacaataaaagggaagaagattttcctagtctaagagaatacaatgatttcttggaagaagtggaagaaattggtacgtttttaatttgatgtatgctagcctataagaccatgtgcttttatcttttaaatgcttaggagaacatctcacataaaaacctcttaacaggttttgttgtgatagctaacatttacctaattactttcttttgcacttgagtcatgtttgtcaaattgaaggcatacttaagtaaagaacctatttaatattgtcttttaggaaaaatatgtttaatagagatagtaacacttcatagctggggaggaagactatatgggtacatgcatctgtgtgttgataacatattagagtagtttaaatgaatggaaaacatattctgatttttcaaaaatggggttcctattaaccatatttatagtgactaaagccatatgtttatcattatttgtgcttctgtggatatagtagtcttaaagtactttgaagcagttgactgttgaagtggcattctattaatcagtattattctggaatcagaggttggagtaatctttgtgccttttctttctgatgtgtttagtcaaaaggaagattttatcaagaaaaaatgatttcagttttcttaaataaaatttcagagatgttaaaaactttggaagttgttatatgttgatttaaaaaataatgctgctttttaaacttgcagtaattattactaagtgcgggtttggaaatgacacaaaggttatatactgtgaacattaraatgagactatgaggatcaaacagcaatcatttttattctttcaaacttaataggtaactgtactcaatatttactattaaaaataagattataataaaatggatcattctttagaagatttatatatgataaacttaacaattcagattcctgaggaataataaatattctaattcctttaatttctttactagaaaatccagaaaatctttttgtttcaactgttacctgaaacttttctcatatgtctaagttcatttgttatgccatagcaaaagcatgtggaaaacataatttagggtttctctgggatctttcagtgccataagagccactgcttttccattctgcatgtactcattgcactttgtatgttatcttagcaatcatgagtgactatggattttagctgaaaagatggtagaattgggagtgacaaggcaaagtggaaaagttagaatgtagactgagaagaaaaaccagaaagaaatctacaagaactgggcaagtatgaaggtatgtagaaatctggctctatatagatactaagtataggacaagctgttggatagcaattgggaagaaaagtagcttacatatattctaaaggtaatgtgattagtcaaaagtctggtcaagcaataaagggaaaggaaattataggtgttgcagtacaagttgaatacatggtcacaattacaagcaggcagtcaggataactaaaagaaacatatacagagaaggtgaggaataggtttaggggatgaactacaaggagatcttgattctgggattaagattctgactgagctatgattaaaaaaawatatatatatatatacacacacacactgcatatatatgtgtgtgtgtgtgtgttgctccaagataaagtaatttgaaggtgtggacaacatggggcccataattggtactagaattgataggcaagagcaagtctggatattgggggtatacaacatgtaatgctttctttaccaaaatatagaagctgtggctcagaccatttaatttgaaagtgattctgctattatgtgtattcatgaaggactgtcttcagttgcagtatcgggaaactctcttaagcaacctccacttaattgtctcattgaagtaactgtcattccccagttcttccataaaaggtactcactgatacccacagcataatgaatgcattgtgaatgccatcaaccttcttatgccagttgtacttgttattgtagttatgtagttatgtaattaaatacatatttaatattatatgtaatttaaatatttaaagtgtgtaaggttggggaaaaaattgtaaaactctagaaggattctgtttctcaggtttttaagtcacttcttaaaaaatggaaattggccaggtgcagtgactcgcgcctgtaatcacagcactttgggaggccaaggcaagaggattgcttgagcccaggagtttgagatcagcctggacaacataatgagatctataccaaaattttaaaaagtagctgggtgtagtggcacacgtttgtagtcccagctacttgggaggctgaggtggatctctgaagtctaggagtccaaggctacagtgaaccatggttgcgccactgcactccaacctaggcaacagagcatgcccatgtctcaaaaaaccagaaaacagaaaaggaaactgaacaatatagatgacagttatggcctatataaggaagaagcaaaactctaaaaactagaatttgctctatgtcattaagttagagaatgactatatacttcctatatatgttttaagttaaagtatttgaagagagagacaggtgtatgtgtgtgtttctctcctttaacaaacttatttaaatgttcaactataaatcctcattgtgtttattaaagagtggttctactctatttaaagatattgatgatttttgggaagtaacctcttggatttatagtttattttctgaacttcagttcaattcagcaagtttttaaattatgttatgtgaactgctttatggatggggatatgtggtatttgccctcaataagctcagactctaaagggggagataattatgttaactaataactataatgtaatgtgataagtcttataaataggcatttataaaatgctatgggaatacagataaagcaattaacctagcactgggaaatagagatgtggtttggtgacattcagagaagagatgacatgtgagtttgatcttaaaagaagaagaagagttaaccagatagaaagggcttggaaaaacatttgtaacaaaagaaaaaggcaccgagatagaaaaatgttgagcatgttggagaatgagcaagtagtctgttataggtgggtaaaacatgagggatgactaaaaatggggcctgaaaaacaggctggattaaggaggccttagtaccatagacaacaaaagcaaaaatagacaaatgggattgtatcaaactaaaatacttcctcacaacaaaggaaacaacagagtgaagaagtaatctacagagtgggagagaatatttgcaagccagaaatctgataaagggttaatctccaaaatatataaggaagtcaactcagtagcaagaaaatacttgattagaaaatgggcaaaggacctgaatagacatttctcaaaagaagacatacgtatggtatatgaaaatgtgctaaacaccactaatcatcagagaaatgcaaattaaaatcacaatgagatatcatttcacatctgttagaatgggtattatcaaaaagatgagataagtgttgatgaggatatggagaaaarggaatccttgtatgctgttggtgggaatgtgaattagtacagccattttggagaacagtatggaagttcctcaaatactaaaaacagaactaccatatgatccagtaatcccacttctgggtctataacctatagccctattcacagtagctaagatatggaatcaacctaagtgtccatcattggatgaatagataaagaaaatgtggtacatatgcaccatggaatacttcagccttaaaaaagaaggtaattctgtaatatgcaacaacgtggatcaacctggaggacattatgctaagtgaaataagtcagtcacagaaagacaaatatggcatggtctcacttatatctggaatctaaaaaagttgaacttagagaagtaaagagtagaatggtggctaccagaggctgtgggatggatggtgggtggggaaaggggagctgtatggagttaatcaggtaaacattggagaataggcagtattttttattattttgttgcctaaggatatgaaatttcaattagacaggaggaataagtttttgaggtctattgcacagcatggtgaccataattaataataatgtattgtatatttcaaaattgctaaaagagtagattttcaatgtccttgctacaaaaaaataagcatgtcaggtgatggatatgttaattaattagataaaatagttccacagtgaatacatatatcaaaacatcacattgtaccccatagatatatacaattattatttgtcaactgaaaaaaaaagagggctttgtaaactgagctctcagttaagattttatcttgtggctaagaggagatactaaagagtgagaaatgacttttcaaggggccattacagtaatttggatgagaaataatgagggcttggagtagatagtcacagtggggatagataaagaggatattttagacatacaatattcaagtggttgatttgatgtaggaagtgtgttagagtaggcaaagataaattcaaatattatgacctgaccccatgcagttgtatggtgttaatcaggtaaacccgggagaataggcagtattttctattattttgttttgttgggtgaagcgtttgcagaaatgagagataaagtgaaaactttagttttagaccttttaagttttgttagagtgtggctccaccacttagttgtatggcattgttcggtttgtcatcatataaataaaactttttttttttttttttttgagacggagtttcgctctgtcgcccaggctggagtgtagtggcacgatctcggctcactgcatcctccgcctcccgggtttaagcaattatctgcctcagcctcccgagtagctgggattacaggcgcccaccaccatgcctggctaattttttttttgtatttttagtagaaacgggatttcaccatcttggccaggctgatcttgaactcctgaccttgtgatccacccaccttggcctcccaaagtgctgggattacaggcgtgagccaccgcacccagcgaaaacttcctgtaaaaatcttgtttcaatagctttctattttgtgttgtattcatatttttaaagatagttagatgtctgtgatatctgtattatttgtgttaatcagaagtataaaatgttaatttaatggacatttactaagtaccagactgagctgtacacacattatctcataatttttgaaactctaagagacaggcatttttattcctattttgcatctggagaagaggcacagagagcttaagtattgtgcccaagactgcattgctagtaaagaatggagccaaattgtaaatataggattttcttactttctgagtctagaacatggagttctatggaattattagagatgagagaaaaaaagtagtttggggccatattttgaaggatattaaagacatttgaactcgatcttataggtagaagggtgctgttgaagataaacgtttaaatctggagtaagaaaactagaattattagggtgcctcagagggtcagtgtttgaggattcataaattggagattgaagtaattttgttgtataaatttcattatgaatcttttgaatatgaatataaaaatgaaaacattataattttaataatagcatcaaacattttcaatagaaggggcacacatgaagatggactttcttatggcattaacaatagactcttttctgtggttatgacaatctatacataaaattcttgttccttatggctccagagattatctcaaaggtttattcttagtttcataatgaacagattattcttttggtgcaaaacagattattcttttggtgcagagaatacttatcttaaaagggtgagaaagtcctaagggctttaattataaattctggatgtcaaaaagacttcaaaattgtacgtgaataacattaaatctttcagaaaatacaataggctttttgtttgcttttaatacttgactaaaggcaggtcaacatctaagctaaaccagtaaacagataaagggtcaaatgattgttatagcaaattagcttctattcctttttcttcacggctattgtaccaacctgattcattgggtatgaatgagacctgcttcatctgaaaacttttaaaatagtaattcrcttttatggttcttttcttactttttaaaggaagagacttgtattatctgattatgatttgcatttattattgctgttacctttgcttctaaattaaaatctgaaacaaattattttactttttttggaattcataaagttttcttttttaaatttttatttattcatttattttttagagatagggtctcactctgtctcccaggctaaagtgcagtggtactatcatagctcgctgtagcttgaaactcctgggctcaaatgatcctcctgcctctacctcccaagtagctaggactacaggtgtgtaccaccacacttggttaatttaattttaaaagtttttaattttatttttttggtagagatggggcctcatgttgaccaggctggtctcaaactcctggcctcaagtgatccagaactcataaagtttttgataagcataaaagaaattgcttatataaaaacagattaatttcacttaggatttaagtttgcctatttctgggctctatttaatggaaaagttaaaatcagtagtaaactgtctagtttgctaataaacagtgtttyttaaactgttttgaacatactagtagagctctacatgggatatcaatttgaccgcttacttttcagtagattcataccataagaaaccaagataatttagtcctgtccttttgaaccttcctcctttgccatgttcaaatcagtaattataaaggttattttagttaaatctataattataaaagtaattataaatgttgggtattagtttattttttctctcatgataattcaacaagtatttcttgagcccttaccagatgagaagttttttctttttttctttttttttaaaagtagacttttttttagtgaagtttcagattcacagcaaaattgagcaaaaagtatagagaattcctatatatctcttccctctacatgtgcacagtgcacagcctcccccattattaacatcctgcaccagagtggtacattgttacaatcaatgaacctacattgagatatcattatcacacraagtctgtagtttacactaggattcatttttggtgctgtataccctatgagttttgacaaacgtataataatgtgtatctaccattatatcatacagagtcattttaactgtcctaaaaatcctttgtgtttttctgtgtgtttattcctccctaccccaacccctgacaaacactgttctttttagtttttatagttttgacttttccagaatgttatatagttggaatcatacagtatgtagccttttcagattggcttctttcacttagcaatatgcatttaaagctcctctgtgtcttggctttatagctgatttctttttagtgctgaataatattacatttttttaaatctgctgaaggatgtcttggttgcttccaagttttggcaatgattaataaagctgctgttaccattcatgtgtgggtttttgtgtgaacatgtgttttcaattcatttggataaatacctaggtgcttgattgccagattatatgatagagtatgtttagttttgttagaaactaggaagctgtcttccaaagtggctataccatttcacattcccaccagcaaggaatgagagtccctgttgctccagatctgcaycagcattttatgttgtcattggagttttgccattctaataggagtgccttagaagtagtggaagtgataataaagatgaatcagacctagaaactgccctcaaggaacattctaataggtcagacaagatgtgcacattgaaaataattatacagggtaggaagtgggtaaatgccagcagagcgatattagacaatgtattgtaagcattcagggatggagagattgtaactgcaaagtgtctcataaggaggagctggtcattaaaatgggtatagaagggtgagtcatatgtggatattcactgttgttctgggttgaggttggtactgagatgagccctatgggtagggaacagtttaatcacaggtatggaaatgggaaagtgtaggggcatacaaatgcagaggactgctaggtagcagtggttttcaggcattgagagaaatgacacaactagttttgtaggcattgtagataaaagttcaggtttggaatcagatagcctaggttaatggctgggcatggtggctcacgccagtaatcccagcactttgggaggccaacgcgggtggatcacttgaggccaggagttcaagaccagcctggccaacatggtgaagccctgtctctactgaaatatacaaaaattagccaggcatggtggtgcatgtctgtaatccaagctacttgggaggctgaggttggatctggtagatgttgaggatggtgagagttgtgaaagatcattggatttggttgcttagaggatggcctattaaatacaagaggtagattktgagtggttggtaaagatagtggaatcaccattttaactaaggatcagaggtaactttttgagagtgctgcttgtctggagcctccctctgactgttttgtgtcaggactagagtgtgatttatgaagattgtcccacattgcatcctagccagattccctgacttattttctttcccactttatgttaaaaaactggagaagttgctagaggataattgcttctcattttctctcaattcttccagatttaaaattgcgtatgataaaactgaatagacttttgcctttatacctaaatgagcctggattttcaacagtgattatgayaaattgatgttctgaaataagttggccttttgagaagaaaaaaatgaaattatagatcaaactggtcatttgagtctgtttgatggctttactcaacaaaacaagcaactctgtgttggtcctccggtgttacttttcaactcttataagctattaaaggaaagagtgagatggggaagcaatctgtagaaacccaagggatagagcagagttatttagggtagatccgtcttgtttgtagggcaagaagcaggaagcagtggtaagtaattggagaaggggtggaagggctaataatggatgtagaaagattacaagggaagctaaaggaggcttgaattgaattatggaacaggagagtcttactgatatggattcctccatatgagtttatatatagcaagaaggtctttttttaattgttcagagtattatagtaactttgatttacatatggaaaattagaagggaatatggcattcataattcaaattattttgagttggaattataaaaagagagttgtaatttacagaaaatttagtagtatctaaacatgtctcagtggttctcttaagaaattcttttactttaagttttggtgccagtttatcctttatttttcttcttaagttccaactcctttatttcatacgtttctagagctagactacaagggaagtaattcaagcctgtgtctactcatgttggagacaattggaatggggataaaacctgttttttgtttgatataaattataaaaatatatgattttttaactctttttttaaaattctgattcttgtagtagattccagacttactctttatattaaaaaaatttaaacaatttttttatgcttttaaagctagagaggggactataaaaatcagatctaagcacatatcttaggttttctggagtgatcctgacatttaggtattttgtgcgagtcagacagtctgtccttgtgtttggcttggaaaacatgtttgccgtaactagagctagtctctaaaataggtagctgattaaaaggtcacaaatagagctataaagaatgacaacctaacaaatgagtcactgtggtatttgttttttattgtctactcaagatttatattaaaaatatttttcatgtcatcgtttcctttctaatgcagttttcaacttgaccaacaatgtggatttggacaacaccaaaaagaaaatggagatataccaaaaggaaaacaaagatgttattcagaaaaataaattaaagctggtcggttgctaagtattttcttcttattttgtcttagaaacaaatgtttccacatgatactttaaaaagccatcttcctttaaaccagttacatttatagaaaatttagctgaaatttagaccagaaatatgaatatatgctgtataggtatgtaggtaggcaggcacacattactgtagcaaaaaccactttgacagcattatgttagactgtgctttcttaaggaagtggatccgtaagataggtgattgttaacgctagttttatctgcctgtataatcttctggtaagtgagcatttggacagtggtcacaaaacactggaggctcatttttatccttggacattaatttctctaaaggagagagaaaacccagacagacggtgatggagctaccaagagggagataaaacaaaaacactatttattagaaactaaaatgaattcatgattagatcagaggaacacatttgtaaactaaggttaactttggtttctcaattagttaccttttttgttttaccgaaagagtaacattgctagatataaatatgattttggtttgttttagttgatctcatgttgaagtttgttttgaaaatatctcaggagtcattattattatatgtattagaatgtattctataaagaaaaaattgtatgcatgcaaaggagcaattgtctaatttatacactttagctatcatttctatagtacagtttggctttctagttgtaggggaaagcagaggtaattacgtttgagatactttatcaggattttgtaataatcagtgaaaaggatacaagtatatttggatcacatagcttatattttcattttgtatttagaagagacttcctccttgtagtcttatagtgttttatatcagcatttctttcctgctgtaaaactctcaatgaattgatactacattttcattccattcatagctagcctagctttcttttaaaagtatcttatttctgagagcatcagtatgtcattaatgttactctctttgcctagtaaccttctctgggaacatcagaagatacatgcaaaataggtatgcgtaggtaaaatgtttcattaaccccaggtgttggtattacagatgtgagccaccacttttatcatgaaagggcgttacattttatcaaagccttttcctgcatgtattgatatgattatgtgattttaattctttattttgttaatgtatattaattgattttgtatgtcaaaccatctttccatcccaaggataattcctgcttggttatgttgtatgatccttttaatgtgcagttggattcagtttataagtattttgttgagaatttttgcatttttgttcatcagggatattggctcacagttttctttccttgtggtacctttgtctggttttagtatcagggtaataatgctggcttcataaaatgagtttggaagtgtctccctcttcaattttttagaaaggtttgagaaggattgatattaattcttctttaaatgtttggcagaattcaccactgccgctttttctctgttaggaggtgtgattactgattcagtgtccatactagttctaggtcttttcagatttcctgtttcttcataatttggtcttggtaggttgtatgtttctaggaatttgtccatttcttctagattaactgaagcgtaatataattaagtgttggtgtataattgttcatagtagtctcttatgatccttttatttctgtggcatcagttgtaatgtctcctctttcatttctgattttgagtcttctctctctttcatagtcttgcaaagagtttgtcaattttatattttgaaaaaacttaattttgttaattttttctgttctttttctgttttctatttcatttatttttgctctaatgtttgttatttattttaatcctttgttctgcttactttgagctcagtttgttattaaatttctagctccttgagatgtaaagccaggttgttatttgagatctttcttctcttttaaagtaggtgtttatcacaagaaacttccttcttagtactgcttttttgtatccctcaagttttggtatgctatgtttttgtttttgtttgtcctgaggtattttctaatttcctttttgatttcttctttgacccaatgattatttgagtgtattgtttaattttcacatatgtgcatatttgtgaattttccagttttccttctgctattgattcctggttttattccattgtggtcaggaaagatacttggtatgatttcagtcttcttaaatttgttaagacttgttttgtgacctaacttgtgacctatcctgtagaaagttctgtgtgtgcttgggaagatcgtgtattccgctgctgttgagtagaatgttctgtatatttctgttagttgttataacagaaatatacagaattataaagttgtttaagactcctatttccttactgatcttctttctgaaagttccatccattactgaatgtgagttaagtctcctactgttactatattgctgtctatctctcccttcagttgtcaatgtttgctttacatatttagttgtttataattgttatatctttctatatgttgatccttttatcattatataatgttctttgtctcttttgacagttttttaattaaagtctattttgtctcttattatgctctttgtttcagtgaatggtgccagcattcatccaagtgttcaatccatatttggtcagtctttatattctgttgatgatcactccttatcatttttaagcctcatccccactctaattagattattactttatttagggctcttatttctattctttctttttttttttttttttttgagatggaacctcgccctgttgcccaggctggagtgtaatggtgtgaacttggctcactgcaaccttcatttcctgggttcaagcgattctcctgcctcagcctcccgagtagctgggattacaggcatgtgccaccatgcctgactaattttttgtatctttagtagagacagggtttcaccatgttggccaagctggtctcgaactcctgaccttgtgatccacccgccgtggcctcccaaagtgctgggattacaggtgtgagccgctgcgtagggctcttatttcttatctgggttatttgaatatacttctaactagtcctcctattgtcagtcttgaacccaattgatctttatgtataccttactgcctctagtcatctttctaaactcatccctcaaattcccttaatatgttcccagtggccttagtatagcaaaattccactagtatggtataacagaatagttgttttatttaatagtaacgtgtctacatgaaataaagtaaattctattttcttcaatatggaattgctacattattaaataataagtgactagtgtgttttatgcttccaataaagaaagtattagagtgtggtatatgattgctcttggctcctaaatttattccacgccrtatataaatttttgttttagactcgagaacaggaagaactggaagaagctttagaagtggaacgacaggaaaatgaacaaagaagattatttatacaaaaagaagaacaactgcagcagattctaaaaaggaagaataagcaggcttttttagatgagctggtatgtattaatgctaattgtgattgtaaaaaacattcttcaggatttacctttcctagtaggctggatgatggcatttaaagggcttttccacagtgtttgtaatctggttcacctttagttttgttggttatgtattgatatcagtgtatttattgctgaataagaggttgccctccatccacactgaacaatatgtttttatgctcacaattctgtgggttaggaatttaagtggttcttttgggcttttctgcttccctaatgtattctcaggacacctctccatgtggttttgatagcgacaggaggcagccaaatgcctaggcagatagggacgggtacccagagaaaccccatctccatgttgaagacagtttaaaacctgaaagccaagctacaagttaaatccttggaccagattgagaacttgtcctcctgtttggtgtgctttcctctgattgatccccactcttcacctattttatgtatatctaccctttcctaattggttttctacactgtcatgcccatctttgagtagtgtcttcacttcaaccttttttgcttactcataagctaattcagcacattctcctcatcctgtgcctataaagaccccagactcagtaagtagaggaagagacaacctgacttcggggaagacgacttgctcttcctgtcccctctccagctcccctctctgctaagagctgttttcatcgctcaataaaattatcaccttcgccatcttttaaccatccctgtgacctcattcttcttggatgccagacaagagcttgggacccaccaagtgtgggtacccagaaaggctgtcacactggcactttgcccttcctggtggagagcagctgccctaggtgacaaggccagaagccaactgagctgccaacacactgttgtctgatggcagaactaaaggagcactgtaacacttcccctggggctttggggttgtgggccccctcacctgggcactgccatgttccccttgaggcaacatgcctggtctggctgtgggccccacgtagagtttgcttctgtgtccgtgcctggggcggatggctgggtcctgcacttgcttgcttgtgtctggtctgactgcgggccccatgcaaaacttgttcctgtattggtgcttggagcagctggctagatctgcgctgactcacccacgtgctccctcccacatagagttgagtgcagtgggtctagtagaggggagtccttaccgtgaatctagtgaaggggctgactacatcagaaactgcatcaatttctgtaacagtgtgattgtacttctcacatgttggctcagggttacaagagagaatatcccaagaataaggaggtagaagatgctaacattttagggcttgggctaggaaactggcacagcactgattccaccatattagtaaaagagcccactcagttacaaagggaatggatatagatctcacctcctaatgggagtgtgatggccatctttagtccacacagtatgtactggggaaaactatgtttttctagaatttggcataatataaattcatttgggatactcagtctctatcccaatgtgagtttagtgataagaattatgaaaatgactttcattttcatattgtagtttgtcttacccttatgcctatttatttatatcatgccaactactatgaaggatttaaagtgatttcctagataagagtattgtttgtggacatggcactacttactttgtgtaactctaagaacgatgttaaaatgaggttctagtatattttacttctatatttttaaaaagatttttgtttaatatccattttattttcagatgagagagtgacattataactgagatgagccagtatattcttgatagattgtttatatggctttaagctaactgactaaaatacattgtttctgaagcacttttctcctgattaatactatttttctaataatgagctcattttggctccatgctgaagtttatattgactgtttactttgtgacaatatattttatatttttgcataaaaaaatagtgtatttttgcttgaaagaaatagcggggtttttgcaaattattgttttccagcaattagcttcctaggtagtcaaccttgttagataatgacagtaataataactaaggtttatgaagtgtttcatggatttattactatattatttgatacttataaccctgtatgatattgatgacttcacaaaccggaaaatcttcctctccaggaaagtctttttgcattcttctctttccctttatgttcatataatttatttccctgaggcttttgtgtttgtgtgtgtgtgtgtgtatgcagtgttaatacacttaactttcttgtctagttgataatgctattatcctatgattggggaaaatatgtatatatgtgttcttctactgtgcttttgccaaaaaagcatttaagtcagttaaccaggagtaaaaaaagagaaagcaagattacttaaattataaggaggtgagaaactaaaggaaaaataagggtaagggcattcatgaggcttagatagaaaacactgtcataaaactctattttctatgactggaatgtgaatttggctctaaaaatgaggacaccagcatattaaatagaataatgacgccttccctagcaactttcattagttctttcttgaaactattaagtggcaggtatggctttaacagtgaaatgacatgttgtattttatatttttgtagctgtttggtgagaaattaaaaactttaaaaatgaattagtaaattgatgttactaattattagtatatagttactaattataattgttttattgaaagattcttccccttatcattttatacaaagagttacaggctcttttttggataatgcttctcttctatataattaattgaattaatcccaaatatagaactttgatagaaaatatgcttttaacattttatgttccatctaataaaaaaagtttttagattttattttgaggttagccagctttgcataacaattattcttgcatattctttttccctttttttttttgagatggagtcttgctctgtgccccagctggagtgcagtggcgtgatcttggctcactgcaacctctgcctccctggttcaagcaattctttgccttagcctcccgagtagctaggattacaggtgcctgccaccatgcccagctaatttttttgtatttttggtagagatggggtttcaccatcttggccaggctggtcatgaactactgaccttgtgatccacccgccttggcctcccaaagtgctggggttactggtgtgagccaccgcgcccagccgcatattcttttagtctttaaagtactgttttgctgcctcattgagctgctattgacatgaagctcccctttgattcagtgaggcatgaagcaagatgtgaaactaccattgttgtacattgtgtgtaatctggagttaatattgatttttgtgagttctttctcccacttcctgttttcttcacctgcaagtcattactgcacatactttcctcagtgtttagatcatataacatgatgattaaataattcttagtaatttactgtattcattagtgcaattaattacaacagattggtttagaataccactgcagtttgaatktctggttttcatttttaaacttatttttagattttgttatgtttatttttcagtctttatacaatgttataaatgttaaaatactttaaatttttatgactaatgaattcattaaatttatttttatcctcttgaatccttattaactaagtaaaagaacgtatttctttttctgtatatgttcatgtgtgagattttgtttaaaaaacaatagcatttgtaaatatgtctagaagcttaattcttataattaatctctggacctaatttacacaagtactacttattagaatttttttcctcctgtttttggttctggtctttgtgccaaaagtcactttttaaccttttaaaaagtatttgcattatattatactgtatgtgacgggattttaatgttatggtcttaatgtttatggcttagtatttgcagtaatgttggctaaaaggtccatttatttaatcctaactgtaaattcaattttaaaaaacagtttggaaaaagatttttaaacaggtcctggcttattaaatctttttatattcctgtttgaaaattcgcttcagtttatgtcttaaattttgtatgggctaatattgttgtcaaacgcagtaggtgatttttattagaaatattgtttgccagatggcttgcttaaagtcagttaaaataatcttttaaaaatggtcattataaagcttttaatgagtattacaggcagttcttactaaaatttctttaaatattaaacagtgtgccttcaggcaattaatacaggttagggaaccttttaaggtaaaatgtaatgcaaagaatgaaataacttgaaaggctaaatctgcatgttagatattccccagagcatgcatgtttcacatagtttattttactccattaatattttttgttgttggaactcctacttaattctagtttaacacttagtaaggcttccaggcttcaaaatttgagtgctaaaatagaataaagtaggttggaactaaattctgtgcttcaatatcaaaagtgttttagatccttagaatgtttgtttttattagatttcagctgtttaccaagacactttaacattcagttccttttatgtgaatgtgaaaccaggattaaaacaagctaaagtcttgactagcaactttttttttgaagttaatacgttgcttttatgtaagaatttttgctttttaaaggaaataccagttaaagaagagcacttgaattgatttagagtataaattgaaaagcaatacttttaactttttagctaaggaaatttatttttcttttgttagtttctacatgtgaaaagatagaatagcttttaaaagatatttttttgatcacagcccattaaaaatgttctttaattttatattttattataaaattcttaatrtaaatctagaatagctgcaaggaatcttagcaatacagttactcatgcattactaatgctttggtgtagaatataaaaggtattctagtatattctcctcgtactatatttcatcacttttccttcattattgttaaagccaggtcttaatgattttgctccttaataagtttacatcttataaataaataaaatttgtgttcttccatttactattaaaagttttaaactttgtaacattgctcttgcaaaacacttctattataaaatcttgatgtgcaactttattctaggacaattctattgaattaagttgcttatttgagttatttctatactgtaaccttaaaccaattcctttaagtctgttaattaaccacatttgtgcctaaaaaattattaagttgctagatttggaaagaaaattaaaatctgtatgtttgctttgtgctgtgaaatgttaacaatagagtttcttcaggatcaaattctgtgtagtcactattttaacatctatagcctctttgaacaatatgttttagcacattatcctggtataggagataaaaatgtatttgaccttcatctctgtttatgatacagaaaattctcaatctctctctctgcttgtgtgtttgtgtgtgtgtgtttgtttgtgtgtgtaggaaagagagagagagatctcttcttcctcctggtacgtccttctgcatatgtttttggattcttatttaactgaaaactcagaaaggaaaatgtctggatatcatttagtttagaccttaactccacagcactttaaagatgtaagaggacttcttgttaaacagaataaataacagtctacatataaaaattagtaatttgcttatggtattaaaatgtgtctgggtgcttataattaatatattaaaatgtttaactgtcattttgttacttaagttagaaaacatagacttaaattttaaaagtaagttagtaaaggagaaaataaatatacttttggttgtacttacaatagtttcattgtgcaaaatagaacaaggatcatttccaaacggtctcaggtgaaatctaatgggaaacaatttcaaactggtctaaatttactggtaaaaagaatgcgtcttagataaacatctgatctaagttatagtactttgtactactctttttgtgattagcttatttttttcgttttaataaatgtggttggtttgctagttgaaataggaacttttaatgtggattttataaaaatacttgtttgcaggttattttgatttatgaatctacaacagccttttcttattatggaatgttaatattttttgtaaagtgtcctccataatgtgaatatttagtttgacatgaaatgcttrtggaaaagacataatttaaaataaaagtcttgttgtttttagttttccctttttacatttcttaytgaacttgaactattcttacaggagagttctgatctccctgttgctctgcttttggctcagcataaagatagatctacccaattagaaatgcaacttgagaaacccaaacctgtaaaaccagtgacgttttccacaggcatcaaaatggtaagccttattttaattgcttgtttgaaagatattttttcaaggattatrctttataattttacacgatttctatagtaaaccgaaatgttcagatgtttaagaacagtgtctgatctagttttaggtgtctggaaatatggatgggtgcagtatgaggaaagtgaaacaaataattttcagagtatacaacacaatttttttgtatgtgaattgggtttgtatgactttcttactctacttacatttttaagcttgtagtgtagaaaaaaatttataaatattgtttggagagtagttaccatctgcagatatgaaatgggaaagcaaatgtatcaattagtgttttcttctaaacagtcttcttcacatatatatttttaaaaactctgaaagccatttttagtttctagactgatgaatagattaatttgggtttcaaaaaatttattttatattgtattgttatattttattgtttattttagcattcaagggaaagattttataagccaatgatgtttttgtatacttttacaggtttttttttttgtttagaaaatatatactttggcatattaactttaacatgtgtttaatatttagatgtttgagatgtagccactctaaatatgtagcattcaaattcctaattatcttttaaaatagtctcattagagtagtataaaatgtggttagaaaagataaatgtttgaggtgatggatatctcaattaccctgttttggttattacatattgtatgcatacaggtatcaaaagtaccacaaaatatatgcaactactctgtatcaattaaaaactggttttaaaaaagttgtggcagcactacaaagtcatggttacggatttggactttgaatccaaacagacctgagttcaactctcaacaacccatttatccagcggcttgacatgaacaaattactttgcctttccaataagcctttttttcccatctgtggaacggtgatgataatactgatctcataaacgtgttgggaaataatgtgaacaaagtacacagtatagtacttggcttattgtaagctctcaataattgaggttagtttttattgataataacgagttgataacacaaatggctatactaattccctaaatctttacctagtttttatatacataaaattcatttttatacatagttttaaaattcaagatgatggaggttgcagaatctttgtttggcttttatcattatatgcctgcatttcaaagtcagtgttaatgacatgcaatattgaagtggtgggagtttactggtaaaagaccagtaaactcagtaattttcaagaataaagtctagtattcagatgacacaatgtagctacaagcctcaggaatgtatcccctattgtaaattgagcatgatgagtatgcaagaacgaatgcctcaaaacattatcaaagtatattttaaattagagataatactctaattttaagaggcaaaggaccgtttctttcctttgacctcaatggataaagtcatatttaattttactgttgcttccactttagcaaatgtgtagcagctgctcctattttctagttctcttccttttatagtatatataatattaaaataagatctggcttacagtctaagtagaagatacaagaactcatcttaagtcttttgcaactttttttttttttttcagttgctgactatagaatttgaaaatctagatacttcggtattaagttggctctacttttaaaatttatcttgaatttacccacttctctccacctcttatcatcytaggataattgccatcatttctttagtggactatcacagtaacattccacctggkgtctctattcatctgtgtaccccataatctagtctataagcctttgggtggtttcctaaataaatgaatgatggtaaataaacaatattaaacaaatcagctcatcacctccttgcttactatcttcctatgtcttcccagtacacttagaataaaattcagaatattatctactttctcacctctgagaaagtgacatttgtactaagaagtcaatggtaaaatggagttagccatgcaaaaatacaggcagagaaaagagcagtaaagaaggcctaaggtaagaaacagcattttctagaaacagacaaaagatactgttaagagaatactttccctactctgccttgctccttatgctcaattcacactgaccgtttgactattctatctaaagtatctttctcctgcccccatccacattatgttatgctttttaaaattttaatatagagacagggtctcactatgttgcccaggctggcctcaaactcctgagctcaagtgatcctcctgccttggcctccaaaagtgttaggattacaggcatgggctaccacgcctggcccatgttatgctttttaaccctttataacatatatcactatcagaaagtgtcttatgggtacactgtttaatgtttatctttaccactggaatataaattctgtgtacctagaatgatgtttgtctctagtacctatttaatgaatgttcactgtggaccttcattaaatatttttaaatgaatgactgaatcttacatattaggctcacatttaatagaatgaagatcctgaagtactttcaagtttctgtgactttatggtgtttactctgtttggaatatacttaactgcttatgaaaactttacttataatttatgcatcgatcaagtgtgattttcatgaaccctcttttgtgtggaatttaattgcatattctgatgcttcccctaacattttatatgtacttttattatatattgtagctcctgccttgtattgcaattggctattttccatgccggtctcattttagatgagcttccttaaggacacaatgtgttctgtggcataactttatgtgttcttgtggggactaaatattgtactatgtaattattcaaaaaatttttttgaataaattattctcatttttcttaacttcagagcattttgctttgccattgggagattcacatttgggtcaagaagaatttgatgcaatgtacagccaaaataaaaaaattgtttttatagatatatctaaatttccatcactctatcatatttttacattccattaccaatgagaattacaaattatgtatttctcttcttctgtgttcttatcttttaatttttacctgtggtatgttttgaaatttatataacctggctagccctcttagatagtcttagtgcttttctttggcctaaagagaggcagcatcagatctacaaccttttttcacctagacagaatagttgctggtggtctttctgtgtttcgtaatgttctatttatttaaaaatgaaatgaattggaatggcgagatgtaaaagtttttgaagatcactgattaataaatctgctaacctgaacatgatatgaacaaaatactctgcaatgtatttccttgaggagattaggaaatatatccattgtggcaaagttgcttcaccagcatactttttaaattatttatttattttaaatttatttttagagacaggatcttgttctgttacttcaagctggagtgcagtggtgagatcctagctcactgtagcctacttctgggctcaagccatcctcctattgcagcctcccaagtaactgggtttacaggctcacaccaccactctgggctagtttttaagaattttttttttttttttttggagaggaggcagggtatagttatgttggccaggctggtcttgaattcctggtctcaagcaatcttggaacgcctcagccttcgaaagtgctaggattacaggtgtgagccagtgtgctcaggcgggagcctactttattttttattttgtttttgagatggagtcttggtctatcgaccaggctggagtgcagtgacacaatctggactcactgcaacctctgtcccctgggctcaagcgattctcccacctcatcctccccagtagctgggactacaggtgtgtgccaccacacccggctattttttgtaattttggtagcaatggggtttcaccatgttgcccaggccggtctggaactcctgagctcaagccacctgcctgccttggcctcccagagtgttgggattacactgtgcccggctgaggagcacacttttaatgatgaaagaagtttcaatctcagctcatcttggagcaaatttaataaacctccctctactctgccttttaaagtattggatgaagaggtgggtcttacaccctggctttaaggtcaacaaccttgaagactgacaaagggatcaaattctaaaactgaaaactcactacttggagtactctccctttagctatccctgaattctgtgagagcttgttagcagcagtgctctctgtttatctgattacttttgagtggggattggggagggggaatgtgttgcacagattttctttttgcctgaaggggtatcttaccctgagtttgtttgtaataatgtttaacattctgctgcaaggcatatagatttggagaggaaaaaaaatttctatctttacattgcctttatgttcttctgaatgtctttctctgagtggtatttaagacttctattacctttaattttctttcttgcatcattaccttttatatctaagaaatcactgtacttgtgggctgggcatggtggctcacgcctataatcccagcactttgggaggctgaggtgggcggatcacctgaggtcaggagtttgagaccagcctgggcaacatggcaaaaccccatctctactaaaaatacaaacattagccaggcttggtggcaggcgcttgtaatcccagctacttgggagactgaggcaggagaattgcttgaactagggcggcagaggttgcagtgagctgagattgtgccactgcaccctagcctgggcaacaaagtgacactccatttcaaacaaaaacataaacaaggctgggcgcggtggctcatgcctgtaatcccagcactttgggagggtgaggcgggtggatcacgagatcaggagttgaagaccagtgtggccaagatggtgaaaccctatctgtactaaaaatacaaaaattagctgggcacggtggcaggaacctgtaattccagctatttgggaggctgaggcagaagaatcgcttgaaccagggcggcagaggttgcagtaagctgagctcaagccacagcactccagcctgggcgacagagtgagactccatctcaaaaaaaaaataataaatcaccattcttatgagattgtgataaatataaaaatgccaagctttgatttgtaatatatgaatatttttcttttccttttatgtatctattcatttttctccccaactgcccatccagctactttctttgaattttaaaattgcctaccttgtttgtcatatgtgtactagctattaggttataaacatcttgagggcagaggcttcatattttaacatagttttatatgattgtggctatgtaggtacttaaataatatcagatattcatgatcagtttcaaactttcaaatgttggaagtattaacacatcttgaaataatgtaaagacaaatactactcaataaggaactaccaaagtatttgaattaggaggcaataaagtatagaagaaagaaaatgggcataacgggattaaatcccagatttaccgttattagatatgtttccatgggtaagatattgctttactcttctgagtttgttttctcatttgggaagatgagaaatgttaacttcatatgattgtttagaatattgaaatctatacataaaatgctaaagctggtgcccaatgtatgctagccatgtggtaaatagtaataattagcaaccataatgttaccattaatgtttgttatttttcgtagttagatatataaatgaattattttataatgcccttgaaccaaatgctgaatattgttataagtattctgtcacatacttaagttatattactctcaatgtgtgttaaaatattggatcacttacccccaccccattggatcaattccagatggataatagaaaagtaaaacatccttaagagagtgggaaaaaaacaagccacaaagtgacaaaagttatttacaacatatgtaactaataaaaggcttagatccagaaggtataaataactcatatatgtgatctagagtctggaacaggcatttctaaaaataggatagccaatcctcagcctcattagtgactggtgaaagaatatgtagattaaaatcacaacacagcactaaatacccactagaatggctaaactggaaataaaaatcacagttggttcaagggaaaggtaaaatttagaatggcatagtatttacatgaattcattagtgtcaattttttactgaatgtggagactgacacagaatacagatgaaagtctaaatgtttatgaagttaagtatttttatagtctttagaaaaatcaatcctgaatgaaggatgaaaagtaacattaagcaactatatcccaggggttgattttgttgaacgcctgctataagccagcatagtctggctgctggatatgcaagaatacagacattacttaagaatttgtgacctatgatagttcttttttataataagtattactttctgtttttatatcttcataaaatagatggtattcctatttttacaaatgtgaaaactgagtctttgagaggttaggtcacatttaaaagatgatgctgaaactcattctctttctattacatctcatttaattaatgaaaatattaataaacttacacattctgattcaggtgtcctctgagagctaagatttgaactcttgtttctaatagtgggctgattgtatgacctaggtaatttaaggggcaggagtcagcataataactttcttttcctgatctgctctacttaaaaaaagtcaaaacacaaaatgaagtcggatgtgctcaacttggagaggaaccaaggaaggatgtataaatatgattaaggtttctggaaatagatcctttgagatgtgacagaaaagactgaatttatttgtttaataaacctagagawagttgaagggttcaaaatgggcataaaataatgactaagaaatgaggattttattattatatattcacataggtagggttcagtcagtcagtgaacatattttgattaggaatattatgaaggttgtgccggatttattatttgaagtatattttctaggaattaaactgtcagggggtggagtaatgttaggcatagggtcttagagaaattaatgtaatttgtgacttcagaatttaagaaggttctacttatcactattttatgcatgaataggagaaatttttttcttttttttttttttttttgagatggagtctcactctgtcccccaggctggagtgcagtgatgtgatcttggctcactgccacctctgcctcctgggttcaagtgattcttctgcctcagcctcctgcttagctggaactacaggtgcatgccaccatgcccggctaatttttttttgtattttcagtagagacggggtttcaccatactgaccaggctggtcttgaattcctgacctcatgatccacctgcctcggcctcccaaagtgctgggattataggcatgagccaccgcacccggacagaaacttcattttatagattattgtgccctctgtgtggtgatagcttttgaactcttaaagtgagagctacaactttgtttcttggccaggtgttagttattttgatctatttggttcaaatcctgtcaatataattatgcagccttctatttctttatcattttacaaatacttctaattatttttacttagcttatggttatggttactattcttcattacatcattcttagttgaaccagtgaacagacctcaaagttttttttttccctgattcattactagataatttgtgtcaataaatatccatgcaagtaaatcttagtcttttyggaacaagcgaaggcacattggtcatctcataaattaggattgagattctacggctgaggatctggtgcttcttcattctattttgyttgtttgcaaactgaaaataaaatgagtcacaaagataacctatggatgtcaaaagataattgtttttatgtcaaaagataattgttttatggatcacaaagataacctatggatgtcaaaagataaaagtacttaaaaacaaaagaattgtttttaagtacttttgatagtctgtggttggtttggggagtagtatggagaaacataccatgcattaacaaaggggaaaactttttaagtattttaaccctgatgtttgaagagtttaaaaaaatattatctatgggtgagccagaagggagcagagtactcatttgtgatataaattgccttttctgagtgcaacagatagtatttagctgttcgctttcaagcattgcatattcctctgaactcattggaagatctaaccttgataaaatatgtgagttatagaaaattaatacccgttcgtatctgaaaaagaaaataaaaattacattgagcagtcagttatgtcctgtaaagccataagtttgtgccaaacagcttaggtgctttaccattttgccaaagaacaaaaaayaaaacttgaccaggtgttattaatttattctatttttaatatataatttgcacttaggtagtaaatcaagtataacaactaaagaagtcatgtgccctttctcaagtcttgtgatatgcacatagcattaatttgaatctataaaggtattttgaaatgtaaatcaaattaataatagtcttatcagatcttattatggcatataattaactaggtgagtatcaggtgattactttctcttagcttttaaatgtctccagttatgttatttcactaaagttagcagtatattctaattttcacatggatatccctgaagagttacatgtaagtaaatagaaatttggttaattccattctattttaaagaaaatggaggttcttaaaacttaagataatccttggtgagtattttaatgtgacctaaataaaatttttatgaaatgaatagcttcatgattaaaactgtaaatttgaattttgttatttcagaattgtttaaaacaggtcgtccttattatattattagaagtttgaattgtggcttctctactatatatactaattgtttggtcttgggcaaatcactttacctctttaagccttaattactcaactcttaaaaaagagattatgcctacattatagagttcctgagtattttgtgaagtaattttataaaactctcaggatgcctggctcgttgtaaagatactaagtataaataggtatagatacaaataaaaactataatagmccagtaaattgtgattgaaggtagrgtttgtgacttataactgttaattttgtaccgtgtagtttttactagttattttatctatagactcctatatagtaggaaaaaaacaactcattttcccctgctgcacatatccagcacaraacacttttggtcaccaaaatgtgttttttttttttggttgttatttcgttttcttttctgtaccacaccaaccatttctgcagcagacaccaataggatttcctacagtttaacccaattctgacactaaccggaattagtgcaaaccccactgggtaagatcccagtaccacacaactgctcccaacttcagacatcaatcgaaagctccaggtggtaacctgtactgttgactaactggctataaattgaaggttcccacgatcccttcctgtggttcaattatttgctggagtggctcatggaactttgggaaacacttatgtctactgatttattataaagaatattacaaagaatacagatggacagctagatggaaaagatgcatagggcaaggtatgtgggaagggacgtgcatcttccatgccctctcggggtgggctaccatcctagcacctccatgtgttcagcaacctggaggctccatgaatcctgtccttttgggtttttatgggggcttctttcctatagccaagattgataaatgactggccactggtgattaactcaacctcctgcccctcacctcttyccagaggttggtggaactgaaagttcccaacacactaattacaaagttggttccctttgcaataagcccctgttctgaggctatccaggaccacccagccatcttattagcatacaaaaagacaccattttggagactacaaacgttttaggagatgagtaccaggaaatgggatgaaaaccatttgtatttcttatcataaatcacaatattacaagccccaaatgcctagtaactctttcttatatattcctatatttctaggtaacaattcaattgttctatggatatttaaatgaaaacactgaaatatttagtgtcaatagttgggaaaattcacaaataatgaattatactctatgagttttatgtaatattctttcctttaccacggtaaaggaaaaattgttratagtcaaactgttggcttcagaatttatggcagtggttgaatttattccagaaaatttgtctcatgatctgtctagacatgagcataggcagaaataatgagtctggattttcagttatatcagttactttgtaatgaggacaaggtaaaatcagtattctatgagtggtgggaagctttgattcctttagtcccactgagggtaacattaaaggtgcttgcaaatgcagaaatattcttagcctaggatgtagaaataatggttttctgcttaatttatgaaacaaacattttcctacaaagtattctacatactgtatactgcattgcttaatgtaatgaggcagatttcagctttatagataattatattgagtgccaatctgcctatcagtagagttttatcaagttcctataacatttgcaaagcagtggttgctgttggtgttgcggatatagtaattttacaagaattagaattagggaaaaagaaggaagatgtgtttcaatcagtctctgaacattaactcacttaatcgtgaaaactatcctgtagggttgatagtggtattctcatttatgaggagtggagtatggaagacttaaattaaacctagagaaaagtagagtttcagaaaaatggaaaggacgaaggaatttcacatttaaaaatgagtatgtggaagaattgttagcaaaagaatggagggtatgaatttagccaagtttattccatagttttcagtcaggaattttcttctgatgaacttgcacactaatttcaaaacacacattcattctttggttcctagaaggttatatgaaattcagatacatagattcactttgatgtgttagagctttttactagttagtgatctgttgaataagttaagggacactaaaatttagtatttgtaaatgttgaaataaattttctttttttggtgattgttttagagctatgattcagtattttcctgagaagtccggctgccacaaatgtttgggaatcttataaggctccatctgcaaatgctcatgaccagatatttcctgcgatgatttttaatgtaatattttaatttttcagctaagcagacttagttttcctttggaattttatcaatgcaccatcagtattgccttgagttaactgtggtttttgtgttactattatgtaggaaataatattaggtttttctttggttgatcattttgttatataattcctatacaatttttattgctatttattttggtcctcaccacttcttctgcctttttttttttttaaatcacagattgtttatgtatcagaatacaatttgccacaacttcaggggctgtggttaagtttgaaaaccaaggattacattcagttatttttgcatactctctaactttcttaaacatactcaactgaatggatacattcccattctgtcagtgccgtgcctcctgttaacatttttctacactagaagctcttcccatttttgctgagagagtgtctggcatcttctcccagcctccattcctaatggtggctagagctaagaatgtattgctgctttcttttgttcctttttttttttttcaatacttttaagttctgggatacatgtggaggtttgttcttgggatacatgtggaggtacatggagatacatatgggatacatgtggaggtaagttcttgggatacatgtggaggtttgttacataggtatacacgagccatggtggtttgctgtacccatcaacccatcatctacattaggtatttcttctaatgctatccctcccctagctccctgcccccagcaggccctggtgtgtgatgttcccctccctgtgtccatgtgttctcattgttcaactcccacttatgagtgagaacatgtggtgtttagttttctgttcctgtgttagtttgctgagaatgatggtttccagcttcatccacgtccttgcaaaggacatgacctcatccttttttatggctacatagtattccatggtgtatacgtgccacattttcttcatccagtctatcattgatgggcatttgggttggttccaagtctttgctattgtgaatagtgctgcaataaacatatgtgtgcatgtgtctttatagtagaatgatttataatactttgggtatatactcagtaatgggattgctgggtcaaatggtatttctgattctagatccttgaggaattgccacactgtcttccataatggttgaattaatttacactcccaccaacmgtgtaaaagcattcctatttctccacaccctctctagcatctattgtttcctgactttttaatgatcgccattctaactggcatgagatggtatctcattgtggttttgatttgcatttctctaatgaccagtgatgatgagctttttttcatgtgtttgttggctgcataaatgtcttgttttgagaagtgtctgttcatatcctttgcccactttttgatgggattgtttgttttttttcttgtaaatttgtgtaagttccttgtggattccagatattagccctttgtcagatagatagattgcaaaaattttctcccattctgtaggttgcctattcactctgatgacagtttcttttgctgtgcagaagctctttagtttgattagatcccaatttgtcagttttggctgttgccattacttttggtgttttagtcatgaagtctttgcccatgcctatgtcctaaatgatattacctaggttttctttcagggtttttatggttttaggtcttacgtttaagtctttaatccttcttgagttaatttttgtataagttgtaaggaagggatccagtttcagttttctgcatatggctagccagttttcctggcaccatttattaagtagggaatcctttccctattgcttgtttttgtcaggtttgtcaaagatcagatggttgtagatgtgtggcgttatttttgaggcctcttttatgtttcattggtctatatatctgttttggtaccagtaccatgttgttttagttactgtagccttgtagtatagtttgaagtcaggtagcatgatggctccagctttgttctttttgcttaggattgtcttggctatacagacttttttttttggttccatatgaaatgtaagtagttttttctaattctttgaagaaagttaatggtaccttgatagggataggattgactgtgaatttctttgggaagtatggcctttttcatgacattgactcttcctatccatgagtatggaatttctttccatttgtttgtgtcctctcttatttccttgagcagtgatttgtagttctccttgaaaaggtccttcacatcccttgtaagttatattcctaggtattttattctatttgtagcaattgtgaatgggagttcactcatgatttggctctctgcttgtctattgttgttgtataggaatgcttgtgacttttgcacattgattttgtatcctgagactttgctgaagttgcttatcagcttaaggagtttttgggctgagatgatggggttttctaaatatacaatcgtgtcatctgcaaacagagacaatttgacttcctctcttcctctttgaatactctttatttctttctcttgcctgattgtcctggccagaactaccagtactatgttgaataggagtggtgagagagggcatccttgtcttatgccagttttcaaagggaattcttccagcttttgcccattccgtatgatattggctatgggtttgtcataaatagctcttgttattttgagatacattccgtcaatacctagtttattgaaagtttttagcatgaaggggtattgaattttgttgaaggccttttctgcatctattgagaaaatcatgtgttttttgtcattggttctgtttatgtgattgattatgttttttgatttgcatatgttgaaccaaccttgcatcccagggatgaagctgactggattgtggtggataagcttttggatgtgctggtggattcagtttgccagtattttattgagaatttttgcatcaatgttcattggggatattggcctgaaattttctttttttgttgtgtctctgccagattttggtgtcaggatactggcctcataaaatgggttagggaggagtgccttattttctattgtttggtatagtttcaggaggaatggtaccagctcccctttgtacctctggtagtattcagctgtgaatctgtatgttcctgggctttttttggttggtaggctattaattactgcctccatttcagaacttgttgttggtctattcagggaattgacttcttcctggtttagtcttgggaggatgtatgtgtccaggaatttatccatttcttgtagactttctagtttatcttcgtagaggtgttaatagtgttttctgatggtagtttgtatttctgtgggatcagtggtgacattctcttcatcattttttattgtgtctatttgattcttctctcttgtttattagtctggataatggtctatctttttcgttaatcttttcaaaaaaccagctcctgtattcattgatttttttgaagtgttttttgtgtctctatctcctttagttctgctctgatcttagttatttgctgtcttctgctagcttttgaatttctttggtctttcttctctagttcttttaattgtgatgttagtgtgtcgattttagatgtttcccacttcgtactgccataaatttcccttttaacattgctttagctgtgtcccagagattctagtacgttgtgtctttgttctcattggttcaaagaacttctttatttctgtattaatttcattatttacccagtagtcattcaggagcaggttgttcaatttccatgtagtttggcagttttgagtgagtttcttaatcctgagttctaatttgattgcactggtgtgtgagagaccatttgttatgatttttgttcttttgcatttgctgaggagtgtttaacttccaattatgcagtcagttttagaataagtgctatgtggcactgagaaggatgtagattctgttgacttgaggtggagagttctgtagatgtctgttaggtccactttctctagagctagttcaagtcctgtatatccttgttaattttttgtgtttttgatcagtctaaaattgacagtggggtgttaaagtctcccactattgggagggagtttgtgtgggagtctaagtctctttgtaggtctctaagaacttgctttatgaatctgggtgctcctatattgggtgcatatatatttaggatagttagctcttcttgttgcattgatccctttaccattatgtagtgcccttccttccttccttccttccttccttccttccttccttccttccttccttcctaccttgctcccgccctccctccctccctccctctctctctcattcattcgttcattcgttcaaagtcagttatatcagagtctaagatttcaagcctggcttttttttgctttccatttgcttggtaaatattcctctatccctttattttgagcctgtgtgtttctttgcacgtgagatggatctcctgaatacagcacactgatggttcttgactctttatccaatttgccagcctgtgtcttttaattggggcatttagcctgtttacatttacgattaacattgttatgtgtgaatttgatcctgtcatgatgctagctggttattttgcccgttagttgagcagtttcttcatagtgttgatggtctttacaatttgccttgtttttgcctgtaccagtgttttctttccatatttagtgcttccttcaggagctcttgtaaggcaggtttggtgatgacaaaatctctcagcatttgcttctctgtaaaggattttatttcctctttgcttatgaagcttagtttggctggatataacattctgggttgaaatttcttttctttaagaatgttgcatattggcccccactctcttctggcttgtagggtttctgcagagatccactgttagtctgatgggcttcaagggtaacctgacctttctttctggctgcccttagcatttttccttcatttcaaccttggtgaatctgatgattatgtgttttggggttgctcttttcgaggattatctttgtggtggtctctgtattttctgaatttgaatgttggcctgccttgctaggttggggaagttctcctgaataatatcctgaggagtgttttccagcttggttccgttctttccgtcactttcaggtacaccagtcaaacgtaggtttggtcttttcacatagtcccatatttcttggaggctttgttcattccttttcattatttttttctctaatctcgtcttcacactttgtttcattaaattgatcttctatctctgatatcctttcttccccttgatcgatttggttattgatacttttgtatgcctcacgaagttcttgtgctgtgtttttcagctccatcaggtcatttatgttcttctttaaactgcttattctggttagcaattcctctaaccttttttcaaggttcttagcttccttgcattgggttatatcatgctcctttagctcagaggagtttgttattatccaccttgtgaagcctacttctgtcagttcatcaaactcattctctgtccagtttgttcccttgctggtgaggagttgtgatcctttggaggagaagaggtgttatgctttttggaattttcagcctttttgcactggtttttcttcatctttgtggatttgtctacctttggtctttgacgttggtgacctttggatggggtttttgtgtggacatcctttttgttgatgttgatgctattcttttctgtttgttaattttccttctaacagacaaacccctctgctgcaggtctgctggagtttgttggaggtccactccaggccctgtttgcctgggtatccccagcggaggctgcagaacagcaaagattgccggctcttccttcctttggaagcttcgtcccagaggggcactggctagatgccagacagagctctcctgtatgaggtgttgttaaacccctgttgggaggtgtctcccaatcaggaggcacggaggtcagggacccacttgaggaggcagtctgttccttagtagagcttgagtgttgtgccaggagatctgctgctctcttcagagctggcaggcaggaacgtttatgtctgctgaagctgcacccatagactccccttccccaagatgctctgtcctagggagatgggagttttacctataagccccttactggggctgctgcctttctttcagagataccctgccaagagaggaggaatctagagaggcagtcaggctacagcagctttgtggcactgccaaacttccctgatgctttgtttacactgtgaggggaaaatcacctactcaagcctaagtaatgatggatgcccctacccccaccaagctcaagtgtcccagttcgacttcagactgttgtgctggcagtgagaatttcaagccagtgtttcttagcttgctgggctccgtgggggtgggatccgctgggctagaccacttggctccctggcttcagccccctttccaggggagtgaatggttctgtctctctgtcattccaggcaccactgggttatgaaaaaagaaactgcagctagctcagtgtctgcccaaatggctgcccagttttgtgcttgaaacccagggccctggtggctaggcacctgagggaatctcttggtctgtgggttgcaaagaccgtggggaaagcatagtatcttggctggagggcaccgttcctcacggtgcagtccctcatggcttcctttggctagggaagggagttccctgaccccatgcgcttcctgggtgaggcgatgccccatcctgctttggctcaccctccatgggctgcactcactgtctaaccaggcccagtgagatgaaccaggtacctcagttggaaatacagaaatcacccgccttctgcattgatcttgctgcaagctgcagacaggagctgttcctatttggccatcttgccctcttttgttacttttaatcagagcctctcctagatgctgccatggtagtttggagcctccactgagtccctactttgctgtctgtttccttttggtctcagagtggtctaggacttatgactcttaggatatttagctcagaggtgttaaatattcttaaaaggagcaagagcttttagctatactatttaagattctgtgggttaacaaagcattataagacggttcttaagattgagaatttttagtaataggcttctaatgaacacatgaaagacctgtagcctttgtaagttgggaaattcctataggaatctctagtaatgcttctcttttattcctgatattagtaatttatgacctctcacttttttttccctctgatcagcctggctagaggtttatcagttttcttgatctgttcagagaaccagtttccagtttttgctttcattgattttttttttcttttttttaggcagtatctcactttgtcacccaggctggaaggcagtgggggcgatcactgctcaatgcaggttctacttcctgggctcaagcagttaccctgcctcagcctcctgagttgctgggactacaggagggcaccaccacacctggcgaatttttttttgtttttaggagagacaggatctccttatgttgctcaggctagtctcgaactcctgagatcaagcaatcttcccacctggcaaagtgctgggattacaggcataagccactacactgagccctgatttttttttcctattagtctgttttccattccattgatatttggtttttattatttcttttcttctctttaattaagatttaatttgctttatttttctagtttctaaaggtggaagggatggcagcagcagtcactgcaaagacaccagctgcagtggggaaggtatggctggcgctgccctgtacatggagccagtgggagctgggaacaggtgggagtcccgccccattctgagatggtggggcaggagccctgtgctcctgctggcagctgcagctgcccacctgtggttgtggatctgggcatccctgcactctcgggggtctgggaagccccactgcccctccaggcttggaagcgcctgctcctgctgcctggccttttcctgctccctgagcctgttccagggtagagcaagttgggccaagcctgggtgtggtggcagcccagtggggtgtgcccatgcttggggcagcactgacctgccagccccctgtcacctcagccccctctggactttggggaatgaggagcatgagagggaggccgatgggtccctctgtgtgaccttgcaggtgcccctcccacaagcagagtgggtaccctggacaacatgattgattgtggcaggaggcagatgggcttctgggtggaaaggggtgagtccctgatgaaatcctacattcaagccaggaacagtctgaagcctggggcctggcctgtcagttctgagtggaatcagcagccccagagtgagaacttactgtgctctttatgagcctgcccgtggccacccatggaccaattagcatgcacttacttccttttgagcccataaaaatcccagacccagccagactcacacagacgttgggactaccagctgtggaaaggagctatccactctgctgagagctggacacttgtctagatgacctgcagagaggagctacccccttccagtctcctcagagctgttcttttgttcagtaaagctcctctctgccttgctcaccttccagttgtccacatacctcattcttcctagatgtgggataaaaactctggaccaggtgaatggcgggactgaaagagctgtaacacaaacaggactgaaatacgtccccctgctcaccatgtttgggggtgatgagaaggagagaagagctgcagctctgcaggaaacccagacctaggagctcccagagccagagctatgacaccctctttggggctctgtggtttctgttatctccaagctttccagtgtcaccatgttcctcttgtccagacgtgggtgcctgcagtggaagccacttgcggtgcatctgatccagcctcaggcttgcatggagaaagtgcctggagctgcccaccctgctgcagcagctggcatgcctggctgtgcgctcttgccagaccctgcactcactcatgcacccgtcactgctctgtgccagactcgcctttggcaggtgtgggatctgggctgatggcatgagccgtgcacagcgtatcaggccgagggggtggaatgagcccagcgggcccaagaaaacttgcacaaaaggtgccaccagccacagaggtttccagctggaaaagcggcatcctgcggatccctagaaagaaacttagattattgatttgaggtttttccaagttttaaattacagatattaaatgttatacattttcttttacgtgtttctttagttacatctgcaaaattttgacatcttgcaacagtttgagtcctctgagaagcagatgccaacatgggtttaaatgtgcaaaaaatctattagggaaaaatgcctgtgtgagaaaatgaaaagggagctgtaggagactaagagagtcatcagactctgatgtaggtttgaccccaagttaagaaagaacgagggtgggtaaaagcatctcatactacagtgtatttctaaggaaagtggtaagttgactggggagttcttgtgccagagttttctgtcagagaagtctcatatcacccaaccagggaactacattagtattcctgccttactcagtcattggctggaagcagcccatgggaatcatggccttggtgtaaatgcagagatggattgcagagtgcagcagctggggcccttgatcccagtccttatactccatcatagttgttattgagttctagttactatagtcaaagaacatatgttaaaggatttcaaaaatcttttattaagattttttttttgagtcagagtttcattcttgttgcccaggctggagtgcaaatggcatgatctctgctcaccacaacctctgcctcctgggttcaagcgattctcctgcctcagcctcacgagtagctgggattacaggcatgtgccaccatacccggctaattctttgtatttttagtagagacgggatttcactgtattagccaggatggttttgatttcctgacctcaggtgatccgcccacctcagtctcccaaggtgctgggattacaggcatgagccaccgcacttggcccagatttttaaaaattgctcagagtgtggtctgtcttggtgaatattgttttgtgaacttgaagataatttctatttggctcttaggcagaatgttttgtaaatgtcagttaggtcaagttacttgatgttaaaatttcctgttttcttactgattctctctctctctctttctctctctccctctctccctttccatttccttttccctttccctccctttgtatctcccctttctgtcctccctctctcacacctttctctctcactctctgtctctcctttgtctattatttttctagtctatattttatgtgtgtactttaggtggctgctattattaagccttcaatttcagtgatcttctgtagtgtctaagctgttatttatcttatttgttatgtttttcattttaaaattgtgtgtgtttttaacacatacaacacataaagttgtgtgtgtttttaacacatacaacacataaagttgtgtgtgtttttaatctttagatgttctgtttgggtcttttttgcacctttgatttctctcatcattcatatttcttctctaccttcatgaacatgtggaatatatttatgctagctgtattaatatccttgtcctgctaatttcacatttctgtcctttctgagtcggcttctattgactgatttttttttcctgaagtgcgttacatatttctgtctttttggaatacctggtaatttttggtattccattaaatattataagactttggggatgcagttaagttagctataatctattatatccttgcaaatcttgcttttaagcattgttagcatgtacaagaacagattttaatgttaggctaatttagctccactttcatggtgatactattctgaagaccctatctgatgccatatgtatttattgagaggtctttttaccttgtttattgggaatatatgaactgtttctgtatgagctttgagaattgtttaatacgttgctttccaggttcatttcttggtgttcagtaatttccactcatgtgcagctcaaaacccagacaaaagttgaggacatcactgtgaaattctctagagcagaggtggacaaacggcagctaactgactaaatcccacctgctacttgttactgtaattaaagttttattgtaacatagccattctcattcatttacatatatttttctgcttttacattataatagcatcattggatagttatgatgcagatcatatggcctgcaaagcctaaaatacttatctgctccttacagaaaatatttgttaactcccactttagagttttttctctgtgtggcattttcctctctggtaatctgccctgcaaattatagctgccctgggatccctgaagtctgattttcgtctccttgattcctaggctctgtttgggttacttctctatgtattatagcctggaaatggcccccatgcaggaagccagggcaatcaaagggttcatttcatttgtttttcttcccttggggctcacagttctgtactggctgttactcaatttctggaaaccattgattcttattttgttcagttttctagttgcttaagtggggaatggtcaatctggtcttgttattgtataatggtcatatgcaggagaagcagcagaatattttgagacttgtttttgttgttttgtatatcaagaattagttgctttatattgctatgtaatattccatttgtttgaatataaatgctcctcaatttatttgatggggcatgtctagataaacccatcataagttgaaaataccataagtcaaaaattcatttaatatacctaacctgctgaacatcataatttagtataggcttccttaatacaagtactcagaacacttacattagcccagcatcatgagagagcatcctattgcatrttgctagcccaggaaaagatcaaaattcgaattacagtttctactgaatgcctgttgattttgcgtcatcatgaagtcaaaaacttgtaagtcaaaccgtcataagtcagggaatgtgtgtatatctgtttagcaattctcttgttggggaatacctgagctgtttatagtttttgactattactagtaaagcagctggctgggcacagtggctcatgcctgtaatcctagcactttcagtcatatttaatgttgtcaatctttttaattttagttattttggtgatgattgatagtatctcattgtaatttagatttttatttcctggagaactaatggttttcagcattttttattcattcgtttgccttttttcttttcttttgggatggagtctcgctctgtcgcccaggctggagtacagtggcgcgacctcagctcactgcaagctccgcctcccgggttcacgctattctcctgcctcagcctcccaagctgctgggattacaggcacccaccaccakgcccggctaatttttggtatttttagtagagacggggtttcaccgtgttggccaggctggtctcaatctcctgacctcgtgatccgcctgtctcggcctcccaaagtgctgggattacaggcatgagccactgcgtccggcctcgtttgccttttttatatctctttttgtgatgactctattaaaatcttatgtccattaaaaaaattgagttgtttgtgcttttactattgatttgtaaaatgttttacaatgtgttgaacataagtcctttgtcagacatctgttttatgaataatttctcttgtctgtggctcactttttctttttcttaktaatgttttttgatgaactgaagttataaattttgatgaagtcagatttatgaatgtttttcttttaaggtaatttttgtgtcctatctaaggaaccttttccttcccccaagtcacaamgatarttctcctgtttagaaactttgtagtttttgcatttatagttgggttcctgatccatcttgtattaatttttatgtatggtatacagtacctgtttgggtttcttttttgcatatgaacatttagttgtatttgtagagaatacttttcttcattggattgctttcacatatttggtgcctttgttgaaaatcaattgactgcatataagtttaggtctatttctgttttccttattctgtttcaataacttattatcttgattactatagtaattcttgaattaaggtagtataagtgttccaattctttttctttttcaagatttctttttgcatatccttaacattttagattcagtttgtcagtttttacaaaaattcttggtaaaagtataattgataytctgattggatctatagatcaatgtggggagaattaagatctaaaatactgagtcttccactacatgtacatggtatgcttcatttatttagggcctctttatctcagcaatgttttgtagttttcagtggtttgtgttagacttattgtcatttttttccctaagtattttatgtgtgggatgctcttttcaaggaaatagttatttcaaatctcattttctattgcttaatcctggtatgtatatttttacattgggcttgcgtgcgatgagcttttctattttacttattgagtagtcgtttttagattttttaggattgtttatataaacaattgtgttaactgcatttagagacagttttacttctctgccttttatttctgttacttgccctattgcagtgccttattccccacctaagagagaaatcatttagtcttttgacattatatgtcatactagctgtagaattttcatgaatgtctttcatcagattgaggaaagttccttccatttctagagtactgaaatttttgaaaagttatgagtagatgttgaattctgtcaagtgctttttctgtgtttattaaatatcatttttcttctttatactgttagtgatttaaattgattcatttttatatattaactttgcattcttgtgataaattctacatggttatgatatatgtgaattcaatttgataatatttttattaaggatttttgtgtctgtattcatcagggatatggctctatacttttcctgtagatgtctttgtttagctttggagtaatataatgtttttatcagtaatgctagcaatggttttgttagcgtcattggcttcacttgaaagtggggtctactaccttatgtttgaaagagtttgtatgaaattaatgttttttttttatgtgtttctatagggttcagtagtgaaaccatctgggactctaatttgtttgtatataggttttttataaactcagttaaaaaatctactcagcttttctctattttttttagtaagttgtatttttcaaagaatttgagaatttcatctaaagtgtatttgttgacataaagttgtttataatattttcttaattctttaaatgcctataagagttacactgctaatttttagcaaattcccagcactctgcctttaatcttgattagtctaggtagatgttgttgatctagtcactgaaccggttttttcttaaacagttattgaagtataatttacatacaataaaatccactcacattaagcatatgatttaataattttttagtaatattaaagagatctgcaaccataatcttgttttagaatagtttatcacctgcagaagatgccttgtgatagttgatagttacttctgctttcactccgagccctaggcaaccacttctctactttctgtttctgtatagttatcttttttgacattttctataaatagaataatacaaaatgtagtcttttgagcctagcttctttgacttagtgtaaagtttttgtgcttcatccttgttttagtgtggctttgttagactttagtatgaggataatattgaccccataaaatgttttggaaaatattcccttgtcctctgctttctagaagagtttctgaaccattggtattattttttcttgaaatatttgatggaatttaccagtgaaccatctggttttggcttttattaatgagaggatttccaaatactgtttcaatttctttactaataataagcctattcacacttcctttttctatccccgtttctttttccttcctctcttttccctccctctcttcctttcctccccttgcctccccttccccattctcctattcctttttctttttccttcattccttgtcttgatattttgagtattcctagaaattggtcagtttcttctaagttgaatttctgtagggtcaggatcacgttcactcttttatttcttattttggtagttttgttccttctcttttttttcccttggcacatcaacctagcggtgtgacagtcttgttgatcttttcaaagaatcaaccttggttttaagaatttttaaaaaattttttttgatttccatttcattgatctccattctaatatttatggttgtccttctgcttataagctttgctcttcttttcctaatttcttaaggtggaaacttgggttatttatttgaggtctttcttcttttctaaaaataggcatttaaagctataatacctctacatactgcttttgctacaataatatgttgtattttcatattcatacaattggatacatttttaaattttttcttgtgatttcttgtttgaccatggattatttagaggttgttgttctaatttaattccactttggtttgagggcatgctttgtatgatcccaatttttaaaatttaccgtkacttatgttatggccaaatatattttttattgtggagaatgttccacaagtacttgaaattttattctatatttgggaagaatgtgttagatgttagttacatcatgttgcttgatggttatgttgaagtcttctgtgtccttacagattttctgtctagtttgtctatcaattattgagtggagttttgaaatctctgactattattgttgaattgtttatttctctctcaattctgtccagcgttgcttcatgtattttgagactccttttgtatgtttataatttttatatcttcatgatattgacccttttatcattatgaaatgcttttgtctctagtaacagtttttgtcttaaagacttgttttatttgccgggcacggtggctcacacctgtaatccccagcactttgggaggccgaggcgggcggatcatgaggacaggagatcgagaccatcctggctaacacggtgaaaccccgtctctactaaaaatacaaaaaattagctgggtgtgttggcgggcacctgtagttccagctactcaggaggctgaggcaggagaatggcatgaacccaggaggcggaggttgcagtgagccaagatcgcaccactgcagtctggcctgggtgaaagagtgagacaacgtctcaaaaaaaaaaaaaaaaagacttgttttattttagtacagctacttcagctctcttatggttattgtttacattgtttatcttgtttcacacttttgctttcaacctattttatatctttgattctaatgtgtgctggatgtttttcatttggatagtctttgtttttatagtgttcaagctatttacgtttaatgtttgttttgtatatttctcatggtgctttttgttcttctcttcctcatttattgctcttttttgtgttaaatagatattttcttgtgcacatttaaattattttctttttactatgcatatttttaagtgtttttatattggttgacctagggttacaatatgcatattgacttattacaattgacttcatattaatactaattcagtgttagtaatatgtagaatatttaattctgtatagcttcattccttttcctctcctggagagtgccattgtcatatgtattatattttatatgctgtaagattaaccatacagttttacaggtttttttttgtagctgttttgtaaatttgttaagaggaataaagagagaaaagtttttattcagtcttttagatttgtctatgtaattacctcttgagtattcttcatttctttgtgagaatttgagttactgcttggtatcatttccttttagcctgcaggacatctttactatttttacagattcctcagtctttacctgggaatgtctttattctgcctcagttttgtagggtagtttatttggataaagaattcttggtttagtgtttttcttttagccgtttgaatatatcgttccactaccttctgacttctatggtttctgatgctaagtcagctgttagtctcattgagggtccattgtgtgtgataagcattttctcttttgctgcttttaagattttctctttgtgttcatctttctgtatttttagggcccagcagggctttaactttactaattttgtcaccctttttgggctttagcatgaactggtagtttagattttcattgtgttttaaaaatagttacagcctgaatttatttttatatgattccctcaagttttatataattttcctcaagcttttattgccatgtaattcaataatacctctctgaggaatgactacttaagcatctttgttataagaaatggtgataccgtgttaatttttttgttttacttcatgttgtggcgttatgtactgttgctttcagatttttttcttgcttcatgggatttcataaacatatcccctatagatgtatttactctatatatgtcacataaaaacacatataaaaataaggcttataataattaaagtattgacttttctggaggactatataatcttaataagatgttttccttttgataaatattgaatgataatctttaagactaggtaaaagataccatagtatatttagtatttgcattgagacatgtattagtctctttaagagttaatgtctataaatatttaactctggactatgtcactgtcaagtaatattttgggctagagttccccactgagtatctaattttgttgccttattcttttagaagtgttactgtgagcaatagccaggcaactgaaagaaagaaggtgagtgggacccaaaaagaaggacaaaaacagatggaaaggaaataaaataataagaaatttcttaaacagtgtttgttttggatagttttcttgttaagcacatggaaatactttgcacatttgagaatcactgacttacatgctattttggagaaacagcaaatcactcatgtaatataaacacaattatagatttctttgctgtaattttttcatttctggggcttacttttccgtaagatacaaaacgttccttcttacagatcattgcttaacaatatatttggaggattgcaaatttaaattgaatggtacaattaatgcaataaatgatagatattcaaaatttctgaatcctgatagtcttgttgagttatagtctgctctaaagatgaatgttactaatgagaatggactttttagtatacgcctaaagtcaatataatgaagtgttttgaactgcctgtggtcctagatttctaatatgtctgttrttatactaataagatcttaagactgaagagcattttatagtattcagtgaacttgcatgtaaatatgcactgtggatattattaattcccttcttttttttacagatatgatcactaagcacaggtggacagtggaaatcagagtgagagtatatggctgtagattctataattctttttccattgtaccaccagtaaggaatttgatacagaaaataatgttagatactgaacaaataattttttcttcggtaggaggtcctatattgctgttgtgtatccttagtttctttctttctttttttttttaaatggggtgtcactctgtcacccagtgtggagtgaagtggcatgatctcagctcactgcaacctccccatctcacgttcaagtggttctcccgcctcagcctcctragtggctgggattacaggtgcctggcaccacaccaggctagttgttgtatttttagtagagatgggatttcaccattttgaccatgctggtatcaaactcctgacctcaggtgatgcacctgcctcagcctcccaaagtactggaattataggtgtgggccacctcacctggccttatttagtttctttaatgaagattattgatatgatatggctgtgtaaaatagtctttttatttctgtattattgattttcattttagaaattagatccataaatgtaattacttctgatgcatggccttttatccttgaaatggtaaataacacatactttttcattgctgttacccattctagcaaagtttcactgttttatcaaaggtattcaagttattttccatgttctgcatagtagtaacatgtacttttccactaggagcatttgagttgagaatgagaactaatggggaataattgtagcctcctgttactatgtttcatggcacaaccaagagacttttttccttgcctttatacagaagataggcagaatagcagtgagataggtgttgggttttaatgtttgagagcttcaaattctggctctgtgagttatgcttttgggacttgggcaaataaccttattcatgyttggaataaccttacagtgtattgtttgtgagaataagataatataatgaaatgctcaatctttgagcagccttcttagatgttgtcaaatgcaaagatgagttcctccatggataacatggtagattaacttaaaaacaagcaaataaaaagaaaccaagaacagcaacaaagtaaaaagaaagagagtgattaggtgactggctccaaatataagataaacatttcttaaatctggatgtagaatctgccaaaatgttaagttgtcaaaaaacaaagggaaaatgatctgttttaagccataaataggctaatcagaaataatgacatggtctggtaagaaatattaatgacttttaaagtcattaaaggattacttaaaggataattgcattttccagataacagggaacctaaaactaactttattcttttttgggttcatactttatgggaatttctattaagcagattatcatctagtgaatacatgaaaagacaaacattggtctggtcatcaagtagaattactgggagcagtaaacaagaatgtaaagtaagtcaaagccttggatgaactcatccaagttaagaaacaatctggtgagatcttgattaaaattctgctgttaaagaagctgcttaagtacttatgaatttgtacttctttgtactaccatggtgattaatgtcaatgcatttttctcggcaaggatacacaggcatatctggttttcttttgcttttctttattgtgctctgcagatactgcgtttttaaacaaattgaaggtttctggcaaccctgtatggggcaagtttatcagccaccatttttccaacagcatattctcactttgtgtctctgtgtcacactttggtaattctcacaatatttccaacttttaaattattattattaatatttttattttactttaagttccggcatacatttacagaacaattgcaggtttgttacgtaggtacacatgtgccgtggtggtttgctgcacctatcaaccaatcatctaggttttaagctctgcatgcattaggtatatgtcttaatgctctccttccccttgcctgccacccaccaacaggccctggtgtgtgatgttcccctccctgtgtccatgtgttttcactgttccgctcccacttatgagtgagaacatgcggtgattggttttctgatcctgtgttagtttgctgagaatgatggctttcagcttcatccatgtccctgcaaaggacatgaactctttcttttttatggctgcgtagtattccatggtgtatatgtgccacattttctttatccagtctatcattagtgcgcatttgggttggttccaagtctttgctgttgtgaatagtgctgcaataaacatacgtgtgcatgtgtctttatagtagaaggatttataatcctttgggattgctgggtcaaatggtatttctggttctagtttcttgaggaattgccacactgtcttccacaatggttaagctaatttacactcctaccaacagtgtaaaagtgttcctatttctccacatcctctgcagcatctattgtttcctgactttttaatgattgccattctcactggtgtgagatggtatctcattgtggttttgatttgcatttctctaatgaccagtgataatgagccttttttaatgtttgttggctgcataaatgtcttgttttgagaagtgtctttcatatcctttgcccactttttgatggggttttttttgttgttgttgctgtttttttcttgtaaatttgtttaagttccttatagattctggatattagacctttgtcagatgggtagattacagaaattttctcccattctgtaggttacctgttcattctgatgatagtttcttttgccatgcagaagctctttagcttggttagatcccatttgtcagttttggcttttgttgccattgcttttggtgttttagtcataaagtctttgcctatgcctatatgatgaatggtattacctaggttttcttctagggtttttatggttttgggttttacctttaagtgtttaatccatcttgagttaatttttgtataaggtgtaaggaaggggtccagtttcagttttctgcatatggctagccagttttcccaacaccatttattaaatagggaatcctttccccatttcttgtttttgtcaggtttgtcaaagatcagatggttgtagatgtgtggtgctacttctgaggtctctgttgtgttccattggtctatatatctgttttgttaacagtatcatgctgttttggttactgtagccttgtagtatagtttgaagtcaggtagcatgatggccccagctttgttctttttgcttaggattgtcttggctatacaggctcttttttggttccatatgaaatttaagtagtgttttctaactctgggaagaaagtcactggtagctcgatgggaatagcattgactctatgaatttctttgggcaatatggcctttttcatgatattgactcttcctatccatgagcatggaatttctttccatttgtttgtgtcctctcttatttccttgagcagtgatttgtagttctctttgaagaggtccttcacgtcccccttaagttatattcctaggtattttattctatttgtagcaattgtgaatgggagttcactcatgatttggttctctgcttgtctattgttgctgtgtaggaatacttgtgatttttgctcattgattttgtatcctgagactttgctgaagttgcttatcagcttaaggagtttttggggtgagatgatgggattttttaaatatacaatcatgtcatctgcaaacagagacaatttgacttcctctcttcctattcaaatactctttatttctttctcttgcctgattgtcctggccagaactaccagtactatgttgaataggagtggtgagagagggcatccttgtcttatgccagttttcaaagggaatgcttccagcttttgcccattcagtatgatattggctatgggtttgtcataaatagctcttgttattttgagatacattccaccaatacctagtttattgaaagtttttagcatgaaggggtattgaattttgttgaaggccttttctgcatctattgagaaaatcatgtgttttttgtcattggttctgtttatgtgattgattacattttttgatttgtgtatgttgaaccagccttgcatcccagggatgaagccaacttgatcatggtggataagcttttggatgtgcttttgaatctgtatattcctgggcttttttcacatagtcccatgtgtctttgaggctttgtttgtttcttttcattctttttttctaatcttgtcttcatgcctcatttcagtaagttgatcctcaatctctgataccgtttcttccactttacagattcagctattgatacttgtgtatgcttcacgaagttctcgtgctgtgtttttcagctccatcatgtcatttatattcctctctaaactgggtattctagttagcagttcttgtaactttttgtcaaggtttttaactttcttgcattgagttagaacgtgctcctttagctcagaggagtttgttatttcccagcttctgaagcctacytctgtcagttcatcaatctcattctccatccagttttgtgcccttgcttgagaggagttgtaatcatttggagaagaagaggcattctggtttttggaattttcagcatttttacgcaggtttttcctcatcgtcgtggatttatctacctttgatctttgaagctgatgacctttggatggggtttttgtgtgtgggtcctttatgttgatgttgatgttgttgctttctatttgttagtgcttctaacagtcagtcccttcttcggcaggtctgctgcagtttgctggaggtccactccagaccctgttcacttgggtatcaccagtgaagcccgcagaatagcaaagattgctgcctgctccttcctctggaagctttgtcccagaggggcaccgacctgatgccagcctgagctctcctgtatgacgtgtctgttgacctctgttgggaggtgtctcccagtcaggaggcacgggggtcagggacccacttgagcaggcagtctgtcccttagcagagctggtgcactgtgctgggagaattcctcttgtcaggatcagctgccctcttcagagctggcaggcaggaacaattcaatctgatgaagctgggcccatggtcaccccttccatcaggtgctctgtcccagagagacgggggttttgtctgtaagcccctgactgggctgttacctttctttcatatatgccctgctcagtgaagaggaatgtagagaagcagtctggccacagctgttttgctgtgctgtggtgaattctgcgcagttcagacctcccagtctccttaacactgtcagggaaaaccacctactaaagccacagtaatggcagatacctctccccgcaccaagctcgactgacctaggttgacttcacactgctgtgctggcagcgagaatttcaagccagtggttcgtagcttcctaggctctgtgggagtgggacttgctgaatgagaccacttggctctctggcttcagccccctttccaggggagtgaatggttctgtcttggtggggttccaggtgccactgggttataaaaaaaacctcctgcagctaggttggtgtctgtctgctcaaacagctgccccattttgtgtctgaaacccagggccctggtggtgtaggcacatgaaggaatctcctgatttgcacattgcaaaaaccgtgggaaaagtgtagtatctgggctggatagcacagtctctcacagcttcccttggctgcgggagggaggtcccccagctccttgcacttcctgggtggagcgatgccccacccttgcttctgttcaccctccatgggttggacccactgcctaaccagtcccagtgagatgaactgggtacctcagttggaaatgcagaaattaccttccttctgcgttggtctcactgagagatgcagactgtagctgttcctgttcagccatcttggcccctccccccaacttttttattattatcatatctgttgtgctgaaatatgatcaatgatctttgatgttaccattgtaattgttttaggctgycaggaaccacacccatataagataggaaacttaatcgataaatgttgcgtgtgttctactccaccaattgccccatctctcwtctctctccttctcctcaggcctccctattcctttagacacaacaatatttaaaataggccaattaacaaccctacagtgtcctctaagtgttcaagtgaagagaacagtcacatatgtctgactttaaatcaaaagctagaaacgattaagcttcctaaggaaggcttgtggaaagccaagatagccaaaagctagtcttcttgtgctgaacactgagacaaattgtgaatgcaaaggaaaagttaaaagtgctactccaaaagaaacgttcttgaaggaaattaaaagtgctgctctagtgaacacatgaatgataagaaaatgaaacatgctcattgttcatatggagaaagtttcagtggtctgggtaaaagagcaaaccagtcataccatattcccttaagtcaaagtctaatccaggttgtaatccctaactctcttcagtcctatgaagactgagagaggtgagaaagctgcaggagaaaagtctgaagctagcagaagttaattcatggaatttaaggaaagatgccatttctataacataaaagttgctacccggaacaacatatttttcagtgtagattaaacatccttctactgaaagatgatgccatctaggatttttgtagctaaagagragaagtcaatgcccggtttcaaagtttcaaaaggcaaggctgctgactctctttttagaggctaatgcagctggtgactttaagttgaagccagtgctcattcgcttttttttttttttttgagatggagtctcactctgtcaccaggctggagtgcagtggcacgatctcagctcgtggcaacctccgcctcctggtttcaagcgtttcctctgcctcagcctcctgagtagctgggactacaggcgctcaccaccacgcccagctaattttttgtattttagtagagatggggtttcaccatattggccaggctggtctcgaactcctcacctcgtgatccgcccgcctcggcctcccaaagtgctgagattacaggcatgagccactgtgcccggcctcatttgccattttgaaaatcctagggtctttaagaattttgctaaatttactccacctgtgctctaaaatgggcgcaaccaagtctaggtgacagcgtatctgcttacagcatggcttgctgaatatttgaagcccagtgttgagacctactcttcagaaaagatttctttcaaaatattactgttcattgacaatgcatctgatcactcaagagctctgacagatgtacgaggagatgaaggttgttttcaaaatgtcaacattactagttgatattttggaagtttcggaagaagttaattccaacccccatggaaggactttgagcagttcaagacttaagcggaagaggtaactgcagatgtggtagaaacaataagagaactagaattagcagtagagcctgatggtgtaactgaattgctgcaatctcatgataaaacttgaatggatgaggagttgcttcctagggatgagcaaagaaagtggtttcttgagatagaatctactcatggtaaagatgctttgattatttttaaaattacaacaaagggtttagaatattatataaacttagttgataaagcagtggcagtttttttttattattatacttwaagttctgcggtacatttgtacaatgtgcaggtttgttacataggtatacatgtgccatgttggtttgctgtccccatcaacttgtcatttacattagttatttctcctaatgctatccctcccccagccccccatcccctgacaggccccggtgtgtgatgttcccctccctgtgtccatgtgttcgcattgttcaactctcacttatgagtgagaacatgcggtgtttggttttctgtccttgtgatagtttgctgagaatgatggtttccagcttcatctacatccctgcaaaggatatgaactcatcattttttatggctgcatagtattccatggtgtatatgtgccacattttctttatctagtctattattgatggatgtttgggttggttccaagtctttgctattgtgaatagtgcctcagtaaacatacgtgtgcatgtgtctttatagcagcatgatttataatccttttggtatatacccagtaatgggattgttgggtcaaatggtatttctagttctagatcctaaaggaatcaccactctgtcttccacaatggttaaactagtttacactcctaccaacagtgtaaaagcattcctatttctccacatcttctccagcatctgttgtttcctgactttttaatgattgccattctcactggcatgagatggtatctcattgtggttttgatttgcatttctctaatgaccagtgatgatgagctttttttcatgtgtttgttggctgcataaatgtcttgttttgagaagtgtctgttcttatcctttgcccactttttgatggggttttttttttttttataaatttgtttaagttctttgtagattctggatattagccctttgtcagatggatagattgcataacttttctcccattctgtaggttgcctgttcactctgcagtggtagtatttgagagaattgactccaattttgaaagaagttctgtgcgttaaatgctttcaaacagcatcatgtgctacagagaactctttcatgaaaggaagagtaaatcaatgtggcagacttcattgttgtgccattttaagaaactgccacagctagtccaatctttagcaaccaccaccctgatcagtcagcagccatcaacatccagacaagaccttccaccagcaaaaagatgcaatttgctgaaggttcaaatggttaacattttttagtaataatgtattttacattaagatatgtgcactgtgttttagacataatgctattgcacacttactagactatagtagagtataaacatagcttttacatgcattaggaaataaaaaatgtgtgtgactcactttatggcaagggtctacaaccgaacctgcaatatctccgaagtatgcccatatctgcctttcgtaagaattgtgtatactagaaagtcttaagggacaaggaatctgtagagaagtaaagttctggttaagcttttgtgagattattactgtgtttgtgtgcattaatagatacattgaattttgtccttgtcacatatatttcatctgtcattcatgtaaggtgtatacttcagtggatttatttggagacccaggcatatctcttgcctattttggtgctttggactatcttggtaggtcatgagatgtctagccataggtaaggatattggcatggggatttaaaaattcagtggttggtaggattggagatgatctttaatattatgtctacttctgagattccatgaatttcattatttatagacattcacattacccaggttttctgtgcctttccaagtcctcatggaattcctcatgctactctaatttgagtcattgtgaaagatgttagtgacttttgagaatcagatttttacattgggaaatatgaagatgaaaaaaattggcccagataatctctgttgacacttactaaaaatttaaaaacattaatcaagacaaaaaatgagaagtgaatggttcttaactcatttctttaaacgcactactgttttttattttgttcaagaaaaaaagtttcacaattttttttaagcaatagtataatcagaaccagaggtctgctgagtaaaatcatgcagttcagtctctttcctcttgacaccttactgataccaggaagttttgattgtgttatatgtaggttggtgacttaagatcaggcatcactcttaaaactcatagtaggtttgagtggagtgttttcaattaagagcttattgatactatgttatgggaatatataacgcctgggaaagttactaagtgctgggtaagaatgcaaaagacaaaatgcgaaaaagctataatttaagaaattttaaatttttgcccaaggctaggcttaactttaagaaagatcaagttttctctcctgaattgttcccagggcctgagactaaatttatgataattaatgtgttttgtatattgtcagtcttaaactgtaacatcatttgtaacattgtttctgcaggaagatgccttgagttctaactttcaggcttttggaagttagtgattttatcttgtaatattaaacaacagtctgtagagatgtgcaaaatattccctctcttcctgcttctcttcctgttgatgatgatgatgaagtaataatagtgggtagcattttgtagacagttcttttatatcctttaaatttatttatttaattctttacaagtaaaactgagacttttttctttttcttttctttttttttttttttttgagacagagtcttactctgtcgcctaggctggagtgcagtggcgcgatctctgctcactgcaagctccccatcccaggttcacgccattctcttgtctcagccttctgagtagctgggactacaggcacccaccaccacacctggctaattttttgtgttttttagtagagacggggtttgaccttgttagccaggatggtctccatctcctgacctcgtgatccgcccgcctcagcctccaaagtgctgggattacaggcgtgagccaccatgcccagctgagacttttttttaaagttatttttgctcaaggtagagctaggatttgactgttcagaactctaaagccccatgcttttaacattgtgttggtctaagggcacatttaatatggggagtcataggctgatagtgtatatgcttgtgttcttgctggtgagaagatatatagatgggaaagctgttgtggtatgaagaaacaaaataaatatagaataagattgttctttaagttatttgttggttaacctgtagttaactcattacttcaccaagaatagttttgggtattatggaaatcttgaagcacatgtatttcaaaatgagttagaggccttaggcatttaaaaaataccaccagtgctgacataatatgagaacatagtgtaggatcttgaggcttttttttacatatttaatgaatcttttatagatattatcaatttttatcttgtctcatgtagtgcagattaatattatgaatatagttggttagtaatttccatgctaatttatatctatttgaagatataacacttgaaaaacacttaaaagtaattgcttttttccaaaagattgtatatttccagaaaaaatgttttctgttttagtaataaatgtaaaaacgttcaaactcatgaacatttacatgaattcattggatatagggagactgtattaaggatataaattatttaaaacattttccttagaactggaacaataaggttatgttgttcaaaatgttaaagtttaaagaaagaaatttctttgttaagggaagacaaagcatatttggcactatgtatgaacatgcctgttttgctcactgtggagctcccaatgcctaaaatcatgtcattaggtttttttcaccattaaaaaaaatcagtttaatattgaattatttttttaaaaaaatttgtgaaaaggtctacaggcatcttaaaaattgtctgtacacttgctattaatgaaaaaattagaagaatttcgagcaagaaaatattcacctgaatcaacatattttagtgtccttaatgttgagcaattagctgataagctagtttgaacctgactttcaggatagaatacttttgaggttgtatttgtttttttgctttcaacaaggcaagtcttgatgctagatcaattagcaaatcttgaagaattaacttaaatggtgtggtaattcctgttattagagatatttcttagaactcatgaaattcctccctcccacatgatatcagatgtgttgagttgagaaagttgctgggcagcagtcttgtatatcagagtccagttcaaagttgttagaatgagaagtgtttttaaaatgttatgggaatgcccgaattacaattgaactttgaaattaaaaagaaaacacaagacagtataaaaataaagacctatgagagtgttgtagcaagttgggctttttgtaacctaccgtttaaaatacagatctttgaaggcaggtttttactaattattttattactttgctcttgctaaagacagcaaggcaagtaattatcctcagatctgaagattaaaagtcttatgatttttaaataaatattaagcaaggagagtaatttttataactgttagcacatatgctttgtgtgctagctttttcctaatgtaaaataaatctgaatatgccatacgattggtgacaaataaaaaactctttgtgcaattaagagaaaatctgtttatttaagagctctcaaaggttgtaaaagattatacttggctgtatgtgaaggataaatgttgtgaaataatgccccttagttccccttttataataaatctcagctgtgtgttcagcacaagggctcagtgccaaaaagaacaggttcaacttgtccgtgaggatttgcaccacagtaaagtgcacaactgcttttgtagaggtcattgtggaggtcagggcatgtacagttgaatgaaagcaactttagaaacatggtagatcatagagttacttgagattcaaaaatcaatgttaacttaaaacattaaaaagatggaaaatcataagaaccttcaaatatatttttatctttatctacatatgttaatatgttttcatacagattaaaaataatttctttggcatcttgtgctagtatagttttaaggatcttcaggatattttataattgccaagatttggaagcgttgactattttaatatttgttaaattctttagagtgttcacataacgaaggtaggatatgatggtggtagaacaaagtgtgcagggatatgtgcatggtgggagtaaaggcaggggagtgtggatgagttttaataaaaatatgggtgtaatctggaaaatgtctctacaagtcatatttatcttgagtttgtgatcgaaagattcgaaatttaacaacaacaacaacaacaacaaagaaaatgcagtcttaaacagtatgattctttttcctaaatatctcaaaaatacttttatacatttgtgataaatagaaataaatgagaaatagaatgtggagaggctgtaagatcccaggactccagccagtgcattgagtttcatataaagaatacctgaaaagatataactaagtagatgcatagcttacctggggttatattttatctagagctgtacttcatgactcttttctcgtttctttttggtgactattttttaaaaaatggtgatcatagcaaaatgacaggcaaccattggtttcagtgtggggattaattagtaatctttagaatgtgcttcagcaaatgcagctgattggcagtagcatctgtctcaacaactgacggaatgttagtacttttatcaagtaattttcagaagggctccaaagctgttttactaaactctctcatatgaactgctttctttgtcctctagggcattgttttactaaatatacctatccatgaattaactaattagtgaaaggagggctataaaattgttatttttttaattttaaaaaatggacacaaatgtgatagtctgtgtattcttgtatttgtgggaccaccactatgctcactgatcacacacctatgttctcagatgaaaaatttataaaggattgtgattttgctgtattgtttttgtagttcgtctcataaaacatgtctcttaattatgaagagtgatttgttaaagtacaataaactgtgatttaaaggattgattagtatagtcagctttctagaaaggcaatttacttctgcattgccaggaattactcttcttagttgaaatagcctttttactaaactggttcatatttcaaaggatatgcagtttaacattcattaacagacaagccatcaattttatattgtttgaagaaaatattatttttgcttgttataaaaacaagacaacttctaagtgagtatctaatgaggttgtagcacatctcagtaaagatgaaatttgccttaatctgaatgtgttatggaaaaattgagtgtaaatattttctaaaaatgaattgatatgctttaatgaactagagtagctttcatttaaaaagtacttatatactaatgtttttttaaacaaatgagcacattatatttaaaaatgtttaataaatataatatattttaaatgaaaatttaaatagatactgttaaatgcttgaaaatagggacagttatggtggtatactttctgctatatcttcacagtgcctaacatctaccaaatgtttaataaataaattttcatattttagttctataatagagaagtgctttgtggattttagcaggatagggtttaaaatctgagtaggttacttggtcttggagagcttcagtttcttttcctgtaaaacaggtaaaacatacttacctcaaatgtgtatgtaatgcctaacacagtgcttggcacatagtagatgttcagtaaatatttctgtatcattttagtgcaattgcactgttagtaatccattccatatctgcctgactttaataaaagacaatttatgtgaaatttcaggtgagaagggtatcaagtcagtgtcttaaatattctgttcttttctgcattttagagtagatttaattgcatggtggttttatgagtgtgatagcggtggtggtggtgtttgtgtgtatgtgcatttggtttggggaagttagattgggatggttagagtattcatagtgtttgttgtttctttttaggacagaagaaaggtaaaatcagtgacagtctggcttaggtcttcacttattttctacaatgggaatggcaaaacaactactccttctgttgttaaatgacctcaaatagaacgaggacatttgttatgtaggtttttttggagatagggtagatgattagagggatcattttaaaacatttcttcattcatgaaacaaatattcctgatacataccaactactgtactaggcacagaagagtcaaatctaaataaaatgtggtctcttaaattattcagtctctataatggcgtaaagaaacttctatcttttcacggaaaaatatttctgctttagaagactactaatcttacatggtatttttgttttgcttatgtaatagtagtagtatttgtagataattttatataaagccatttctatattacattaggaaatttggacttatgtataagttgtcattgttggataaagttcacttatagtgccaagttaggaattcttggaaattatttttgaaattagtaaaagaaagtgagctaaaatgctctatgcctgaaagtttttacagaaaatttcttgcgaatactgtttttcttaaaattaatgcagactcttttaaaggaggcaggttttgtctaatcagatagtctccttgatgtttttcttttctgatctttttatagaaacagatatggtttgctggacactatgtcctcttggcaacaaatggtagtttggtaataagacaagcatcagagaaataatgtaaaaataatacttttcaacattgtatcacatttatcagtgcccaaggaaaaaataaaacctataacaacaaaaacaaacaaaataaacaaaatatttttcttgtattttgcttttcctttaagctactggcatatttccctattttcatttgtcttataagttaatgaaaataatgtttgcctagtgtttcttcttccttccattccctctttgtattctggcttctgttttcaccactgtactgaagctcctctgggtattgaaattccgttcactgggaacgctctttcttcccctccatttcagggctgtttcagccttcagaggttctcccaaatttcatttcttccatgaactctgctgaatgaaaattcaaatgcttgtcatattcagtagaatcatatcgtacatgcatttaatttgcttgaattcaactaaagttgaaaacaacaaaagtagcaaaaatgcctctcttctccaaggtaaagaaaaattttgaaacagcatagatgccaaatgtaagccacctacttaggtgatctgttccaatgctagaggagaaactagctgagttagatttacataaagagattaaaatatgcacagaacaatgtacagtatactttataggcaatttgagggatttttgaggggttattttgaccttttttttttttttttttgccttaatctaactttagaacggaatccttgtgcatgtcacagtatagctgtgttgaactaagtcagtcatataatttaggacccttctaggtaacactttgatctttctcaaatgtttcacatgtggaactaactgagggaaaatgactagcttagttcctttcctatttttatttttgcatttttcagggagggaaaaatttgtacgaatgaaattatagtcaaaacagtttaaagcagagggagacaatgctgttccttttatgttttgtgttctcctgtagttttgagactcatgcctttctcaaaagtaattgyatgtgaccacaaatatatcactgtagttagtgtctatatgagccttattagttctaagccaatacaaggaatttataggaatgcttattaaatatccagagtttagttgtaattatatattatttgaggatctttaatgatactaaccttttactagtgatcttttaatggaagatactatttcctaatttttttccaaccttttcaaaattggttacttttcatttttgaagttcttaaggaaaaatttatattgatataataagaattctaaaattagagttgaaatattattaaaggacatttttctgtgtggaacactaattagagtatgtgtttaaggaggagattacaaatgaatttggctaacaaatctttaaggaatttcactgtagtaaacagattttgatgagtttccagggctaatttgctagaaacattttcagagacttggcttgccaagtgaagatgtatttagagccattttatttctaatgttgagcaagaaacttaagcccttagctagatagttatagaaatttgtctttgatgttttcaagcatatcatgtgtatttgagtagaactgaacgttgctgaagagctagaaaaatatggtgctgtgtctgcaggatgaaacctctttttttattttgaagaagccagttttagaagaaaatttttgtgaaaattggtaatctaactattaggcatcacattttaaaagacaaagagtgctcttaaaggctgatttgtgcaagtatgtcaccattagaatgcttaaaagagcctaccatatatgtatcttttttaccgttatattctgcttattcccaaacatacattcagaaaaagaatgtagtctgatgattctaatagagttgggaatctgggtcttagtcttgtgcatttttttctactggctgtttctttagtatatgtagaatcaaattactttacattaaatttgagggaaattttatgtatttttatgatacattgtgagtcagtggcttatttccacttagtggtcatgaaatgatagcaagttagacttactgtttcagtctcctcacttatacactccccccttcctcattgcacatggtgaaaatgaaacatagagaaattaaatgttgcacctcagttcattctagtttagagacagtgccaggagaagtacatagttacatctcagcctgtaggccctgtccctcatttgtctttttactgtttactttacattttgaaagaaattagagaaaaatcatttatatggggaaaaatgaattatacttrccatgaaattgtgtgctaccaggaagttattaccatgcagctgctgcagtgatgacaggctgacatcaccctataatgaccagaacagcatagtataaaaatctctctgcttgcttctaaaataaattgaaaacaactgaattaccaaagaaatgttactcagaatgaacagcttatagacagtgccaggtatattctttaagtactctatcccattgcaaaaatatgtgtaggcacacacactattagaaaatatattcacatccatatacatatgtacaaatagacatatatgtatgtgtatatacatgcatacacagcacacatgtccacacatatttaaattattagaacattaccaaaacagaaatagtcattcasaattacttcaattgattttctaaaaggctgcttggagatactttctttggaaatagtcactagaattacagtagtttaaagctaccagaatgaaatattctggtttctgattccacttagtaaggtaacatattctgtagaatttgacagatttaacattgtgagaggactcagttcatgaaacaaacactaccatcttttttgttgttgttgtaattaaatgaccctaagaaataaaagtggaatgcacagtctcactgtaatgtgatttactaggatatgagctccctgagggcaggggcttgatctgttttgtttcctgatgttcttttcagtaggtggttatatttgttgtatgaatggatgatgaatgccacagagtaagcacaatgttttgttatttgaaattttgttaaaataactactaagatgtctggaaaacacattcacagcctaggatgaaaagcatccattgactgtaatgaataagtgaaaagaaaaaaataatcaaagtctagagaaggtagaaatttatttcttatgtactctcatagtacacaagactatgtaacaaaattccaattgtttacgcttagtaagagcattttaaaatttatggaaacgtgatcatcttgcagttgccttagtgttcatactattacatcacatgacaacttttttatattgtgttattttatacatatatatatatatatatwtttttttttttttttgagacggagtctcgctctgttgccaggctggagtgcagtggcatgatctcggctcactgcaacctccacctcccgggttcaagcaattctcctgcctgagtaattgggactacaggcacacactgccatgcccagctaattttttttttttttttggtattttaatagagacggggtttcaccatgttgcccaggctggtctcaaactgctgagctcaagcaatccgcctgcctcggcctcccaaagtgctaggattacaggcgtgagccactgcacctggcctatattgttatatttttatattattcgttaattcaacaaaatattgagcagctttttggtgccaagctgctcagtgaggtacctatgacagtgagcatgagcatagggccttacactctaatgggagacagattcaaaacagacaattacacagagtttaacaggcttacagggcttattggcaaatatgttgaagatgagggtagtttgatggataaatgtcattaagcaagatagatcaattaaaagagttctgaatttaaaattgtgttaaaggatttgcagaatcatttaacctatcggcctaaattgtcagcactttgtaattacaacctcttctatggtacttaacagaaaaccatatactgattggtatagaactggattttcatgtttagtatttttattattgtttatctcaacaatctatatactaattgattatttttattgccattttcattaaataataatgtattttctttaatagtgttattctaaatggtttgttgcattctaaatgtgtgtttctattttaacatagtatgtgtttagagttaacacaaaagatactctgctctttatttggtgagaaagcataatgataatatttgtagtgtatagattaacagacaaatcttagtaaattataaacaattttttgtagtagcttttaaactttctaagaaaagttaaataatacatttcagattattaaaaatacagattattaaaaatactgccatgtataactacccgtgtcagcatttgcattgttcttccaatgttcctatgttgctctatatggaaatgagctgaattttagaaaaccttttttctcataagcttatattttttgactagcaaatgatggaaatatagggctctaagctatattttagaaaagaaacaggttccattttgttacattgtagaggaataaaaacactaattatatatactactgaatgtacagtttgcatgcgtttccccccaggtatgggtattacctaaagttgcatggttttctgtggttcttctcactacatttttacttttaaagccttatttctttatcaattatatracaacagtaacaaaaacagaaagggctttagttttgtgccgtacttttcaaagtcaggaaaatgtacctgaattacttaatggtatttttcaagactcagtgctaagacctcactctttatatattcccccacacccatttcttattcttgtgaccttgcctgtcattttgatgctgatagcaaaatttcttttgagtttattttatatttctagctgcctttactgaacatttctacttggatattttataggcagcaatggtggattgatttaaaccaccatcttaaactctttatttttaatagctttatcaagatataatttacttaccataagaattacttatttaaaatatacaatgtattgattgttagtaaatttacagaattttgtaaccatttcagtaatccaattttaggatgttttcatcactccaaagaggtctctgatactcatttgcagacacaacacattcacacttctagcccacagcaattgttaatctactttctgtctctgtaattttgccctttctggacatttcctagaagtggaatcatgtaatatattggtccttcacatctggcttcttgtagcataacgtttttgatgttcatccatgttgtagcatgtaccaatatttcattcatttttattgttgaatagtaataaaattcagcatattgtgtgaatgtttaataaaggaattcatattcatactatatgaatgtaccaccccattttatttatccattcacaattggtggacatttagattgtttccactatttggctgctattaatagctgctatgaacattcatgtacaagtctttgtgtggtcatatgttttcatttctcctgggtagatacttataagtggaattaactaagtcataaagtaaatttacttgtcactttaagaaaaactactgaactaattttcaaagtggctgcatcattgtatactctcatctgcagtgtccatgggttccagtttcttcacctctgcactaacactttttattgtctgtcagtttggttgttgtcattcaagtgagtgtgcatttagtgtgcatttttctgaatattattgatgttgagcatcttttcatgttcttattagccatctggtcttttaaaatcttttgccacttttaattgggtcattttgtctttttattagtcaattctaggatttttttttttttgacacagagtttcactcttgttgcccaggatggagtgcaatggtgcgatctcggctcattgtaacctctgtctcccaggttcaagcaattctcctgcctcagcctcccgagtagctgggattacaggcgccggctaccacgcccagctaatttttttatttttagtagagatggggtttcaccatgtcggccaggctggtcttgaactcctgacctcaggtgatccacccgcctcggcctcccaaagtgctgggattacaggcttgagccactgcacccagtctctaagaattctttataggtagtattctgaatttgatcgaattataaaatatgtggcttgcaagtattttcttctggtctgcattttgtctttttaaaattttctctttttattagtatgttttgcattgctatgaaggaatacctgagactggataattcattaaggaaagatgtttatttggctcatggttctgcaggctgtatgaggaagcttttactcatggtggatggcacagggggagcaggcacacgtggcaagagagggagcaagagagaaggaagtacctcttaaaaaccagctctcacgtgaactaatagagaatttgcttattgctaaggaaggacacaaagccattcatgaaggctccagtcccatgacccaaacacctcccactaggcctcaccttcaacatgaggattacatttcaacatgaaatttggaagggacatgcatccatcctacattactcttccacctttccctttcctagttttcctgcctctgttaatcagctctctctggttttcacattttgcttcccacctcagctatagcagattgctaccgattcttgcagttttaattataattattattcttttttctcttcccccccattattactcagatctagaccatattactttaaccttaatcactaaaatagctaccgacttgacctacttgattctaggctcttctttctttggtgctattatatttttctttgctgtaaatacatagccatttttttttcaaaactaacaaatattccatgatctattttaaacattttataatgaaaaatttcaaaaatagcaaagttggaaaataagacaatgaatactcacatgcctaatacctagattcaataatctgtaatattttggtattacatcacacacacatacacacacacacacacacacacacacacacacacacatatatatgcactttttttcccctgaaccgttctaaagtaaattacaatttccatgaaattttacttttaaattcttcatctggcatctctcactgaccttttcctgcataggacattctcatacataaccataatgccataatcacaccgaacaattaacagaaattctctaatatagcttaatacccagtctatattcagatttccccaattgttgccaaaatgtttcatggctgttttttcccttccaaattagtactgagccagtgactctcactatgtttattaaacatcttaattctgtcttaatcttgaatagctcccatccactttatactttgtcatctttattgttgttgtttctcgtgacattgacctactgaagaaaccaggccacttgtcttgcagtatgtttttttctgattttttctctgtggcattgttcaatagtagtttttttatagccataaatataaaayatacccattttatacccattttggacaattcagaaaatagtgcaacaaagataaataatttcatcacctagggatagtttttctttagttttcttttgcagttgcagatttactttattttattatgttttatttgagacaagatcttgctctgacactcatgctggagtacagtggcacaatcacagctcactgcagccttgatctcctgggctcaagtgatcctcctgcttcagcctcctgaggagctgggactacaggtgaacaccaccatgcctggctaattttttttttttttttttgtagagatggctcactatgttgcccaggctggtctcaagcacctgggctcaaactatcatcccaccttgatctttcaaaatgttaagactacaggcataagccactgtgcctggctcttaggcagattttaaaaatagtttagagcataatgatcatgtacttaacattttactaatttctctttaaacatgattttaaatggctgcacactgttttatgttataattgaactgatgtttacttaaactgatgtttacttattgattgaacatttagtttccttttagtttttgacaatataaactgtgatgaacagacatgaataagaatttgattatatttctcattgctttcttataaattattacagatggtattactaggtcaaaatatgtgaagattttaaaggtttactaaattgcttttcatccagaaagcaattccataatttgctctcttaccagcagtgtattcacgctctcttttcatattaaacattatttatttatcatttatttagtaatatgctggagataaaacattctgacattgttttgacagttctgatttcttacccatttgagttcaaattagccttggagtattttctagctgtaatttaagctatctatactgattcattctctgcccacccttctttctccatattcctgtctctgctcaggtttacttattgtctcaggacacaacatactgctctggtaatatcgctgtcctccccattgccttgcttttgtagactttgtcctctgaggtctggcacaagttgcactgtttcattcttccatcttttattgattcttcctctcaatattcttcctctcaatattctttttcttcctattctatctttttctcccccttgatattctatctttttttctgttctgtctttttcattcttccatcttttattgattcttcctctcaatactctatagcacttaagtctataccataccatttggcacccaaccaaatttaattcaaatataacttataattagtatatcatgcactttgagttctttaatttgaatcctcctttttctgataatttagaataatatctatcacccttactgtttgggtggaaatatcaccaataagcacttttcatctaaaaaacttttaaacacccttttcctcccagtcacttaaaacccttaatactttctcatgtgacctgttaagccattatctgctctgttggtgattttaaaaatttaaaaaacatatcaatgagtgtaagtcattgttctctaagttctgccccagctttaggcttgagaaccatgrcatctatctcatgagttttttccgagggaaagatagatggaatgttggaagggcagtttgtgtgtcatttatgaactttgtcttatcgtacttatggcaaacagaactaccactgagtaatgtttatttctctctaaatgttatagttttaaaaaatactcctttttgagcctatggtattttatgtacctgagctactagaatttatataaaaaattggtttaaaccacctaggatttacttacggccattaaaacttttaaattgaacaaccatgattatattatttaaaaataggatattaaaaggcagtgtgtggaacccacactgggcagtaattgagagatctaactctatgtgaccttagaaaaatttacattttgaggataatagcttccatatccacaaaatgaaggtgttaggggaaaaaagcacaggctttacaatctgacagacttggcttttaatcatcaaactgccattaactacagtatgatcttgctcagtcacaatatctaacccccgtttcctcattcataaagtatgattaagtaccattaatagtacttaatcgtactttattaaatagtaacgtttcatgaaattattgtggatgctgagatatacatacaaaaccctttagcatagtgcctagcacagaataaataatgttaactattcttattcagtgacctttttggctattgtaaatgatgtccccacaaacttcagagaagactttgaattataagacatcataactttagtaatttgggtattgttgctaatgtttaggtaatgattagttttagtatgttgttttccagtgcaattacttaagaaagcttgtcttccttaagtattatcttccttggaaggtaatccagctcttgaaaatacccattctgtgtgagcctttctggaccttgctgtctaatttctgaaatgcacacgsagtgttggtgagactgtaaatgtacttctttaattgtcacagtatttttcctttccctcacttaccctcctctcttttactcctctcccctcccttttacccccatagctaaaacatgtgacaccaatgctggacattttttatcaaatggcaggagaatttagtgtctgacaatttatgaagaagacactttgaaatagggatgtcagaacaagtctcaaaatatcccactcaggcactgtcttcttaacctatgcaatgctctctgaatcattggtctgaaattggattattctatgatagtataagatttagcttaacagtttcatgtttatttagaaaggctgtggaacatggaggttaggggttaaaatactatgaatgaaatttctgacattacactttttttctctttttcctgtgtattttaattctagcaaagcaaatgaggaaattagaatatccaaaactcatttaaaaaaattgtggtaaaatacatgtaacataaaagttcatgtaatcccttttaactgtacatttctgtgacattaagtacatccaaattgttctgcatctatcaccaccgttcatttccaaaaatttctcatcttcctcaactcaacctgtacccatgaaacactaactgctctttcccatgttcctagtctatggtaaccactgatctactttctgtctccatgaatttgactactttggaaccttctattagtggagtcatatactttttgtccttttatgcctggcttatttcatttatcataatatcttcaggtccatccatgttgtcatatgtcaaaatttccttcctttcaaagactgaataatactctattgtatttatgtgtatatacacaccacatattgtttattcatttattmcttgatggacactgcgttgcttccacatttttgctactgaaaataatgctgctgtaaatatgcattggtgtacaaatatttctttgagaccctgctttcactttcgggtatatacccagaatccatccaattgttggatcatgtggtaattctgtttttaattttttgaggacgtgccataccgttttccacagcagctataccgttttacattcccactagcaatgcacaagagttcagtttctctatatcttcacaaacatttagcattttctgtttttctttttaataatagccatcttaaatagccatgggtgtgaagtggtatctcactgtgctttgacttgcattgccctaatgactagtgatattgagcatcttttcatatacctattggcaatatgtatatcttatgtggtgaaatctctgttcaaatccttcgcctgtttttggtgaagtacttttgacattacagtgtcagaggtgcctattacaacgtgcctgtaaactagctaggatgatgctacatactattgaacttgttgaagagagaaactgtaatccagatgcaaggatcttcaatggttgtttctcactgctacaattgtattttatgacttttaagtcatgacttttaccttttttaaaataataaaatagataatgtgtactgtgcatccaacttagtaatttaggggaaaaaggaaactaagggatgtagcaacaaaaaaatttataaactagaaattggaggaattaataactgcaagaatggtttataaaaagttatgaaatagagaaattgatagaactataccaagaaaaacaagagaactagggttaaaatcagcaaacacagactatataaaatgtaggtatttttataaattagaattctatgcccacgtggatgatagatatgtaaatctcaatgtaatgatatatacctgagtggcactttattttgctcaaatatgatctgtagggtctttgtattttagttatccagtagttctttcttctcagaaaaatagagtggatgttttcatccaatttagttttcagcataaaattttcttattttatttgtatatgtgtgtgtgatgtgaaataaatacacatttggtaagttagtttgatatcatgtaaagacttcagagaatagatatttatgtggcacaactttgcagagaataattttattagctttcttccctaatttgagctttcaaaaaaaacaaaaacaaaaacactgattaccgaaaatgtcaaagttgtttagtaaaaatagaaaaatgtgaggatagactatgcttgtacacaagggaactttaaaaagtttgtggaaaatggaattaaaagataaatataaaaaatataaactttagttctcaatataagctccatcaggaacaagacacttttgtaagcaatgataccaggcatttagttcatccctaaataactgagggtcctaggaatttaactatgtcagcgaaatctttttttattattattactgaagaaaaatgggttccttttacaaattttttgaggttaggaaacaaaaagaagtaagaaggagccaagtcaggactgtaaggtggatacctaatgatttcccatggaaactcttgcaaaattgcccttgtttgttgagaggaaatgagcaggagcattgttgtggtggggaaaggactctggtgaagctttcctaggtatttttctgctaaagctttagctaactttctcataataataagcagatggtattgtattttggccctccagaaactcaataagcaaaatgccatgagtattttgaattgtgagttttttgaattgttgctatgacctttacttgtaaccagtccacttttgctttgactggactacttccacctcttagtagacattgctttgattgtttttgtcttcagtactggtaaaggcatgtttcatctcctgttctttgaagaaaggcttcaggatcttgatcacagttgcttaaaatttccactgaatgcactgctcttgtctgcagctgatctgggtgcaacagttttggcacccattgagtggaaagtttgcccaactttaatttttcagtcagaattgtgtaagctgaaccagctgagatgtctatggtgttgcctattgtttctgctgttaatcatcagtccttttcaattagggcatgaacaagtttttttttttttcctcacaaattgatgcagatggtctgccactgagggcttcatcttcaacattttcttgctccttctcaaaatgagttatccatttgtaaactgctgatttctttggggcattgtccccataaactttttgtaatgattttgccattcttccatccagtcttcaccatagatgtttgttcttttttcaatttagtagaattcacattgctctgataggagcttttttcaaatggtcttatgcttctttgtgcttccaactaggtgctgttcagacatgttataacaagttaatacaagtttgttttggtgcaaatgtttttaaaatccatgcatagtttttaaataatatgtatttttcataaactttttgaagtctcttgtatttgatgacttctaccatggacattgaacaactatactgtttaacgctaaatctgaatttaatgatggatttggttttcctcttttaaatcatgtgtaaatgactattaattctattatgtgggttttggttatgctgcaatgcattgtacccatggaacagcacaactaatggctaatacttctaatgtgaggaatttaattcatctttaaaatgattataaataagtagcaatatgaaaataataataagaggtaktaagttccttcatttttctaacagggtcaacatatttcactggcacctattcacaagcttgaagaagctctgtatgaataccagccactgcagatagagacatatggaccacatgttcctgagcttgagatgctaggaagacttgggtatgtgtcctaaagaactttacattgaggagctgatatgtgggacttattgctgttcttaactgacatgttaacattcttagattttcagtttatagaactttactgttttgtgaaaaatgaacagtactcaataccaaattgttttatttagtacattaatttttctgtggacttgttaggtctcttgagattgagcctggaatacattcgttcttttagaagtctgtccttggcagccatattgaaatggcgtttattttcagtcatgagtgtttttttcttttttaaagaaattggggcttaatttagttagtagtaagccaataaaaatatgaattgggctccttgccatgaaaaagggtagatttactcattgtgcactgtctacagtgaaactacatttatgagccatgagccatgaaatatattttgttgaaaggtataatgtaaggctggccctgtggttcaacagtcatattatatatatccattctggaaatgaacctgggatcctggcttttgtgagggatggagagatggttatagtctctctcatgggagcaagtgggtatttgtatacttgaaaagcgcaggcacagatgttgctagatggagcaaatcatttcttggtctsattttaaaatgtgaactattgaatgaaaggctgatccagaaactgttgttgcttaacaaaagaaaatagtggaaagaatatactrtgaaaaaaaagtgggtaaatcgagtccaagaaactaaaaagcaatagaaaaagtcagagaccccaagaacaaaaacaagaaagatgaaacaaataataaaacctacatgcatcttcaaaaacaaaaccaaaatctggaacatgttgcataatattttacatgtgaacatcaaggctccaaggtaaagttacatttaaatgatatttaatatcttaaggctaaattttattcagttctttattctcttaaagtcctacagcctrcaagcatgaagccaacaggatgtaaaacaacctaaaaccccctttgagataacagatttattaaacaattgtcttaaatgctaaaattgaagtttgaagagatagacaatattgcgttttataatgtaaaaagttatacatgatgtagacatttatttcttatctcttacaaagagccagaatcgtgtatctttaaaataaatttacttcaaaatctttacttttaatgtccgtgaagttcacgtgtttaaaatagtactcctctgttactaggttttgcattttccaataattttgtcaaaatttttcatatacagattttcttatgtccgggtagctttcttctgttcctagaatgttgaattattattatttttttcttgagacagagtctcactttgtcacccaggctggagtgcagtggtgcaatcttggctcactgcaacctctgcctcctgggttcaagtgattctcatgcctcagcctcccgagtagctgaggctgcaggcatgcaccaccatgcctggctaattattgtattttttgtagagacagggtttcaccatgttggccaggctggtctcgaactcctggcctcaagtgatctgcccaccttggccccccaaaagtgctgggattacaagtgtgaaccactgcgcccggcccatcttttaatatactgaattcagtttgctggtgttttgtcagggattcttgcattagtgttcataaaggatattggctcatagtgttttctagctttattaagatataattaaaaaagaaaaattatatatatttaagatagagaagatttttttaagtattaatttttgtgggcacatagtaggtatatatacagtgggctatgggagatattttgatacaagcatgtaatgtgtaataatcacattaaggtagatggtatatccattacctcaacatttattctttgtgttacaaagaatccaattatattattttagttattttcgaatgtacaattaaattatgattgactatagtcaccctgttgttctatcaaatactagttcttggccaggcgcagtggctcatgcctgtaatcccagctctttgggaggctgaggtgggcagatcacttgaggtcaggagtttgaggcaagcctggccaacatgatgaaaccccgactctactaaaaatacaaaataatagctgggtatggtggtatgcacctttaatcacagctacttgggaggctgaggcaggagaatcacttgaacctgggaggcagaggttgcagtgagccaagattgtgccactgcactctagcctgggtgacaaaaacaaaaacaaacaaaacaaaaccaaaaactggttcctattcattctaactatttttttttctacccattaaccatccccacatcctctcccacctcctcactacccttcacaacctctggtgaccttccttctactccctatcagttcaatttttagcttccacaaataagtgggaacatgctaagtttgtctttctgtgcctggcttatttcacttaacataatgaccaccagttccatgtatgttgtttcaaatgacaggatcgcataccttttttatggctgaataatactccactgtgtatatgtaccacattttctttattcagtcatctgttgatggacatgtagattgcttccaaatcttggctattgtgaacagtcctgtaacaaacatgggagtgcagatgtcattttgaaatactaattccctttcttttgggtatatacccagcagtgggattgctggatcatatagtagctctatttttgttttttgacaaacctcgaaactgttctccatactggttgtactaatttacatatccaccaacagtgtacaagattttcttttttccacatcctctccagtactcgttactgcttgtctttggataaaagccatttaaactgggatgagattctatctcattgtagttttgatttgcatttctctgatgattactggtgatgttgagcatttttacatatgactgtttgccatttgtatatcttcctttgagaaatgtatgttcaaatcttttgcccatttttacgttggattattacattttttcctgttgagttgtttgagttccttacatattctggttaataatgccttgtcagatgggtagtttgaaaatattttctcccattctataggttgtctctttgttcatcgatttcttcgctttgcagaagctttttaacttgatgtgatcctacttacctatttttgctttagttgcctgtgcttgtgggggtgttcctcaaaaatctttgcccactccaatatcctggagcgtttccccaatgtttaattttagtaggttaaatagtttgaggtcttagatttaagtgtttcatcctgatttgatttttgtatgtggtgagagttaggggtctagtttcattcttatgcatatggatatccagttttcccagtaccatattttgaagagattttcttttcccaaatgtatggtcttggcacttttgtcaaaaatgagttcactgtagatgcatggatttgttttgagattctctattttgttccattggtctctgtgtccatttttatgccagtaccatgctattttagttactatagctctgtagtatttgaagtcaggtaatataattcctgaagttttatatctttaaagtttctttaaagatagctttggctattctgggtcttttgtgattccatataaattttaggaattttttaatttctgtgaagaatgtcattggtattttgatagagattgcatttaatctgtagattgctttgggtactatggccattttaacattattgattcttccaatccatgaacatggaatatcttttgtgtgtgtgtgtcctcttcaattttttgcrtcagtattttatagttttcatagtagagatctttcacttatttggttaattcctaggtattttattctagctattgtaaatgggattactttcttgatttcttttttagattgttcactcttggcatatagaaatgctgctgatttttgtgtgctgattttgtattctgcaactttactcaatttgtttatcagttctaatagtttttttgtgaagtctttaggtttttccaaatataagatcatatcatctgtaaacaaaaataatttgacttactcctttctgctttggatgtcctttatttctttctcctgtctgattgctctagctaggactgccagttctgtgttgaatagcagtggtgatagtgggcattcttgctgtattccagatcttagaagaaagactttcagttttcccccattcagtatactagctgcaggtctgttatatatggctttcattatgttgaggtaaattccttttatacccaggtttttgagggtttttaccatgaaagaatgttgaattttattaaatgcttactcagcatcagttgaagtgatcatatggtttggtcctcactctgttgatatgatatatcatattgattgatttgcatatgttgaaccatccttgtattcctgggataaatcacatgtggtcatgatgagtgaatgatctttttaacatgttgttgaattcagcttgctagtattttgttgaggcttgcaaacactatcttataacccattattttaagctgatgacaacttaaggttgatagcataaacaaacaaacaaacaaataagcaaaatcaaaactagtaaaaactctacactttaactttgtccccttgctttttaactttytgttgttctatttatatcttattgtactacgtcttgaaaagttgtagttattatgtttaattgatttatcttttagttttcctacttaagagtagtttatctaccatgattacagtgtgggaatattctgtgtttttctgtgtacttaccattaccagtgaattttgtaccttcaggtgacttcatattgctcattaatgttcttttctttctaattgaagaaccccctttagcatttcttgtaagacaggtctggtgttgataaaaaccttcagcttttgtttgtccgggaaagtctttatttgtttctccttcatgtttgcagaacattttcaccggatatactattctagggcaaaagctttttccttcatgccagtctcttctggcctataaggtttccactgaagagttcgctgccagacatattggacctccattctatgttatttgtatattttgtctttctgcttgtagaattctttatccttgacctttgggagtttgagtgttaaatgctttgaggtattcttttttgagttgaatctgcttggtgttctgtaaccttcttgtacttgaatagttgaatattgatatatttctctagatttgggaaatgttctgttattctccttatgaataaacgttctaccctcatctctctctctgtctcctatttaggccccataactcttagatttgcacttttgaggctattttctagatcttttaggcatgcttcattgttttttattgttaattttgttttgttttctttgactgtattttcaaatagcttatattcaagttcactcttctgcttaatcaattctgctattaagagactctggtttttgtttgtattttcttgatgattagtgatgttgagcagcttttcatacaccttttggccattcatatgttatctttggggaaatgactattcaggtcctttgcccatttttaagttgagttatttggttttgtttgcctttgagctattcaagttctttatataatttgggtattaaccctttattggatgtatagtttgtatagtttgcaaatatattttcccaatgtgtaggttggtttttcattttgttgtttatttcctttgttgtctagagctttttagtttgatgtagctctatttgtttattttcagttttgttgcgtatttggtgtcttatccagaaaaccattgccaaagttaacatcaaggatctttctcactatgttttctcttaagaattttatggtttcaggttttatttttaagtctttagtccattttgagttgatgttttttaatatggtgtatgataagggccagtttcattcacttgtatgtgtatagttctctcagtgccattgactaaaaatattagcctttttccattgtatgttttcatgcccttatcaaaaattagttgactgcagatgtttgggtttatttctgggctccctattctgttccaatgtgtatatgtttgtttttgtgtcaataccatactatagctttgtaatattatctgatatcagcaaatttggtgtttccaactttgttcttccttttcaaggctgttttgttttttgtgggtattttgtggtttcatgtgaactttataatttttttctatttgtattgaaaatgccatgagaatgttgatagggattttgttgaatctgtatactgcttttggtagtatggacattttaacaatattcctctattcttacggacatgggatttgttgccgtttatttatgttgtcttcagtgtttcatatttttcagtgtgtacagctttgacctcctttgttaaatttgttcttaagtatcttaatctttttgattaatcttttgattagcctttgaaaaaggctaatgtaatgttttgattacattacattaaaggctaatgtaatgttttgatttttttcagatatatcaatattagtataaagaaatatagctgatttttgcatgtctgttttgattacaaaaaagctaatgtaatgttttgatttttttttcagatacttcactattagtataaagaaatatagctgatttttgcatgtctgttttctatcttgctactttattgaattcattttctaattctaactttttggtctaatctttatgattttgtacatataggatcatgtcatatgcagagaggcataattttacttcttgatttcctatttggatgtattttatttttcttgtctaattgctctttataatacttccaattctatgttgaatgtaattgatgaaagtggacgtccttgtcttggggtcaggcaaaaactgaaaacttttcctctgttgattataatgttaggcataggcctttcataaatgacctcaattttgttcaggacattttattctaaacttattttgttgacagttgttatgaaaagattttgaactttgtcaaatgctttccctgcatatatattgagatgatcatgtggtttttatttttcattctattgatgagttgtataacattgatttgcattttttttgttgttgttgttacatatcagagctgttttttttcttgtttttgtttgttttttgtttttattttattttattattatgctttaagttttagggtacatgtgcacaatgtgcaggttagttacatatgcatacatgtgccatgctggtgtgctgtacccattaactcgtcatttagcattaggtatatctcctaatgctatccctcccccctccccccaccccacaacagtccccagagtgtgatgttccccttcctgtgtccatgtgttctcattgttcccacctgtgagtgagaacatgtggtgtttggtttttgtccttgcgatagtttactgagaatgatgatttccagtttcatccatgtccctacaaaggacatgaactcatcatttttcatggctgcatagtattccatggtgtagcagaactgcaggaaatagagacacaaaaaacccttcaaaaaattaatgtatccaggagctggttttttgaaaggatccacaaaattgatagaccgctagcaagactaataaagaacaaaagagagaagaatcaaatagatgcaataaaaaatgataaaggggatatcaccaccaatcccacagaaatacaaactaccatcagagaatactacaaacacctctatgcaaataaactagaaaatctagaagaaatggataaattcctcgacacacacaccctcccaagactaaaccaggaagaagttgaatctctgaatagaccaataacaggctctgaaattgtggcagtaatcaatagcttaccaaccaaaaagagtccaggaccagatggattcacagctgaattctaccagaggtacaaggaggaactggtaccattccttctgaaactattccaatcaatagaaaaagagggaatcctccctaactcattgtatgaggccagcatcatcctgataccaaagccgggcagagacacaaccaaaaaagagaattttagaccaatatccttgatgaacattgatgcaaaaatcctcaataaaatactggcaaactgaatccagcagcacatcaaaaagcttatccaccatgatcaagtgggcttcatccctgggatgcaaggctggttcaacatacacaaatcaataatcataatccagcatattaacagaaccaaagacaaaaaccacatgattatctcaatagatgcagaaaagcctttgacaaaattcaacaacgcttcatgctagaaactctcaataaattaggtattgatgggacatatctcaaaataataagagctatctatgacaaacccatagccaatatcatacagaatggacaaaaaatggaagcattccctttgaaaactggcacaagacagggatgccctctctcaccactcctattcaacatagtgttggaagttctggccagggcaatcaggcaggagaaggaaataaagggcattcaattaggaaaagaggaagtcaaattgtccctgtttgcagatgacatgattgtatatctagaaaaccccatcgtctcagcccaaaatctccttaagctgataagcaacttcagcaaagtctcaggatacaaaatcaatgtacaaaaatcacaagcattcttatacaccaacaacagacaaacagagagccaaatcatgagtgaactcccattcacaattgcttcaaagagaataaaatacctaggaatccaacttagaagggatgtgaaggacctcttcaaggagaactacaaaccactgctcaatgaaataaaagaggatacaaacaaatggaagaacattccatgctcatgggtaggaagaatcaatatcatgaaaatggccatactgcccaaggtaatttatagattcaatgccatccccatcaagctaccaatgactttcttcacagaattggaaaaaacttactttaaagttcatatggaaccaaaaaagagcccgcatcgctgagtcaattgtaagccaaaagaacaaagctggaggcatcacactacctgacttcaaactatactacaaggctacagtaaccaaaacggcatggcactggtaccaaaacagagatatagatcaatggaacagaacagagccctcagaaataatgctgcattatctacaactatctgatctttgacaaacctgagaaaaacaagcaatggggaaaggattccctatttaataaatggtgctgggaaaactggctagccatatgtagaaagctgaaactggatcccttccttacaccttatacaaaaattaattcaagatggattaaagacttaaacgttagatctaaaaccataaaaaccctagaagaaaacctaggcaataccattgaggacataggcatgggcaaggacttcatgtctaaaacaccaaaaaaaatggcaacaaaagccaaaattgacaaatgggatctaattaaactaaagagcttcttcacagcaaaagaaactaccatcagagtgaacaggcaacctacaaaatgggagaaaattttcacaacctactcatctggcaaagagctaatatccagaatctacaatgaactcaaacaaatttgcaagaaaaaacaaacaaccccatcaaaaagtgggcaaaggatatgaacagacacttctcaaaagaagacgtttatgcagccaaaaaacacatgaaaaaatgctcaccatcactggtcatcagagaaatgcaaatcaaaaccacaatgagataccatttcacaccaattagaatggcaatcattaaaaagtcaggaaacaacaggtgctggagaggatgtggagaaataggaacacttttacactgttggtgggactgtaaaccagttcaaccattgtggaagtcagtgtggtgattcctcagggatctagaagtagaaataccatttgacccagccatcccattactgggtatatacccaaaggactataaatcatgctgctataaagacacatgcacacatatgtttattgaggcactattcacaatagcaaagacttggaaccaagccaaatgtccaacaatgatagagcggattaagaaaatgtggcacatatacaccatgatttgcatttgttaaaccaaccttgcatcccaggcataaatttacgtactcatgatgtaaaatcttcttggtatgttgttgattgcatctcttcatctgagatactggcttttagttttcttgtagtctctgtctggcttttatatcagaatgtatagtcagggttctctagagggacagaactaatagatagatgtatatatgaaggggagtttattacggagtattgactcacacgatcacaaggtgaagccccactatacaccatctgcaagctaaggagcaagggaggaagccagtccgagtcccaaaatctcaaaagtagggaagccgacagagcagccttcagtctgtggccgaaggcttgagtgcccctggcaaaccactggtttaagtccaagagtccacaagccgaagaacttggagtccaatgtttgaggacagaaagcatccagcatgggagaaagatgaagtctggaagactcagcaagtctgctctttccaccttcttttgcctgctttattctagccacactggcagctgattaggtggtgcccacccagattgagaatgcgtctgcctctcccggctcactgactcttgttagtctcctttggcaacaccctcacagacacacccaggaacaatactttgcatccttccatccaatcaagttgacattcactattaaccatcacacagagtatagaatgagttagggagtgtttcttcctcttcacttttttagaaacatttgagaaggattggtgatagttcttctttaaatgtttcatctaggttacccagtttgctcatagttctctcatataatcctataatccttttaatttctttagaattggtaataatggctccactttcatttctgattttagtaatttaagtcttctctcctttttccttagtctatttagcatttctgattttactaatttaagtcttctctcgttttttcttagtctgtttagctaaagatctggtaattttgttgatctttttgacagaatcacctcaatttatttatttttctcttttttctattctctattttgtttatttctgctttaatcttcattattttcttttttctgctagttttaggtttagtttgttcttctctttctagttccttaagtgtaatgttagattgttgatttaagacttttcttgttttgtttgttttttttttgagacaaagtcttgctgctctgttgcccacgccagagtgcagtggcatgattcagctaactgcaacctccgcctcccatattcaagtgcttctcctgcttcagcctcctgagtagctggaatttacaagcgtgcaccaccattcctggctaattttttgtagttttagtagagaccgggttttaccacgttggccaggctggtctcgaactcctgacttcaagtgatctgcccaccttggcctcccaaagtgctgggattacaggtgtgagacactgtgcttggtcagatttttcttgttttttaatgttagcactcatagctataaattttcctcttagtactcttttgctgtgtcccatamgttttggtatggcttgttcttgtttttattcatttccaactattttctaattttccttgcgattttttttgaaacattggttatttaatagtgtattgtacgatttctacaaatttgtgaattttctagtttttcttccattattggttgctaacctcatcctgttatgattggggaagatactttgtatgataycaattttttaaaaatttattaacacttaaattatggcctaaaatatggcctgtcctggaaaatgttccatgtgcactttagaggaatgtgtagtgtattttcttgtagttgagtatagtgttccatatatgttttttcagtccagttggtttattctattgttcaagtcctctgttttatttatcttttgtctagtttttctatctattattgagaggggagtattgaaggctttaactattattgtaaaactctccctttggttcatatgttttgatggtctgttattaggtaagtaaatattttaactaatatgttatgttcttttgtcttatgaacacttaaagttgaaaatctgttttgcctcatattagtatttacctctgttctgtttttgttactattcgcatggaatagcctttttcattcttttacttttaacctatttgtgattttgaatccaaagttagtttcttgtagataacatatagttggatcatggttttatttattttttatgtattctaccaatttctatcttttgattggagggtttaattaagccacatttaaagttattactgataaggatggtcttccatcattttttatttgttttacatgtgccttatagctttttctcccttatttcctatataactgttttctttgtgtttattttttagtgccacattgaaattctttgcttatcctctattgtgtatattcttgagctattcttttgtcattatgatgattacatttattatcctaagttgtagcactctgaatttatacaagcttaacttcagtaacatgcaaaaactctgcttttaaacagttctgtcctcaccccttttagttgacagcaccacagaattacatctttatatattgtgtgtccaagattattaataaattatttttttaaatgtgttagtttcttaaattatgtagaaaacaaaatgtgagttataaaacttagtaataatactggcttttagactaatttttttaraaaagatattagtctcttaaatcttacartgttataccttttgattatcttttttacttacacctcttgtatgctctattttgtgctttttaattttttaaaaaagtttgttttaaaagttaggataatttctcttgtcccatcttcaagttcacttattcttctattttgcccattctgctgataaggccatcaaaggaattctttttaatattgcaatttttatatctagtattttcattcactttttaaaaatgattttcacttcttaaattccctacctgttcatacatattatccaccttttccattagatcctttaagttattaatcatagtattttcttaactcctcctcttatctttgggtttgattctgttgactgttttgtgtcctcatgatacatttgttttcctgtttgttttagttattatttgaatattggacattctgtatgacagaatagtagattctgagataaataatatttatgcacagaaatatttacatgcctttttctgctaggccattagtgtcaagagctgagtattctgtattttgatcttggttttggttttttgttgctccagttcctatcaatgtaccacaggcttcaaattcatctagtcacaatttattgccaccttgcttttagtgtgaggcctggagtgctggaaggagttttctaggttttcttgttctaccctctagttttcaacaggctctgtaagcctgagccacagagggcttctctcttggtgttgctcccctatagtagattgcccttgctttttacttagaataagtcttatggtgggaagaaggtttttcttgcttctccttttccaacgttagtcataggaggacctgtgtgcctgaggatcaggatggtgctttcttagtgttcctayttctttcccagaggccaacaatttgtatctgttacttcagggtacaggtggcttttctgtccctccccagactcgcaactgaagtttgtcttgttttgttgcaggtggggaatcttgggcacagggctgtttcctgcctctcccctagacttatgctttgcatcagtgtaggaccctaggtgtgagttggtttcctgcctttcctcagtggttggtttctctttcctgtttcaatgtaggactaggaatgcgggcagtaggttttctacccctcctccattggcacccaatctttgctcctccgtagcagtggaggcttggatgttttttttttttaaaataatttatttcctcttgcatttagtgcttcattattgctgattttattgggtctgtttcatggaatatcctcctcatctttctkttttagtcttctatggtggtggtacttcttagaacatgaagatttaaataagggttagaattccctgtaaagtaggtttagcctgattgtctattttttcccagtaagttattaaattaaataaacttgggcaacactttgtttggagccctttttgtgtttctttctgcctttacctctatgggttggagttttaaatgtaggatgtgtcctttagataaggtataaccttagtgttcttacttttcccaagtttttcatacttaacatctgatttgaagggagggaggagcactttttgtgtgtttgtgtgtgtgtctgttggtggtggtggtggtggtagggccttcatcaagcattgaatatttataatacaattagttccaagatcctagaagtagacttttgtctttgtccataaagactgtacatacattttatatctacaacagttaaaaaggcaaattgttacgattacaaataaacatgtatacacttcaagcagtaaatcttggccgtaacagtttcttttagccatctgtggctaaatagtgaaggaatttagataattagtagtgatatcagaattgctaaataatttgttttttttggtccaggaactatttatctaccaaaatagaatgtgtaactcatacttcccttctcttcagtcttctaccttgacaaagggattacattctatacagaggactttagttattagagccaggattagctcaagctttctctttgttgatatattgtggccttatacttagatatgtgccaaagtaaatcctaaattgagttcttgtatcagaagttaactttcttttctggaattattatctgaagctatctgctttcttattgtttttcttattactgtagacctaaaaatatatttttacctaactaaatttttagaaacatttagaaaggaactgaagaagttgctttgtgaagtgacttttcaaagaatgatttgaggtgctgttcataaggtatgaggataaggtatcagttttgtaaagctgtaatattttcacattcatcctaacagttgtccatgtcgttgctagaagattacatctaataagctccagttatccctttacaatggtctttcccccaacccaaaacttctagcctctagtgctctctcctttcctttccttattgtaacaaaatttccattttatattctgttttcctacaaagggaactagtttaatttctctagaggcaaatagagaatacatcaattatctcagccatgtgtggtagctcatgcctataatcctagcactttgggaggctgagttggaaggattgcttgacaccaggagttcaagaccagcctggtcaacatagtgagactctgtctcaacaaaacaaaacaaaacaaaacaaaagaaatcatctcgtttccgttttccaatatctgcgttgaaactatgtgacatggtgaagttaagagtagtacagtttttttgtagctacaccttatttgtttctaaaatgtggacacaggcactttcaagataattttaattatgtatttttgggagtggatgacataaggtcttgggaggcattggtctcccaagaactatatttttgttcttttataaaactttgataaggaataaaaccaaaagaatactgcgttgagatttttaggtgattgttactgagatcttttcacaatgaagttagttaaactagagaaatagatgaagaatatttgtgaatttctcattcacagggtatcattagtaaataattataactcaaattgtactggcagtactcttctggtgtgctcaaaacaatacataaacatgttttattctgtgccagtgggagcaagcagtgggaaaacttaactgctaattgaaattccctagattatggccatagtggttagtttaggaaagtctaattgattgtcaatgtgagactctctttttaataatcatctagctttctagttaatattttactaccttccactcaaagaagagttattcccttaattgatacaaatcatgaacatttgtgacacaactagattcatccatttcaagttattaatcaaatataactactgtcttcttttttctttttgaaatggagtctctattgcccaaactagagtgcagtggcgtgatctcggctcactgcaacctccgcttcctgggttcacgcaactctcctgcttcaaccttctgagtagctggaaaaacaggcgcacaccaccatgcctgtctaattttttgtatttttagtagagacggggtttcaccatgttggccaggctggtctcgaactctgaccccacgtgatccacacgcctcagcctcccaaagtgctgggattacaggcatgagccaccgcgcctggccataactactattttcactaagtatacaagtgatttatttaatgtgagctgttcatttgtgaatgattatggaaataaaaaaaaaagacttrttggcaaagtgttgaatagataactttattgttattattttatttctttcatgtactccagcagataaagataatgtaccttctgaacctactcttaaaattcccaagaaatcaattgacagattagttataagtaagaaatttaaaacttgattttaaacatttataatttatatccgcatgattttttgtaaattttggtttggattcttagaagttcatatmacattttaatgaatgtttatgagtaaatttctgtattactcaaatacttgaatagtgaaaaataattaaaaattacagagtatttaaggtagatataaatttgtcatatatatggtttcaggcaaactttgataccggccatgaaaatactacatgatgaaatatttaagtagtttcatataagagttacggttttattaaaagcactgctagtttatatttatgtaaatatatgcattatgtaaatacataatttatatatatctttaaatttctgtgtaaaataatcatatgtaaagctgagaagtaagaatgacttctctaatatgatatttcagaatgcctttctcagttttatgggaatatctattactttcattctatgacatgttgtgacatttttatgataaaatatctttatttaaggtgtgtattcttaaattttccttatgcatgatttaaatgaagctgtttgctaccaaaattctgcagaatgaaatttttttcttttactgatacataatattttacatatttatggggtacatgtgaatatttttacatgcatagaatgtgtaattatcaagtcaggatatttggggtatccgtcaccttgagtatttattatttctatgtgttggtaacctttcaagtcctctcttctggctacttagaaatatataacatattgttgctaactgtagtcaccctagtctcttattgaacattagaacttatttcttctatctaactgtaagtttatactcattcactaacctctctttatttttcctttccgccctcacacccttcccagcctctgctatattctagtgtctatctccatgagatcaagtttttatgtgagtgagaacatgcaaaagttgtctttctgtgtctggtttattttacttaacctgatgaactccaattccctccatgttgctgcaaatgacgtggtttaattcctttgaatggctaaatagtaatacattgtgtgtgtgtgtgtgtgtgtgtgtgtgtgtgtgtgtgtgcgcgccacatttttttaatccatttgtccatagatggatacttagattgattctacagtttttgctattgtgaatggtgttgtgatgaacatgtaagtgcaaggtgtccttgatatactgatttcttttcctttggttagatacccagtagtgggattgctggatcatatagttctattttaattttttgaggaatctccatactggtttctgtaatggttataccaatttgcattcccaccaatagaatcctcttttctctgtatccttaccagcatgtgtaattttttgtctttttaataatagccctgctaactggggtaagatgctatctcattgtggtttatatttgcatttccctgatgattagtgatgttgagcattttttcatatacctgttggcatttgtatgtcttcttttgaaaaagtttctattcatattctttgcctactttttaatgagattacctttttttattgttgaattgagttctttgtatattctagatgttaggtccttgtaagatgaatagtttgcaaatattttctcccaatcaacatcttgtctcctcactctgttgattgtttcctttgctgtgcagaagtttttagtttaacatagttccatttgtctatttttgttttacttacctatgcttttgaggtcttagccataaaatctttgcctaaaccaatgtcctcaagtgtttcccctttgtttttttctagtagttttatatcatctggtcatacatttaagtctttaattcaccttgagttgatttttgtatatggtgagagataggagtccagttacattattctgcatatgaatatccaattttcccagcaccacttattaaagaaggaattctttccccagtgtacgtacttggtatcattgttgattattaattggccgtaaacaygtggctttatttccgggttctctattatgttccactgatcttgtagaatgaaatttttatcttaatttcatgtagagcttgtctttatactgctttgtggtagctacaatgctctatcacaaagcaatacaaagatatagatgcacgtacttatttctgtcttatgttgacataactggcataagttctgtactatcaatcagcaaactttaaaaatgatttttaactgtgaaggtttaatgtcctgagtcacaagacatgataatatctattattatatcatcagtagtgaaaataattgtagtagttatgatgatattgaattaagtcagttaattagaacctgatggtaattagaagaaaatttcttgcttgatctctattagcagagaatatctaactattattatatcatcagtagtgaaaataattgtagtagttatggtggtattgaattaagtcagttaattagaacctgatggtaattagaagaaaatttcttgtttgatctctattagcactattaattttgttttcttgtgtggccatagactgcattcataaaaaccaacttgctgagcaaaagtaattgattatcacaaatctattactcttattggcaaagcaattaaaaaatctatgactcttgaagaaatagaatagggtccagttcacaaaaatacaggtgtacctcattttattgcatttcgttttattactttttgcaaatattgcaagtatatcaatgctgtttttccaacagcatgtactcacctcatgtctgtttttcacatttggttaattcttacactatttcagacttttgcatgattttatctgtgtggtgatttgtgattagtgatcttttgctgttactattattgttttggttgccacaaactgtacccatataagaaggtgaagttaataaatgtgtgtgttctgactgttcttctgactggctgtttccccatctctctctctctctctctctctctctctctctctctcttaccttggacttccctattccctgagacgcagcaatattgaaattaggccaattaataaccctgcagagggttctgtgtgttcaagtgagaggaagggtcacatgtctctcactttcaatgaaaagatagaagtgattaagcttagtgagcaagatatgtcaaaaaccaaaataggcaaaagctagacctcttgtgccaaacagccaagttgtgaatgcagaggaaaagttcttaaaggaaattaaaagtgttgctccaatgaacacatgaatgttaagaaagcaaaacagcctgattgctgctatggagaaagttttagtggtctggatagatcgaagaagcaagaacaatcccttaaaccaaagcctaactttctttaatcctatgaaggctgagaaaggtgaggaagctacagaagaaaattctaaagctaacaaaggttggttcatgaaatgtaaggaaggatgccatttccgtaacgtaaagtgcaaggtgaagcagcaagggctgatgtggaagcttcagcaagatctaccaagatattgatgaaggtggctactctgaacacagatttttcaatgtagatgaaacatccgtctattggaaggagatgccatctaggattttcatagccagaaagaagtcagccacttatggtagctcacacctctcattccaggattttgggaggctgaggcaggcagatagcttgagcccaagagttcragagcagcctgggcaacatggcaaaaaatacaaaaattagctaggcatggtgatgggaggtagctactcaggaggctgaggtgggagaatcacctgagcctggggaggttgaggctgcagtgagccatgatcatgtcactgtactccagcctgggtgaccctgagctggagtgtagtgatgtgatacagtgagagcctgtctcaaaaaaaaaaaaaaaaaaaaaaaaaaaaagtcaatgcctgtttccagagcttcaaaagcaagtctgactctctttttaggagcaaatgcagctggtgactttaaattgaagccgatatttatttgccattttgaaaattgtagggcccctaaaaagtatgctaaatctactctgcctgtgctttataaatggaatgaaaaagccaggatgacagtgtgtctgtttacagcatggtttgctgaatatttgaagcccactcttgagacttactgcttcggaaaaaagagatttctttcaaaacactgctactcattgacattacatctggtcacctaagacttctgatggatatgtgcaaggagatggatattgttttcatgactgctagcacaacatccattctaaagcccatggatcaaggagtaattttgacttttcagtcttgttatttaaataatatgtttcatagtgctatagctgccatagatagtgattcctctgatggatctggatgaaacaaattgaaaaccttctggaaacaattcattactctagaagccattaggaatatttgtgcattaggaatatttgtgatccatgggaggaggtcagaatatcagcattatcaggaatttgaaagaagttaattccaaccccatgtttgagattttgttggaagaagtaaccgcaaatggggtgaaaatagcaagaaaactagaattagccgtggagactgaagatatgactgaattactacagtcttataataaaacttgaacaaatgagaaactgactcttagggatgagtaaagaaagtggtttcttgagatggaatctgctcctggtgaagatgctgtgaacattgttgaaatgacaacaaaggatttagaatattatataaactgagctgataaagcagtgatagggtttgagaggattgcctctaatttttaaagaagttctgctgtaagtaaaatgctattaaacagcattatgtgctacagagaaatcttttgtgaaaggaagagtcaatcaacgcagcaaactttattattgtcttattttaagaaattgctatgacctccccagtcttcagcaaccaccattgtgatcagtaaagcagatatcaacatccaggcaagagctttcatcagcaaaaagattaggactagccgatggcccagaggatcattatcatttttcattaatacataatctatttatttgggattttaactacatttgcaaaatcattttttatatataatataatcacagcaatgaagactgtcatattgatggtcctatttatacccaaggactgagaattatgcaaggaatggatacaacggggtagaatattgagggccatgtctaaattctgcctactacaagcgagataggttttctcttgctacttatctttctcaaaatattctaagcatttttatacatttatactttgaagtaaactttgttggcaaaagcaacaaagcactccataattgtttcaaaatttgtgtacatttgaaaatttttataaaatactgtgaatcaagtaatgaaacatcaaaagccaccaacaacttagctaataagatacatccatccccctatatagtaatcaaacaccaatccttttgggattgtacctggaatttaaacttacaatctgatcagagaagaatgggcatttaaaatatacttagtttttatatatatcacacatttcttggaaattaattttcattatattctacttttgatgctgttgtgataaagttttcatcatgctttctaactggttcttgctgttatatatgaaaactattaaatgtaattttctacataatattttactgaattctaatagtttctatacctagttctattaggtraatatctgggtttttatctaggagtcagtcagctgaaaaaaaattttttttcttttcaatgctatatttgtgactttaggtttatattttattgtattttggctagaacttgtagaacttttagaccaagtataattctaataactgtagtttctttctgtttttttttctggtgaatgcctcaagtgtttcatcattaagtattatattcgctgtttaagtgttttttttgtatcacatatatgtattttctaaatcacaatgaaggaattgcatcatgaatatatattaaatcttcgtcttcacatttaattttattgaatgcttttatgcatctattgatgtagtttttgaacctaatggtgtataatattattaaaaattttttcaatagcaagtacttcctatattcctagatagctacctacctaaaatagcgtttgggaaaggtagaatttcagctgaaaacttcaagttcaggaaatttgttttaaatggattagtttacgttctaccagtgaaaaataattgaggcaatctataatactttaaaaatcttaacacttaagaaatttaaatttaatcagctatatgaaagcataattcacatacaataaaatacctattttattgtatattccaatgagttttgacaaacacatccagtttgtaaccaccagcacagccacgatatagaatatttgtataatctgctttcactgtgattgtgcttttttctggaaatcacttagaatttttacatatgaaagtgttacttatattccaaaatttccatgagagaatgtggcattctgtatactgctttttggtcatagtctttaccttcgtctttaccttataatattgacttattatatatggattgtgtaagaatggtgaaaacgtagttgtttcatttaagttttgttttgtttttgatgctacccatgtaagtttttttttttttttttttttctttttgatggagtttctctctgtcgcctggctggagtgcagtggcacaatcttggcctactgcaacttctgcctcccaggttcaagcaattctcctgcctcagcctcccgagtagcggggactgcaggcacccgccaccacatctgactgatttttgtattttttagtagagatggggtttcaccatattggccaggctggtcttgaactcctgaccttgtgatccacccgccttggcctcccaaagtgctgggattacaggcgtgggccactgtgcccgaccttaagtttatatgttagttttacagaaagtcttggggcatcagaaaatcaaagaatgtggaaaaatacaaaaatcacaaaaaaactgcaatatgcatgtgtatataacatataatttatactatacttggtggtaattatgaaaatattactaaattaatttttttttctggttatgacagcaaaatgtctttagtatttgtttttttgtttgtttgtttttgggggcatttaaattagaaatgaactcacatatctaacatgaatctttgtgcttaaaattctaacctggctctagtcttgcaagttttaaatcttttttatgcagttatggaaaaaatatgtttctgcttgaagcagttgtcaaacaakcttctttcatcaacrgtcagacacagggcagctgaatgaggctgtttagtctagagtgaatgctcatgagattacaaggtcactgaggaaatataattgtgtagttggttccagaatagttttttgtagtgaggacttaaattataacatcaatttaaaaatatataaaatgagatatattctaaaattaatctcagaaagaaagcactaagttaaaaaaagtaaattattacaataaaatgttttaatttatatttttacaggacccttaaaaaagcagattcartttattattggactttgtttacttctcccgtatcrtggtagaattcagtagatcccgtggatcttatttaaaattgtctccattgggaaatgaaacctcattgtatagctcaggttaactgagaaaacaatagattgttcagcagttccyttttttttttttttttttttttttttkgacggagtctcgctctgttgcccaggctggagtgcagtggcatgatcttggctcactgttcagcagttcttttacttttgttattcatttggttgtcrgttagcaaatagytatgaagtgcctactgtgtgccagttactgttctgggtgctgagaaaacagtagtgagccaaacagaggagtaaatgtctactatcatgaagcttaaattctcctgtaataaaaccaacaataacagtacattattgaatctgttaagatgctgttagatgtttctatgaaagatctaacatttgagatgaaacttaaaattcaactgtaataaaaccaacaataacagtacattattgaatatgttagatgctgttagatatttctaatattagaaacacctgttagatatagcagataaaccagggttttccagagaaagaatcaataggacatttagagatacataagaggatgttcatgtttggaattggctcacatgattatagaggctgagaagtcccatgatatgctatcagcaaccaggagaaccagggaagttcatagtataactcacgctgaatccaaaggcctgagaattaagggagccagtgatgtgactctcagtttgaggttgaagkcctgagaatggagacttagcgggggtggaggtgaaagtcatggagtatgaaggcccaagaaccttgagttatgatgtccaaggacagagtaaatgtcccagctccagaagaaagagtgaatttacacttccttcgtttttttgctgtgttcaggccctcagctggattggatgacatccatccacattggtgagggtgtatattttgtactaagacttttgattcaaatgccaatcttttctggaaacaccttcacagacgcacccagaaataatgttttaccagccatcaggagatcctttagcccagtcaagttgacacataaaattcyatatgataattagtactttgaagacaaataaaggataaaaggatggatagtgattggagtagtgtgctatttttggtgattgaaatcttttgtaagatggtattttagcaaatacctgaattagcaaagaaatgagtcatttgatatccttgggagagtcagcaggaactgtaaatgcaccagtgggaatatgaataaggaagaggaaggagtgcagaatgtctggagcaggagtaaatatagggaatggtaggagaataggttcagagaggtagcaggtttttatgtaagggggcaggctagacctagttgatgatacaggtctttatagaccatggtcaagacttgggtttttactttgaaggagatgcgaagtcataggakaattttgaacagaagttgccataatattactttcatctagaaaggtctgtcatcagagagtagatggtgggcaatggtggcaaggggcagcgtgaatgcaagaaaatttgcagtagtcctgctaagatggtagtggcttgtcccagcatggtagcagtatagttcataagaaagtggtcagattatggatataattttgatagcaggggcaaaataatttttgatggattsgttaaggggggtatgaaaaagagaagattacttccaargtttttatctgagcaaatggttgctcctagggttttatctgaacaacaaagctgcaagcaataaggggttgtgttgtttatagagattttttaaaataataaaactgaataaaagtctttttaaaatgaacatgtactgacagttctaaacaatgttggttttcaaatactygtttctgaaaaaatcttttgttggtccaagttctcaaaaatcactgtaattacttttaaatctaatagtatatatgtaagctattaacatctttatttctcgttctttaataacattttatgtatgcagaaattagttcagagaactttgagttttacartcatccccaagctccacctttccaccccccaaccccaatagccacaaacttagctatatttagcctcactcaagagtaaatttatatggttttggaatttttcaagctcctttctaacaaaatttctatttttaactcccctatggtactacatattgctgagttagtacatttgaagtaaacagtgttagctcagtgattataaagatgaagaaacagctggacacggtggttcacacctgtaatcccaacaccctcgaggcaggtggatcatgaggtccagagttcgagaccagcctggccaacatagtgaaacctcgtttctactaaaaatacaaaaattagccgggtgtggtggcacgcgcctgtagtcccagctactcaggaggctgaggcaggagaatcgcttgaacctgggaagcagaggttgcagtgagctgagaccatgccattgcactccagcctgtgtgacagagcaagactctgtctcaccaaaaaaaaaaaaaaaaaaagatgaagaaacagaacttaggttctgagaagttttatttgtgtttaaagttttcaattgtggggacatttgaaagttcctagaatcaggcctaagcgggcagatcacctgaggtcgggagttcaagaccagcctgaccagcatggaaaaaccctgtctctattaaaaaaatacaaaattagcagggcatggtggtgtatgcctgtaatcccagctactcacggggctgaggcaggagaattgcttgaacccaggaggcagaggttgcggtgagccaagattgtgccattgcactccagcctggacaacaagagcgaaactgtgtctcaaaaaaaaaaaaaaaaaaaaaaagttgctagaatcaattttaatgaaacaaagattgcaacagtattgcactttctagaattaattgtgaaataaaattttttatattctgccaaactcatccttatcactaagatatttcctagttatttgaatatctgtttcttcagataagaaacttttgtaattaaaattaacaaaaagtattctccaggtgactatgagcagagataaattgatgaatctaactataacatctattgaacataactatgtaaaaacaaccaattttaatgcactcattgacaaatctgcagaagtcaaagctcaaaacaaattataatgtgatagtccattttgtgcttataaattgtgccatttttaaaaaattaatagatattttagtttgttacttctttctttcatgatataaagattattttacatttaaatttttttattggaataattatgtgtacaaagtgctataaaaggaaagcctcactgtgtgctttttctggattgttatttttttctttattttttatttttattatactttaagttttacggtatatgtgtacaacgtgcaggtttgttacatatgtatacatgtgccatgttggtgtgctgcacccattaactcgtcatttaacattaggtatatcttctaatgctatccctcccccaaccccccgaccccacaacaggccccggtgtgtgatgttccccttcctgtgtccatgtgttctcattgttcaattcccacctatgagtgagaacatgcggtgtttggttttttgtccttgcgatagtttgctgagaatgatggtttccagcttcatccatgtccctataaaggacacgaactcatcactttttatggctgcatagtattccatggtgtatatgtgccacattttcttaatccagtctatcattgttggacatttggcttagttccaagtctttgctattgtgaatagtgccgcagtaaacatacatgagcatgtgtctttatagcagcatgatttataattctttgggtatatacccagtaatgggatggctgggtcaaatggtatttctagttctagatccctgaggaatcgccataccgacttccacaatggttgaactggtttacagtcccaccaacagtgtaaaagtgttcctatttctccatatcctctccagcacctgttgtttcctgactttttaatgattgccattctaactggtgtgagatggtatctcattgtggttttgatttgcatttctctgatggccagtgatgattagaattttttcatgtgtctgttggctgcataaatctcttcttttgagaagtgtgtgttcatatccttcacccactttttgatggggttttttgtttttttcttgtaaatttgtttgagttcattgtagattctggatattagccctttgtcagatgagtaggttgcaaaaattttctcccattctgtaggttgcctgttcactctgatggtggtttcttttgctgtgcagaaactctttagtttaattagatcccatttgtcaattttggcttttgttgccattttttttggtgttttaaacatgaagtccttgcccatgcctatgtcctgaatggtattgcctaggttttcttctagggtttttatggttttagatctaacatataagtctttaatccattttgaattactttttgtataaggtgtaaggaagggctccagtttcagctttctacatatggttagccagttttcccagcaccatttattaaatagggaatcctttccccattgcttgtttttctcaggtttgtcaaagatcagatagttgtagatatgtggcattatttctgagggctctgttctgttccattggtctatatgtctgttttggtaccagtaccatgctgttttggttactgtagccttgtaatatagtttgaagtcaggcagcgtgatgcctccagctttgttcttttggcttaggattgacttggcgatgcgggctcttttttggttccatatgaactttaaagtagttttttccaattctgtgaagaaagtcattggtagcttgatggggatggcattgaatctataaattaccttgggcagtatggccattttcacgatattgattcttcctacccatgagcatggaatgttcttccatttgtttgtatcctcttttatttcactgagcagtggtttgtacttctccttgaagaagtccttcacatcccttgtaagttggattcctaggtattttattctctttgaagcaattatgaatgggagttcactcatgatttggctctctgtttgtctgtgactggtgtataagaatgcttgtgatttttgtacactgattttttatcctgagagtttgctgaagttgcttatcagcttaaggaaattttgggccgagatgatggggttttctagatatacaatcatgtcatctgcaaacagggacaatttgacttcctcttttcctaattgaatgccttttatttccttctcctgcctgattgccctggccagaacttccaacactatgttgaataggagtggtgagagagggcatccctgtcttgtgccagttttcaaagggaatgcttccagtttttgtccattcagtatgatattggctgtgggtttgtcatagatagctcttattattttgagatatgtcccatcaatacctaatttattgagagtttttaagcatgaagcattgtcgaattttgtcaaaagccttttctgcatctgttgagataatcatgtttttttgtcgttggttctgttaatatgctggattatgattattgatttgtgtatgttgaaccagccttgcatcccagggatgaagtccacttgatcatggtggataagctttttgatgtgctgctggatttggtttgccagtattttattgaggatttttgcatcaatgttctcaaggatattggtctaaaattctcttttttggttgtgtctctgcccggctttggtaccaggatgatgctggcctcatacaatgcattagggaggattccctctttttctattgattggaatagtttcagaaggaatggtaccagctcctccttgtacctctggtaaaattcggctgtgaaaccatctggtcctggactttttttgattggtaaactcttaattattgtctctatttctgagcctgttattggtctattcagagattcawcttcttcctggtttagtcttgggagggtgtgtgtgtcgaggaatttatccatttcttctagattttctagtttatttgtgtagaggtgtttatagtattctctgatggtagtttgtatttctgtgggatcggtggtgatatcccctttgtcattttttattgcgtctatttgattcttctctcttttcttctttattagtcttgctagcagtctatcaattttgttgatcttttcaaaaaaccagctcctggattcattgatttttttaagggttttttgtgtctctatttccgtcagttctgctctgacttagttatgtcttgccttctgctagcttttgaatgtgtttgctcttgcttctctagttcttttaattctgttgttagggtgtcaattttagatctttcctgctttctcttgtgggcacttagtgctataaagttccctctacacactgctttgaatgtgtcccagagattctggtatgttgtgtctttgttctcgttggtttcaaagaacatctttatttctgccttcatttcgttgtgtacccagtagttcaggagcaggttgttcagtttccatgtagttgagtggttttgagtgagtttcttaatcctgagttctagtttgactgcactgtggtctgagagacagtttgttataatttttgttcttttacatttgctgaggagtgttttacttccaactatgtggtcagttttggaataggtgtggtgtggtgctgaaaagaatgtatattctggtgatttggggtggagagttctgtagatgtctattaggtccgcttggtgcagagctgagttcaattcctggagatccttgttaactttctgtctcgttgatctgtctaatgttgacagtggggtgttaaagtctcccattattattgtgtgggagtctaagtctctttctaggtctctaaggacttgctttatgaatctgggtgctcctgtattgggtgcatatatatttaggatagttagctcttcttgttgaattgatccctttaccattatgtaatggccttctttgtctctcttgatctttgttggtttaaagtctgttttatcagagactaggattgcaacccctgcctttttttgttttccgtttgcttggtagatcttcctccatccctttattttgagcctatgtgtgtctgtgcacatgagatgggtttcctgaatacagcacactgatgggtcttgactctttatccagtttgccagtctgtgtcttttaattggagcatttagcccatttacatttaaggttaatattgttatgtgtgaatttgatcctgtcattatgatgttagctggttattttgctcgttagttgatgcagtttcttcctagccttgatagtctttacaaattggcatgtttttgcagtggctggcaccggttgttcctttccatgtttagtgcttccttcaggagcttttgtagggcaggcctggtggtgacaaaatctctcagcatttgcttgtctataaaggattttatttctccttcacttatgaagcttagtttggctggatattaaattctgggttgaaaattcttttctttaagaatgttgaatattggcccccactgtcttctggcttgtagagtttctgccaagagatcagctgttagttagtctgatgggcttccctttttgggtaacctgacctttctctctggctgcccttaacactttttccttcatttcaactttggtgaatctgacagttatgtgtcttggagttgctcttctcgaggagtatcttagtggcgttctctgtatttcctgaatttgaatgttggcctgccttgctagattggggaagttctcctggataatatcctgcagagtgttttccagcttggttccattctccccgtcactttcaggtacaccaattagatgtacatttggtcttttcacatagtcacatatttcttggaggctttgtttgtttctttttattcttttttctctaaacttctcttcacgcttcatttcattcatttcatcttccaccgctgataccctttcttccagttgatcgcatcagttactgaggcttgtgcattcatcacgtagttcttttgccttggttttcagctccattagttcctttaaggacttctctgcattggttattctagttgtccattcgtctaatttttttttcaaagtttttaacttctttgcaattggtttgaacttcctcctttagctcggagtagtttgatcttctgaagtcttcctctctcaactcgtcaaagtcatgctccatccagctttgttccgttgctggtgaggagctgcattcctttggaggaggagaggcgctctgatttttagagtttccagtttttctgctctgtgttttccccatctttttggttttatctaccttgggtctttgatgatggtggcgtccagatgggtttttggtgtggatggcctttctgttttttagttttccttctaacagtcaggaccctcagctgcaggtctgttggagtttactggaggtccactccagacccggtttgcctgggtatcagcaggggaggctgcagaacagtggatattggtgaaccgcaaatgctgctgcctgatcattcctctggaagttttgtctcagaggagtacccagccgtgtgaggtgtcagtctgcccctactggggggtacctcctagttaggctactctggggtcagggaccctcttgaggaggcagtctgtcggtgttcagatctccagctgcgtgctggaagaaccactactctcttcaaagctgtcagacagggacatttaagactgcagaggytattgctcttttgtttgtctgtgccctgcccccagaggtagagcctacagaggcagtctggcctccttgagctgtggtgggctccacgcagttcgagcttcctggctgctttgtttacctactcaagcctgagcaatggcaggtgcccctcccccagcctcgctgccgccttgcagtttgatctcagactgctgtgctagcaatgagctaggctctgtgggcgtaggaccctccgagccaggtgcgggatataatctcctggtgtgccgtttgttaagcctgttggaagagcgcagtattagggtgggagtgacccaattttccaggtgccgtctgtcacccctttctttgactaggaaagggaattccctgaccccttgcgcttcccgggtgaggcgatgccttgccctgcttcggctcaagcacggtgtactgcacccactgtcctgcacccactgtccggcacttccctgtgagatgaacccggtagctcagttggaaatgcagaaatcacctgtcttctgcattgctcacgctgggagctgtagactggagctgttcctattcggccatcttggctccccagctttgaatggtgtgtctggattgttatttttaatttcatggttattacagaaaataatttagttgtgtagaggcacagatatggtaaaaaaaaaaaatctgttctggctgtctaatatgctatgtatgcagctgcctaatagagtccactctggggatggacttctgtgttgtaggtagcttctgtgttgaccaaattatcttaatttagtcataaaaaattctacatcctatttggttacattattttaagtaggctatagagccttagggagatttaaaaaagatatccacaaacttaagtagtggtcaagataggtcctatatagaaggttaaaagaagtgcgattattgaagctagaatcaaatggctatactttgggagagcagagtgaacatgggtagcaaatcaaattttagtttatgagggatttttgaagggaataatgtttttggaaggaaaattaccaataagatggcaaaatgtggactagatgaccagccagcgttggctgattattctgaaatatttcaaggtgagagaagatgctgattgattctatgtaggtttgttttttatttgaccgagagcaaggtgctatttcaggtaatttttaatgcagattgctgttcctggattctgcttgtctcagtgtaactttttttactctgcccagcttctaaatcttagctttttgttctactatttacctctgtatttctaaataacatcatcatactgcagttccttggtttccaattttatagctgtctcttgacttcctagtatgagaaatgaagatttagccatctaaaacctcttctctacccttatttcacttgccctattatctcttaatgcaattatattacgttttgaaaattgagtcatcttccctatattcatggtgaatatgaaaatcttattttcagctgagccacatattttaaacttattgtgtttcttagatttcccataatgattgccatgtttttggtgtctcttcacatttttcctttggctttaatcagcaccttgttcacctcatcaaaccctaaaatctaccctatctagggctacggaatatgaaaagaaaatagaatctcaccatttgttgcctcttgctttgtttcagcctccttacccaatgtaggtgttacttcctggyagttttattaatagcttagtctctcctgtccttgtgtttgaaggcatgcagtgtagctgctttgctaatttgtgatgggtttagcatcagattttttggaattggtacttttaaaatgttttaaaaatatcctgccaaagaatggttagctgtctttagatttaagtgaaattcagtcaactttcatatctcatgccttgaattttacctcaaacttaacttaaaaagaaagtaaaggagtcagaagcaatagtattcttactgtcctgtttactgcattcatcggttcccagctctgcataccagagcgggagaggagttgcaagacacatttggacagctctcatctccctacaactgagtcaacagcaggagggtatttcttggagcrctgtggtaacttttccatgaagcaggtcttcttccttaggaaggcttagttgttgcctttatcccctcatttgttacagttaacatctatagcctgatgttggctctatcacttccatctgttttatgagcttgctactgttgttgctttgaaaggtggttttgtttatttgttacaaataatttatccattatcatcttaaccctcaactttaacatttaaaaatgacatattgaagagctgtattatcagtgttttttagactgtaggttatatacatttttaaaaatagaataaaataaaaagtaaactcaccaagggcattatataaatgtaagcattgggccaggtgctatggctcacgcctgcaatcccagcactttgggaggccaaggcacaaggatcgcttgagcccaggagtttaagaccagtctgggcaacataacaagatctcgtctttacaaaaaatgtaaaaattagccagggatggtggcatgcatctgtgttcccagctacccaggaggctgaggtgggaggatcacttgagcctaggaattcgaggctgcagtgagccaagatcacaccactgcactccagcctgggtaacagagtgagaccctgcctctaaaaatttaaaaaaggccaggtgcagtggcttatgcctgtaatcctagcactttgggaggcggaggcaggcgaactgcctgaactcaggagttccagatcagactgggcaacgtggtgaaactgtgtctttactaaaatataaaaaaattagccaggtgcggttgtgcatgccagtagtcccaactagtcaggaggctgaggcacgagaattgcttggacctgggaggcgggggttgcagtgagctgaaatcctgccactgcattccagcctgtgtgacagagcaagactctgtctccaaaaaatttaaaaaaattaaaaaacaaaaataaaaacaaaaaataacctgtaagcattggcttttaaaacttttgtaaaacccacttgtagtgggtttttatgtaaagtatactgttaattatggtaagaaaagtttgagaaatgctgccctaaacacatagaagaagtcaccgctcaaattgtttctaaagtttagggaacatacttttaaggtctaagggaaattatgtatgagcagaggttggcgtagcctcaggcaaatggagaggtcctctaacttctttcttagggtaggtacagtattgtaatgcttcatggaattttcagtttctaaccctcattttaccaggaaaaatagtcattcctatttattatctaggtccaatgaacccctttattaaataattttacattgtttttatgaataagcagtgtataaaacaattttattagaaaatttaacagatttaaatatagcgcaatcaaatttttattccatatattcttggtttagatggtgtctgtactcaaaattggcagtgcccttcgaatgcaactaaccactcatcagtggtcacacatgaacatgggacatatgcaacttgtatgtgttgaatccatatttcaaatacatctctaatagatttgagttttgtgttttttttgtttcttttttgtttttttttttatggagtctcacttttttgcccaggctggagtggagtggcgtgatctcggctcactgcaacctccacctcccgggttcaagtgattcttctgcctcagccttccaagtagctgggattacaggtgtgtgccaccacacccggctaactttttgtatttttaatagagacggacggagtttcaccatgttggccaggctggtcttgaactcctgacctcaagtaatctacccgctttggcctcccaaagtgctgggattataggcgtgagacaccgtgtctggctgagcttgttacttcttctggttccacttgcatttgtatcatcaaaattcaatttggattcaggctttcaaatacatcagcaggtttaagcttatcattatctcttactctttttgtctttgcttgatcaaaatttaaaacctttgaaaactttgatggcttgtaatttggttgaaaagaggaccaccatcttttttattccataattgcaaaagattctcacttttagatttgtgaacaccagttagaaggatcaatccaattaattgttctttttttttttttttttttttttttttttgagatggagtctcggtctgtcgcccaggctggagtgcagtggtgcgatcttggctcactgcaagctctgcctcccgggttcacgccattctcctgcctcagcctcctgagtagctgggactacaggcgcccgcaaccataccgggctaattttttgtatttttagtagagacggggtttcaccgttttagccaggttggtctcgatctcctgacctcgtgatccacccacctcggcctcccaaagtggtgggattagagtcatgagccacagtgcccggccaattgttcatttttacatgattttctcccttccaaatacctttatgtggacacttgccaatatcatttatacacttaaaaaatgtatcaactaaattatggtgcacaaacatcataaaagatgaaaggatgttgacacacgtacttttagcaaaatggatggtcaaggttcttgttccaaattattgtggaatgaaatctatcttgtttaatgactatccagatgagaatatatatatatatatatatatatttgtccttaaaaatacatacttgagtgactgcaaatgggcatgagggatctgctttgaagtgatgaaaatgttctgaaattgggttgtggtgatgattgcttaatgatgtaaatttactaaaaatcattgaattgtgcacaatatattggtaactcatagatttttgagtttgggaagttttttgttttgttgtttagttacatgttaggtgaaactaaccaagtgaaggggcaagagaaggcagagagatggtgctatacacagctgatatagggttggaggctgaatgctacacaccgagagagacagacacacagacagtctgctcagcatgtcagccaggcagcattctgggacttggacagttggttggtgtgccagagccggcaagaggtctggctcagagctggagaggaccaggaaccctggaggctccctggtccaacgtcctggttggcatctgcagcagcacctgggctcagctcagatcactcagggtcttgtgggcaaatttgggtggcagaaaggctgcctcgtgcacatctgatttatagtatttcagttatgtatgttccaccagcttctgtgtcagctgtcgcacggactcccagaacttggtgcttgggttttgctgcacatcatgaagctaatctggccactgcggtaggtggggatggtgcagtaggtgcagcccaccatgggaaagagtggcatgcagaattgctgcgtctttttggtgaggtccaggtacagccactggcagtcacctgggcagcagagaatgccatgcttctttagggctgccctcctgaggactgtcttcatgaactggtagtaggattccttgaagaggtttttagcaaggcagtggggtctgaggagtcattgataacactgaaggcatcctaattctgtttcatgaattcaaacccatcacccatgtgtaagttcagctttgagcaaaagtagccaacagctttgcctggcaggaacttctgagagacttggatgacatccttatcattctcacattggaccatagacttcacagaggggtactacctcaccttgcacaggatgcccttgttcctgtcctcaataatcaccgccatttgtaggttggggtggctgcagagaggcaggttgactataatctcctggtaggagaacttgttcctctctgtatactggatgatgccatccaacgccatcatgttgccataggtcttactgcagatgacaaaggtatyctagtactgtgagcactggtcgggggcagctgctccacctgcagtgacaaggcatgggtgggccacagactgcatgtcttgcagaatcagtcctataaatggcagtggggccagaggctgggggcggccattggggctgggcttcatggcaggtgatccacagcactgtgggaccagcagagcccaagcccaccaatagagtttggggagattaaaaaaaaaactttgaaaagattaatctaggctatcattatctgagattttacttacatgattatttttatcatcacaattagtgtctagagggctactttctgcatctttacactcttatgatccaccttatattcacctaataataatgaaatgtctttgtcttttttttcctttccattatggattgaaaacagaaaaatcttgattttttttgggacagtctcgctccgtcgcccaggctggagtgcagtggcgcgatttcgtctcactgcaacctctgcctcctgggtgcaagcaattctcctgcctcagcctcctgagtagctgggattacaggtgcccacctgtaatcattacaggcccaccactgtgcccagttaatttttttgtatttttagtagagacagggtttcaccatgttggccaggttggtctcgaactcctgacctcaagtgatccacctgcctcagcctcccaaagtgctggaattacaggcattgagccacgacgcctcgccttatattctcttaagaactactttcaagtagagatgactttattttcattaagtttgtagaaattgtatttctatttagagagactaatttttgtttttaaaaggaaaaacaatcaggagattgagttgttaggaaattattagacatgtatagcttggtgactctttcaacctttcaaatgtaaaacatgttggcttttgggttaaagtactctggtaatttatcgttatcatgttctatgattgtaacctaagtctctcttcttcttctgtctccttattaactgagatataattcatgcttttaatttctctaagtccttctaccatgaattttctagctaaattaaacgtaggaaacaatacaataaggaaaacataaacctaagaaatattagatgttacataaactgttggagattgtcattcactcctattttcagaaatagagattatgataatttaaatttgaaggagaattcatacaatataatgtattaagacatgttagcgttttctcttgaggtctctcccagttatcttggagtcacatgtatctgttaaaataaataaattcattgggtattccccattgtaaaagtaatatatgttcattatagaaaaattttgaaaatataagcaaacagaagaaaaattaccatgtttctactgttgagttattgatttttataatatagaaaatcataagccataagtggtctctgttcttaggaaatataaacccatcacccctatgctttttttcttggcactttattaaatgtcacctctcttcctcctgctttggagtggcactgtcttaagttaggaagccactgttactactccccaaacagttcagcagatgaaaactagatagttggttctgttggtacaaaataaaaatatatttaaactttgtttctaataatattaaattattttaacacgatcagaatgcccaaagtagtcattattctgacgtgaaggtaatgttgccatggttttttgtttctctttataactggttttaaatgtaaaaacataaatcctaaagaacaggaatggaaaatggggatggttttcatttgctacaatttcctgtgagacatggctctaaacaagacccatatttacacaactcaatatagttttacatacagtgttgtattcagcacattttaaaattctttaatttcacttttcagtcattggtttaatactttcatagtaaatttgtttaataacactaggtgaagtttgaaataatttttgaataattttacagtagaaacaccagttaaatcacccttttggtaataaatgtcggaaaaaaagtaattatttttgctgccactgcaaaatcaattgtgtaactgttctttttaaactgacttttacattactaaattttaaacactcctgtaacttgtcagaagcaggttttggttaatagatattttcagtgatgtaatgggaacttttggcagtgagtcagaatataatggactatgattaatgttttaataagtagttttctattgctcatgatgtaaaggagaaatggtttcctgcttggatggataggagaatagcaggtgtgcatatagtgtttttaaaaaagaattgggatacttttcttagagtaacattaacatttttattcggttaaaatttattatagagatgcatatgttaccacagaaatctgaaattgatttggaacaataaaattaggagatgattaccaatgttgtagttaaatcttttattttttggccttttgttttctttgaagctttaacttgaggtctctgtagattgatcttggttcttactataagctgtaaggaaatcagggatctctacagggtttgatgtttctgaaataaatttcttaaaacttctaggggagggagaggggacaaaaagaaaaaaaaaactttcaagtttttctcttaaggctaggaaatacagattgttagtcaaatggaatagtgatcaagtaagatttctccattgccaaggccacaagttcaacgtataaactcagtagttcagaaatttggaaagttaaacccaggagattttgtgtcagtcttggaatctgagaaagtttataaagacaaactggaagaaatattagtataccagacttgaaggtttgattcacagtttgctttcatttttttgtgatttaattttggcaacttatatgcagtaagtatctgttattttgttgtaggtgaagagtcctagggctcagtagatacattctacttgggaatggtactttactaccatagatactttctttcccatatttgtgaataaaattgagcatttgttcaaatgtacactttcctggaataaagtttatggtttttattcctgtctcaaagggatcctgattcccaatagaggacctagagtagtggtctcaaaccatatatcagaatcacctagagggttttctaaaacaaagattgctgggccccaccttcagagtttgtgattcagtagggctagagtgagaccccagaatttcatttccaacaagttcctaagtaatgctgatgctgatggttaaggactatactttgagaaccactagcttaatcttcgttaatagccttctagaccttttttgttatattgcatatttttgttattatacatatttaacaaaaatgcttctgttacatttgctacctgtcttaacctactatatcttatctttacattttatactttacattaatactttaaatgatacatgtttatccattgcatcatttacagtatttcataacataatttatttaaccagtcttcaattagacatttaggtcagttttcatttgttgtttttataaatagaatcttgctaaatttttatgtgatcttctaattatttcattagcaaaaaatccctggattaacggatggacatggcatggcacggtggctcacgcctgtaatcccagtactttgagaggctgaggcaggcggattacttgaggccaggagtttgagaccagcttgggcaatatggtggaaccttgtttccacaaaaaataaaaaaaattagccaggtgtggtggtgtgcatctgtaatcccagctactctgcaggctgagaacccaggactgcactccaacctggatgacagagcgagactgtcttaaaacaaaacaaaacaagataaaaacagtagatatatttataaggcccatttgaggtgtaagtgacttaacatccctggcacttgaacactaatgaatattatgactgccactttaaaggaggcagaagaagtttaaaaagtaaaacaaaaagtttgtttcagaaaacaagcattttacctctgtttcaaatagtctaatttttttagtgatgaaaacttctgagaccagtagatgtttgtaaataaaaaacatttatggcagtctttgtaactgtaatgaaactggtagagagtaataatagcctgttttttgtttgtttgtttgctttgggggatatttgcaatacagtttattgatatgtcacatacatgtaaagtttataattcaccccagaatttatattactaagtttgtgctagtattaaagagcttttcaaattcagtgcctgtttaaaaaaaaaaaaaaaaaactgtactccatgccttgaaaatagcaaaactgtgatatagattaaggtggggaagcatttttttttctatttagagctataataagaaaaaataaattgagacagtggtttttaatttgaaaaagagaaatgaaatatttattcatctacttttaaaatgragaaacaataatatgtatgtgaaatctttcttctgtactgtaaaactagctacacaaataacatcaccctcccttgactctcaaaataaaatactaaacccatacagagaaaactactctgaaagacagctccacagatgaggtcactgaaaggtgtccaacattggggatgttgggtaaagcaaggcagggaatgggtgagtgagggcaaaagctgacaacttggaaacatattaaaagtaggtactagatcaaattcagtctgtcctgttgcattgcctatttctagaacgcatatttataacatgaattagctcacacatgaatggtaaatagtggaatgatatctgtataatgtagattccatattgtagaagctattttgtttgcacatgatttttcccagtaagtaaatrtgttacattgttaattaataatagcagctgaactcagatacagttggctgtccattcatgggtccacatccatagattcaactaacggcaaattgaaagtatttggggagaaaaacaatagttgggcctacattgaatgtgtacagacttttttcttgtcattattccctaaacaatacacgacaacacctatttacatagcatttataatacgttgtattaggtattataactaaccaagtatatgctccctggtgtccaggggggtgaaaaataaattaaataaataaagtatatgagaagatatgcacaggttatatggaaatacagtgccattttatataagggacttaagcatctgcagattttggtatcctgggggtggggttctggaagcaatcccccacagatgctaagggatgactgtatatggaaacaaaaacacaatgggatgcatgaagccacagaggagtaaagagagtgctgtacaggatgtctagttataccatgttcttccttttggcttagttttgccatgcatcctgtcttggaagtgctacttgtggaattcttcccaagttttgctcattttgcttgtttttataacttagcaaccttatcccttccttacacttccttccatcaggttacattcacttttttcttacgtttcttataaaacctatatttactgtatcatctgtttatttggaacttaaccaagctttaaaaaatcaactgtgttaatactttttggaggaataattaatgtttttgttgggtccctggttatgttatctttcatgtctggcttctttcatgtttttgagatttatattgtagattttgtgtggactgtccccgatttcacttctaacttttaagttcacatttggcagaatataagatctttcaagaaaaattatgttatcacagaaatgccagagtaatgttatagaactctggatcatagagtaggtcagtcagaagcactttagcacatagaattgctcagtgtaagaggagatcttttgatggaaattcagtcatgattgtggactttcatcacaatactgttcatttggccctactctctggttagaaatccctagtagttaaaaggtcttctccagttatgaggtaaactcattacctcagaaatcacccttattctacccacaaagagttgttgaaagagatatgaaaaaaacaaaatgcgcttcctactctcacacaccacagtcaatacttctgacgacaggtgttgtggggttttccccccacacaccaaccaaagcagttctccagtccagtagacaccaactgggcgtcctctaattcagttctgttctgacactgtctatctgaagatagtatcatataccacaggttaagggctcagtcccataagactgccctccacttcagatgccagtcaccagtagtaggttcttacctatacttccgaccaaaccagatataaattgggggttcccacaaaccattcgtcagttttgattaatttgctagggcggctcacagaactcaaggaaacactttacttatgtttatccaactattataagggatattacagaggatatacgtgaacagccagatggaagaggtgcatagttggggagcacagagcttccatgccctctgacatgccacgcacccgccacggatctccacaagttcagctgtgcagaagctcatcccaactctgtcattttggatttttatgaaggcttaattatgtaggctctgttgattatatcattggccattggtgattaactcaaccttcagcctcctcccttccctagaggtcagagggtgaggctagaagttccagcctgctaactgcatggttggttccccttgtgaaccaaccccatcctgaggccattcaggaacccataagatttgcttccttcaaacaaaagatgctcctattacccaggaaattctaaggcatttaggagctctgtgtcaagaaatggagtcaaagaccaaatattagaacaaaagattctccttgccaccctatctataagtttattagccctgtgccagggactgtgggcaaagaccaatatgtatggttcttattatttcaaagttaatttacatgttcaaaaggaaaactatatcttctgacttgatgtgggccttcttgagatacatctcctttatcagaggtcatcctttgggacctattgcttatttggccctgtaaaaggcactcagcctgggatactgtttgaggtttagactcaagacaaagggtagacatgcagagtctatgatgctctacccaatttcgttaattttagtgtgctactaccaaagacttaaagctacttttaaaaactttattgaagtaaaatttacataccacaaaggtaacgcattttaaatatatgattcagtgatttttggtaaatttaccaagttgtacaaccatcactacaatcagggccaacttcatgtatgtgtaaccagtacagtctcacagggccccatgcccagaaaggagccctgaattcacaagggtgccctgtacttggagtttaatactctgtggttgtcatcttgaattcttaataattttatgtttagatttatcgttttgtaagtaaagtctgatgggacaattgaacatgctctaggggctttgaaccacgtattcttcccaccttgagacatgttttcgaccaccttctttctgtttctgctcattgttgctgcctctacccacggtgaggctgtggacacagggaaggtcaggactggatgtatgtgccttgtgtgcctctgagggtctgcatttacccaatgagtatctcatgactgagggatacagcattaaatagcaaataaagtaccataacaggtcaagagagagaccctagaagaaaggaaaaaaatgttttcctgctttttaaacaaagtgcctgcattttattttgtaccaaacctgactacagtccagttttagaaccttcgacaaccccaaaagatccatcatgttagtttatagttagccccctttcccatcaccagacttgggcaaccacttagctcttttttgtctccacagacttgcctattctagacatgtgatacaaatggaatcataagtatgtggtttttgtgtctggtttctttcatgtttctgaggttcatattgtagtatatatatccatgtttcatttctttttattgctgaataatactccattgaatggatatactacacgttatctatttgcttatccattcatcagttgatggactttttgattattgccactttttggacaccattaataatgctgctataaatattcatactgtttgcatgtatgttttcatatatcttggatatatacttaggaatgaatgctggatcatgtaacaaatttgtatttaacttttcagaarctgccaaactgttttataaagtggctgtacattttacattcctactggcatgagggtttccattttccacatcctcagcaatgtttattattgtcattttgattataaccattgttgcgagtaaaaattggtatctcattaatttgtctttccctcatggttaatgatattgagcttctttttatgtgtttattacccatccatatatcttctttggtatgatgtctgttcagatcttttactcattttaaagttgggtcatttgttttattataaagttacaaaaagttattttttgattatgtgattttttaaataaaaaaattaatagttaaaaaaagaatgtcattttacaaagcacttgccatatatatatatcttataattctttatatattctggatatcagcattttattaaatataatctgtggctgggcacagtggctcatgcctgtaatcccagcattttgggaggcctaggtgggcagattacagattacgaggtcaggagatcaagaccatcctggctaacacggtgaaagctcgtctctactaaaaatacaaaaaattagccagtgtggtcgcatgtgcctgtagtcccagctactcagaaggctgaggcaggagaatcacttgaacctgggaggcagaggttgcagtgagkcgagatcatgccactgcactccagcctgggtgacagagtgagactccatctcccaaaaaaaaaaaaaawatatatatatatatatatatatatatgtatatttatattttgtaaatatgttttcctagagtgtggtttgttattttattttttaatgatgtttcttgaagtataacacattgaattttgatgaaattcagcttaccaattttttcttttatggatcatgcttttggtgttgtatctaagacacttttgcctaaccaaaggccaagaagatttcctcktatgttttcctgtaaaagttttgtaatattacctcttacatttgggcctcagatccatgttaaattaatttttgtatgtggtgtgggctaaaggtccaagttcatcatttttgcacagagatacccaatggtcccagtaccatttgttgaaaagaatattctttcctcactgaactccctttaaaaccatgtgttttgcctattatccccagtaattcctagtataagcaaagctttttgattatcgagtcctgaacgttttcttgacctggggaatattgccttttcttttcctgaattacacatttagctgtgagcctatctgtaataataatagtgagcattagacagaagtgtttgttaactctgaggaatttctaattttaaataagaaaattatgaggaaacattttatatctttcctgtcaatttataattaaattttgaaataagtatttattattactgttttacatctagaagggtctctgattcccaagccatgaaacattctgacaggaaccaccctctttcaacctaaaacaaacaaacacctaaccttctaatgccaaaaggtcttaattttatttcactctttaaactcaaattgtttgcattcagaggtcagaaaaatataacatgctttggtaaagtaaaactggcttccttaattacttttccaggtcaaaaagtagaggtcattgaggcagtgtttagttttagttgtgttacaaacactatcatcagtcaattccagagtatttgcttaagaggatatcctccttcgagatctttattactaaagattcttcttccgtctttattawtattattattattattattattattattattattattatttgagtctatttccttctctagataagcttttctaagtctgggaacatctcttgttcatttttgtttctccatctcactatactctaccctgtcccctcatacctcatcccacaatgccttgatggcacagatgttctgaaatgacttcttaaactgaagagaatttaagagatataatggagagaagtatgatattgccaagtgccaagattctccttccttctgaagtatattaaatgtaattgtgctgggtggaagaattatgaagaccaattagccataattcctctttcaaaagctgacagtctggaaaagggagattgtcatataaacaagacataagaagagagggtcaaggaacatttcatagagatatggacattcaacttcattttaaaggataagtaagagtctcctagtagcatgaacagaacattccgtcagaacagaaggattcagagatttgacagaacagggtgccttgagggaaatgtaagtagttcagtctgactggagcacagggtttgtaacataaagtgacaagaaactagttaggatcaaatcatgaagaatcttatttatcatattaagtattttgagtaatactcctttccccctttttgttcctgtgtgtcttaaatcaaggttgaaaaccactgctatctcagtaactaggctctgaaccatacactcttagtaataggtagctatggaagacgtttaaataattgagatattcagatttatattttagaaaaaatacttctgaaggcagcagtatggatcatgtatttgagaagcctgaagtaaaataaagtgccaaaataagagagttgtaagcagtgaggatggagttgagggaatggatttgagactgaagggatagaattgaaaggacttggccactgacttcaggtgcagggtaaggaatgagtctaggaaaattccaaggtttttggcttgagtgtctggatggctctgtgatgactttcatagggttcaggcttccttcagagttttgcacagcctatagaatatgccacttagacacaagtctttgtgtgagagctgcagcagggatctgaatgattaaggcagctgctcaggcttgctttctcactactcacttttgttgcctgtgtcagggaaaggccagggagagaaataattggggacagggactgcatttattctgctgccagagagtatgtgcagctgccgcttccttctgattcaccactaccacttgccacagcagctgggctggaccaaaataggtagactgtaaaagattctgtgataacaaagcccattgcagcactgggtgtaacttgaaatgttttttattcatatttctctaacttttttcttatttcaaaaatatgtctgtagatacatatcgtagacctgaattgtatatttaatatgtaagacccttaatatttttgatttagtcagtgtgggagaatagtactacttactttaatgcatatatatatatgtgtgtatatatatggtgtgtgtgtatatatctataacctttgacactctgaaaagagctgcttaattgtcaaggtagaagattttaaaaacatcctcaaagtttttttttaaaaaaacaatggtgaattagttatatactcccttagatactgagcctactttttaaattttttaattcagtcattttgagaattaagtgtgttatttgtccattgaattaagtttgtgtgtaaatatttgccatttctagaatattcatacttcttactcttactaattttttctgataaaaacttcatattataaggatgttagttttaatcaattttatattatcaagttttctagtatatgtctttaatttttgcttgtacaaacctatatattaggttacattagagttctgttatcttttttcttatgtaagtttagtctaaaataagactgacatactagtttttaattcgctcatatttcttaaatttttgtttcatttgtagtataaaatcacttttttagagaataatatttagtttttcttctatccttgtaaaactacagcagccttaaattatgctataggtgttcattgttggttcatcataaaataattaacacttgcattccagaactgtaattccacttagtacagcatttcatttcatttttttaaaagaggtttccatttttagaaaatttggaggttttttccctcctttaaagacatggttaaataatgattaatatagttcaagaaactatcttacgtggagtgtgcaggtatttcagctctgtttttttcttttctttattctttaaatgttagatagattttagtttaccactttagaaaactatttttaactgtttttatatatttatatatctcatactgaatgccaggtaagaattttattctgcactactgacattaattcccaatagttaaacataatagatgaccatacagttgttatctatttcttatcctgtgctctaggatttatcatttttaaagctatgtgttagagatcatacttatttctgaatagctaaatatcagtgtttttgcatcataatttggtgtatactgtgttacattttcagaaaatttgatttgataaatataaccataatcttaaaaacaaaactttgaagatatatgaatcactttgtaaataataataatatgcagtacagtgtaggagttgagagaatttttggaattatattgcctgagttcaaatcttggctgttttgcttggtttataaccctaggcaggtaacctacctaacattctgtgtctttgtttcctcctttatgaaatggagatatctaatggggttgttttgagtactaaatgaggtaatatatggaagagcctagaatactgactggtagaatattgaagtataatatagaaagtccggtcccttagaatctatttgtattatactgattttaggtctattgagattttctacctttcctttctctcctttttttcttcttctaatttgatcaattaggcatatcgacacaatgataaattgttgtattgccgttcttccgtataattttggcatttagttcagtgtagcatttatttcctaattattgaaataaaaattcagtttatctttaaggaagactacttggttttctgatgttttgaagcaaacaaagtagcgggtaagatgttttgtcccagtgattttatttgtgctcttaacaccaagggaaagtcacaggttaaattcttaaaaagaatttaaggaaaaatgtaaagaaaataagggagtacatgattgacaaattatcccatttatttatttaataagaattttagtttttaagaaaatgagatgtccttcctttgttatttaagtaaaaagcataatcacatctaaaacatggatctagacaatcccatagctattgacagtctgaagtcctacccataattgtttgttttccttgtttatctccctgctctaattccgtactatggtattcctttgagaggctctgtcccaccctttgttaccttgtatatagaattttttcacttaaatgaattccccagaaaatctacgcacattgtctggaagatttaagggttaccaggagggatcatattacctatgttaacctaaaaaaagacactagagaaaattatctctaaatatgtttagttttcttgggaatgagaaataaggattataaagtggaatggatgaaagggcaagctacaagtgcattcagtgagggaagagtaaagggaagcttttattagccaaaaggtagagatgtacataagctgcttagaaagagagtttattggtttcagaagttcaaagtccaagttgttgacaattcattcgtagagatgctgttactgggcaagtgttcttccaagagcaacttatctgagttactgccgtcctaaagaatatacagtgataaaccttgtcaaaggcaggagatgcatatttcttacagggattttaggacatcactggaaacagacatgtaagcatgagcctcctttccttggtgccttcctggccctattttgtctgggtctgaaaattgatttcatcctggtatctgcacctttacacccaactgtaaactatgaccatgatatggtttggctgtgtccgcacccaaatcttatctcgaatttccatgtgtcgtgggagggacccagtaggaggtaattgaatcaagggggcgggtcttttccatgctgttctcctgagagtgaataagtctcacgagatctgatggttttaaaaaagggagttttcctgcacaagctgtcttctcttgtctgccgccatgtgagacatgtctttcacctcctaccatgattgtgaggcctccccagccatgtagaactataagtgcaattaaacttctttcttttctaaattgcccagtcttgggtgtgtctttatcagcagcaagaaaatggactaatacagaccatatgtcacattgctcatttcatctcttctgtctttttccttcctctctttctggaacataaagaaattacttcccttgcctgtggaaggcaatttctcccacatttaaatgctcttgggaggggcagaatgcctcactttccctagtttatcaagggtttccttctaaacaaagtgtgtaaacaaatatagaggtgctttccctaaattaaggaattctagtgaagtagattttctgtaccttagtacctttgtatttgtggttgtttattattcattttccatttaacatttcacaagtagcctaacttctttaattttagagaggctttaaatgaagaattttaaatgaacctaagagattatctaggtaaatgtgttttccttttccctaagtttttgttgatgctgtcagttagtttcactatatgtagtcaaaaaactcttgaagaggaccatttgtgttacgtagataggggccatatttcagacaattgtcaccttccccacctctctccccctctcttttttttctttcttcctccctccctcatctacctacctagcccccatccctccctccctccctccttcctttcttctttctctctttcttagcattatagttgatattgaaatactttatataaagtgcaagaatgtacttagatgtgacattgataaaaagttgcattttgattcttactgttgcttattcattttccattagttgaaggaactagaaattacttccagatgtgttgctttattccttgtcttcaagaagtagtatcttctcttatttttagtattttaaattcatttaacaaatactgtgagtgtgttatgggcacacaatgtgtttggacattgtgaaaaattcaaaaatatattatggcttctgctcacagaatgacaagtgatggagaaatgccaggaataagagtatgatgcagggtaggaggagaaatcagaaagcaatagattctatatacatagatttgggccctcacagatgctgcttttttcaaacatatagttgaagatgcagtattggatttgaaattccctgtagataaggamattgaacatcaagctgttgccgaattttgctccttagttcagctaaaaccgggctcttgtcacgcaaccagggaaatttaggcatgcagacacattgaaaggtgagtagaacaggatattattaggctaaaagggaaaaaaagaaacaaaaaacccagcacagtgagatggactcctgctaacaggcccccaacctcacaggttgaatcccaggccaccacacaggaactgaggaggccaggatcctccttgctactggtggctccaccccgttcccccagtgcgcatgtgggcatgctcagacaaggtcatgggcaggttccctcatctgcacgaaagcatctgatgtaaacacttgtggggctgttcagagattctccggagaccccttttttgtgtgtgtgcattttttttattatactttaagttttagggtacatgtgcacaacgtgcaggtttgttacgtgtgtatacatgtgtcatgttggtgtgctgcactcattaactcatcatttaacattaggtatatctcctaatgctatccctcccccctccccccaccccacaacaggcccccgtgtgtgatgttccccttcctgtgtccgtgtgttctcattgttcatttcccacctatgagaacatgcggtgtttggttttttgtccttgcgatagtttgctgagaatgatggtttccagcttcatccatgtccctacaaaggacatgaactcattatttcttatggctgcatagtattccatggtgtatatgtgccacattttcttaatccagtctatcattgttggacatttgacttggttccaagtctttgctattgtgaatagtgctgcaataaacatacatgtgcatgtgcctttatagcagcatgatttataatcctttgggtatatacccagtaatgggattgctgggtcaaatggtatttctagttctagatccctgaggagttgccacaccgacttccacagtggttgaactagtttacagtcccaccaacagtgtaaaagtgttcctatttctccacatcctctccagcacctgttgtttcctgactttttaatgatcaccattctaactggtgtgagatggtatctcattgtggttttgatttgcatttctctgatggccagtgatgctgagcattttttcatgtgttttttggctgcataaatgtcttcttttgagaagtgtctgttcatatccttcgcccacttgttgatggggttttttgtttttttcttgtaaatttgtttgagttcattgtagattctggatattagccctttgtcagaagagtaggttgcaaaaattttctcccattctgtaggttgcctgttcactctgatggtagtttcttttgctgtgcagaagctctttagtttaattagatcctgtttgtcaattttggcttttgttgccattgcttttggtgttttaaacatgaagtccttgcccatgcctatgtcctgaatggtattgcctagattttcttctatggtttttatggttttaggtctaacatttaagtctttaatccatcttgaattaattttagtataaggtgtaaggaagggatccagtttcagctttctacatatggccagccagttttctcagcaccatttgttattaaatagggaatcctttccccatttcttgtttttgtcaggtttgtcaaagatcagatggttgtagatatgtggcattatttctgagggctctgttctgttccattggtctatatgtctgttttggtaccagtaccatgctgttttggttactgtagccttgtaatatagtttgaagtcaggcagcatgatgcctccagctttgttcttttggcttaggattgacttggcgatgcgggctcttttttggttccatatgaactttaaagtagttttttccaattctgtgaagaaagtcattggtagcttgatggggatggcattgaatctataaattaccttgggcagtatggccattttcacaatattgattcttcctacccatgagcatggaatgttcttccatttgtttgtatcctcttttatttcattgagcagtggtttgtagttctccttgaagaggtccttcacatcccttgtaggttggattcctaggtattttattctccttgaagcaattgtgaataggagttcactcatgatttggctgtttgtctgttattggtgtagaagaatggttgtgatttttgcacattgattttgtatcctgagactttgctgaagttgcctatcagcttgaggagattttgggccaaggcgatgggattttctagatatacaatcatgtcatctgcaaacagggacaatttggcttcctcttttcctaattgaataccctttatttctttctcctgcctgattgccctggccagaacttccaacactatgttgaataggagtggtgagagagggcatccctgtcttgtgccagttttcaaagggaatgcttccagtttttgtccattcagtatgatattggctgtgggtttgtcatagatagctcttattattttgagatatgtcccatcaatacctaatttmttgagagtttttagcatgaagtgttgttgagttttgtcaaaggccttttctgcctctattgagataatcatgtgttttttgtcrttggttctgttaatatgctggattatgattattgatttgtgtatgttgaaccagccttgcatcccaggaatgaagcccacttgatcatggtggataagtgttttgatatgctgtgctgctggatttggtttgccagtatttttttgagaatttttgtatcaatgttcatcagggatattggtctaaaattctctttttttgttgtgtctctgcccggctttggtatcaggatgatgctggcctcatacaatgagttagggaggattccctctttttctactgattggaatagtttcagaaggaatggtaccagctcctccttgtacctctggtagaattcagctgtgaatccctctggtcctggacttctttttgttggtaagctattaattattgcctcaatttcagagcctgttattggtctattcagagattcaacttcttcctggtttagtgttgggagggtgtatgtgtcaaggaatttatccatttcttctagattttctgatttatttgcatagaggtgtttatagtattctctgatggtagtttgtatttctgtgggatcggtggtgatatcccctttatcattttttattgcatctatttgattcttctctcttttcttctttattagtcttgctagcggtctatcaattttgttgatcttttcaaaaaaccagctcctggattcattgatttgttgaagggttttttgtgtgtctatctccttcagttctgctctgacttagttatttcttgccttctgctagctttgaatgtgtttgtcccttgcttctctagttcttttaattgtgatgttaagatgtgaattttagatctttcctcctttctcttgtgggcatttagtcctataaagttccctctacacactgctttgagtgtgtcccagagattctggtatgttgtctctctgttctcgttggtttcaaagaacatcttaatttctgccttgatttcgttatgtacccagtagtcattcaggagcaggttgttcagtttccatgtagttgagtggttttcagtgagtttcttaatcctgaattctagtttgattgcactgtggtctgagagacagtttgttatcatttctgctcttytacatttactgaggagtgctttacttccaactatgtggtcaattttggaataggtgtggtgtggtgctgaaaagaatgtatattctgttgatttgggttggagagttctgtagatgtctattaggtctgcttggtgcagagctgagttcagttcctggagagccttgttaactttctgtctcgttgatctgtctaacgttgagagtggggtgttaaagtctcccatttttattgtgtgggagtctaagtctctttgtaggtctctaaggacgtgctttatgaatctgggtgctcctgtattgggtgcatatatatttaggatagttagctcttcttgttgaattgatccctttaccattatgtaatggccttctttgtctctcttgatgtttgttggtttaaagtctgttttatgagagactaggatcgcaacccctgcctttttttgttttccatttgtttggtagatcttcctccatccctttattttgagcttatgtgtgtctctgcacgtgagatgggtttcctgaatacagcacactgatgggtcttgactctttatccaatttgccagtctgtgtcttttaattggagcatttagcccatttacatttaaggttaatattgttatgtgtgaatttgatcctgtcagtatgatgttagctggttattttgctcattagttgatgcagtttcttcctagcctcgatggtctttacaatttggcatgtttttgcagtggctctggagacccctttttatctgcctaggcatttggctgtctcaaagctttattttttgttgttgttgttttgagacggattttcgctctgttgcccaggctagagtgcagtggcacgatcttggctcactgcaagctctgcctcccaggttcatgscattcttctgcctcagcctcysgagtagctgggactacaggtgcctgtcaccacgcccagctaattttttgtatttttagtagagagggggtttcactgtgttagcctggatggtctcaatcttctgacctcatgatctgcccgccttggtcccccaaagtgctggaattacagccgtgagccactgcacctggccgtctgtctcaaagctttcttacttatttatctgaattcaatggcttaataaacttatgatgagatatctaaaaggatgggtttaaaattcagttcttccttattccttctcacaaatctcttcaacattacagaatcagaagggtcaaaattagaatagcctgagaagctcaatttaaaaaaaaagttagagtgagatttgaactttagtcatatatagtttctattgaaatatttgaaactctagataatgttaactgtatgacgttcccacctagtgttaatatttgaattattctttaaaagtttttgggaaatgcctgtgttaagtattggtaatttaataaaattccgtttattctcatagtatatagaagttttgttatttctagtttttatggtttttagtgattatgtggtatttaaataataaacaatggtgaatttaacagatcaaaaattcatttaattgtattactgttttgttcctcatctggaaatatttctctggctagtccatttttcccttgatctcttagtccctgtgattcaggaaattgtattaatgaatttatggtcaatactactgactaggatgctttcaataacatagtttaaaatgtagtcacacttatagctagaatggtgaaacaaaagtttgttctccttaaagatttaccttgttaagaaatagtttctgatggctcggcacactggctcacacctgtagtttcagccttttgggagaccaagacaggaggattgcttgaggacaggaattcaagaccagcttgggcaacattgcaagaacccatctctacaaaaatttaaagaacaaaacttagccaggtatggtggtatgcgcctatagtcctagctactcaggagggagaggagggaggatcacttgagcccaggagttcaaggctggtgctaagattgtgccactgtactccagtgtgagcaatagagttagaccctgtttcttaaaaaaaaaaaaagtcaatggccgggcgcggtggctcactcctgtaatcccagcactttgggaggctgaggcgggcggatcatgaggtcaggagatggagaccatcgcagctaacatggtgaaaccccgtctctactaaaaatacaaaaaattagccgggcgtaatggcgggcgcctgtaattgcagctactcgggaggctgaggcaggagaatggcatgaaacctggaggcggaacttgcagtgagccgagatcgcaccactgtactccagcctgggcgacagaatgaggctccatctcaaaaaaaaaaaaaaaaaaaaaaaaaaaaagtcaataaatgaaagctgcttctctattcaaagttagggattgttggttcatatcttcttttccacactccactaaaaaaattttaagctgatgaaaatacttttagggaaacatacttttaaatggaatagttttttctgatataaatgattaccgttaagttgtctgtcttaaagagttcagccaaaaagcacatctatctttatttaaccatttgttgctgctgctgcttattccagtagtgttagcacaggaaaacttgtcattctggacttcttccatcttgccctcaagcagtgcccagaagcaaaaccctaactgggggatagtaagctttacttacagtgccaaaaatcctatcaccatttgctgtcacaagaaaggggcccttattgttatttctctcttaatttttttttttttttgtaaatttggactcttttagtcttatttaaaatagtgatattcatatagtaatctcgcggtactgacatttgttttttccactatcagtgcctaagacaatcgttgacagttattaaaacagtaaggttttctttgactttgtttaagagcctctgatttagcgcccttcttttgcagtgatatttatattaaatcgaaaatttgtaaaaatcagcccatttttatgaataaaaaaatagtagatacaagtttgcaatataagaaatgaccactacaatgcattttagaaattaaaattaaagcttctttaacatatgttaaagtaagcaagaaataagcctctggtaaagctactgaaattttgggattattcattactactgcaaaatcaagtttaacctcactgtcgcagtgcttttgtcagtagagctaaatcataattcacttaatttacagatgtatttttaatgggctgataatctcttagttatcttgtcatttgactttccacaagtttgtattaattgaattagaaccacatgtagtgtgtgtgtgtgtgtgtgtgtgtgtgtgtgtgtgtgtgtgtgtgtgcgcttttttttttttttttttgagacggagtcttgctcttgtcacccaggctgtagtgcagtgccgcaattttggctcactgcaacctccgcctcccagagaaccatgtgtatttgtaaatcaacaattgtggttcctctgatgcatactgaataaattattcagctttcagatttaacttctatagatctgagtcactttctaaattgttactggaaacagtaattgtaaattagctgagtaaatgtgcctttgctaatatgaacactcmtaaaatttcagagcacttcacagtttcaaagcatcatttcattgattcttaactacaattctaggagataagcaaggcaagtataattattgctgcattcattttacaggtggggaaattgaagcaaagtcatttgccccaggccatatggcttataaacagcagaattagggtcatcttctggctaatctttcaactgtttgtttttgtttttcatatcatctcgttagagtcaattatctgttcaggcagtgggcagtgagggagtggggagaggtggaaggatttgtttctcttttttttttaattcctaaacatttccaccagagacataaaattatccaaaacaaataaatgcattattttgccctccatgttgctggttgctagggcacccatgcctaatttaaaatatatacatcttttgaatgtagcattttaagttttcaratttatgcaaggtatggagaggaagggagactgttagcatgttttaaaacaaggttaactccatatggagccctgccttctcaagcaatgaattttccaggattaattataaccgaagcaagatttagtcatggactaaaagtagctgcattatcatagaattcttaagtgttattcatataagttttgtatataggatgaacaaattataggtttctaactagaactgcaatgtcattccagaaactatgcaagggtattaaaatgcttattttacagttgttcctggcatttctataattaactaatgatttagtacatctggtgatttggaccaggaatgtgagcaaatcagaatatattaactagtagaggaggtagaatgtttcctattttgtagtgttaagaaagtagacagttaactgactcttaccctgaagaaaatgacaaagggtcagccaggtgcccttccttatcagagatcgtaagtttctatagtccttttgtatggaagtgatagtatttggaaatggggcctttgtgaggcattcaggcttatatgaattcatgagggtggagccttcctgactctattaatgcccttataagaacagctaccagagaacaaacttgctgtctctctgccacgtgaggacacagatagaaggccaggaagagagccctcgccagcaaccaaatcagccaggacttcctagactccagaattatgagaaatagacttctatcgtttaagccactgagtgtgtggtattttgttatagcagttgaagtagacaaatagactattaccatatagctttagaatcaaacatttaatgttaaatcctacccccatagtactggtctcaggaaaggtatgtggcctgttcagggttgttataaattatcaggaacaatatacaagaagtgcytaaattataaaattttataaacttataaaacttcaaattgtcaagattttggtaagcgaggcactttaatttcactttctagaactcataattttctaggagaaattatctctggttttaatttttattccattttattgtctgaattattcatagatgtacaaataatgagaggactcaaagagttttcatgcaaacatagctcttaaaaagtgttaactctttgctccaaggaaataaatatttagaaaactcttactgtaaatatgattatagcagtttcccaaagctaataaaatatttcatcagctaatgaaaaattcagtcagtgcaattaagcagctaatgtgaagacctgaatcagagtttcaaagctactaagaaccacttaccatcatcatgtaggctcaagtgcttttcactcaaagcttagtagtatactttcttgttcaaggtatacttcaggggttaagaatatttccaaacctatagcttcctattgtgtcccaaaatgtttttttgagacacaggcagcactttcagttttttttctaaatccatcttttgagtctataatgtgtcatgataatctttttattatgtaagaggggagtcaggtaattttatctctatccagagccctttgccagaaaaaaaaaatagagcatctttatataaaggaattctaactatctattttctttgtttttctttggaataaatttgaataccaaatagattccttataggaatcactttacaatatgggcccagtctcaaagttgaataaatctttggtcatttttctctgttacatgagagaagggcttaggccactgggggcactttctaaaattcctttataatcacatcttttcttccttatgaacacattagtatttttactgttttaattatattaaatacattagtattttagtgttttcgttatattgtgacaatatataacatttgaatacaaataataattagaaattttaaaacatgtatgaattattgttaaattagttctgccgagagaagctggagaagatcccataaacaacagattggtgccattcaggtatcattttgcacacagatacggtggcttcttctctcacatcccacagtggctttcccacatcatcagtttcctaaatctcccactccactttcccctctttatactcagcaactaacttttcaacatgctacacagagaaaacgtatgtatgaatacattctctccaaagccacactctaactataaactcgtccatacttgtacacattgctaactccttctgtccattcttattggcagaaaggcctgtcctgcttttgaggccagtcccaccacctgtgttccatggcctacttttgattcaactcagggatattagaccatcaaattggtctccctccctctttcagattgagatcatcttctctgtgttgaaatgtttcctttaccacatgaacatactcaaatttccatcttaaaaccacatagtcgcttcatcaaccctgaatcttcctctgactactgctctttcttccatattcaatgaaaaacctttgaaaaaagtcttatacttgctctctctacttccttatttctgattcatccaccaaacctagtggaatttggcttttacttagaatctgattttgctgattcacaatcgacttgctaattacaaaatttggtgggtaacttgcggtccttttcttattttacccttctatcgaaccattctcttattcttcaaactgtatctttcatttgctttatgacactacttcctttttgtttttgtttttgttttttttttcttcctctgatttcttctgaatccttttggccagttcttcttcctctgctaaagttattgtgtgaagtcattccttgaccttttgttctcattcactatcactaattgagtacctgtgtgtatggtaggctcttttttaggcacttcttgtatatcgttcctgataatttataacaaccctgaacaggccacatacctttcctgagaccagtactatgggggtaggatttaacatcaaatgtttgattctaaagctatatggtaatagtctatttgtctacttcaactgctataaccaaataccacacactcagtggcttaaacratagaagtctatttctcataattctggaggctgggaagtcctggctgatttgattgctggcgagggctctcttcctggccttctatctgtgtcctcatgtggcagagagacagcaagtttgttctctggtatctgttcttgtaagggcattaatatagtcatgaaggctccaccctcgtgaattcatgtaaacctgaatgcctcacaaagaccccatttccaaatactatcacattgagagtaggggcttcaacagaagaattttaagggtagaggtaacacaattcagtacatagcaaatcgttttcagactttttaaaggaacacagctgtttttttaaaaacaatatcttcctaggaccccaacatataaaatagtcaaaagcagaactactccattacagtgggaatgacaggtccagagccctgataatttggacctccctcccaattctaaccccatagtgctccaaaggtatttgctcagaacccaagggctctgagaaaacagtttaaaaggtacaataatttatgttaaattgtccaggctcacacctgtaatcccagcactttgggaggccgaggcgggtggatcttctgaggtcaggagttcgagacaagcctggccaacatggtgaaaccccttctctactaaaaacacaaaaattagccaggcatggtgatgcgtgcctataatcctggctactctggagactgaggcaggagaatcgcttgaacccgggaggcagaggttgcagtaagtccagattgtgccactgcactccagcctcggcaacaaagygagactctatctgaaaaataaaaattatgtaaaattgcaagcctagatttattttttagttagtttgaaaatcagatttccaaatggatcctggacacttctgtcattctacctgtgtctgaccagtacttcactcagttctttatgctccaaatggaacttaccttcattgttaacttctaactattgttttagtgaaacttcctacctcagcaaatcttccaggctccagacctgcgatgacaggtggaaagatttcttcttgctgctatgtcatrtaattggacagttaaggcctgtagagctgtagccccatagaggccctcataatcttttctctttgcttccttttttaccctctctttctccaatctatcttttctacaaaggtaaatttctaaaattcaagcccaatcgcattattcacctgctgacatttttcttgagcccccattgtctgttttaaaagatactgaaggggctgagcatggtgactcacgcctgtaatctcagcgcttaccaaggccaaggcgggagaatttcttgaggccaggagttcgagaacaccccgggcaactaagtgagaccctgtctctacaaaaaatttaaaaattagctgggcatggtggtgcatgcctgtagtcccagctcctcaggagactgagatgggacaatcacttgagcccaaggagttcaaggctatgattgtggcactgcacaccagcctgagtgacagagcaagaccctgtctctaaacaaacaaaaaaagatattcgaggcatacagaaccctcaggatttgacactgagaatacatcatattctctcaggcctcaagtcattgtagagttttttcatttctagaaaaccctctttgcttctttacctacctggcaaattatcattttcctttcatgtatcaacttactcattatgttttctgtactcgcctgacttctccgggtgaccagttctcttatcattaaaaatggtttatttttatgtttttcttcctattagacttatatctcctagaaaacagggactgtttgtcttctcatctagcacttaacatagtagttggtacatagtaagtgttcaagatatgttaattgaatagttgaattcttttcaagaaaattaattttttagcatatctaggtatcagccattttatctgttaaagaaacagcaagataagatgatttcaaaatttccttccagttttaggattatctgttaaagaaacagcaagataagatgatttyaaaatttccttccagttttaggattctgtgttacttctcttactataatctccttacccatgattcttctcacttattttacaaagcatttaaaatttatttttaataatcacatgtagaattaattttaagtatatctttaaagaaggatggacttttatcctcttgatatttattttatatttttttgaaaattatttttgttccataaaaaattagtttttgcaaatgagtccaattaggaacaaaatatatcaagaataaactttggattttttcctcttctttacttcctgttractaattgtagcgggttctctccaaagcatgttcttggcgtaggaaaactgtgtggcctgttttgaacctaaggatgacaggtggaaataatttttctctcaaaagtagaattcaagaaaacagtagggcttttttctttcttttaaccttttaaagtgatgaaataagaagtctacatttttaacgataaagcatttttgtaatgtactgaagcaggttctgtaaaatttaacttttaaaacttatgattttagaaaaaagtcatatgtaactcattagaatgtatttttatttaaaatattataccagcatgtgcatagttacaaggcattgccaaaaaatgtactctggaagcaaaacagaatactgaaaataatgctacaatttttaaaataagaggaaaatattttctttacacatgaaatttttggtccaaatgatatttaaccaactaactggctaatctattaaagcattctatttcagaaaagcttcatttttggtaccrttgattgcattagcacattacttctgatagtgggcatagattatttttttttctaaagtgawgttttttccaaagtgatattgtggttttactcttggaagaaagtacaagttttctgtgggcctaagtattaaaaatgttttttaaaaacttgaaattgttatacattaaactagaactcttggaactttttcagattttgctgctatagtcactagtcctttgacttagatattttatgaaccaatttttactggctggaaaatagaattttccataattaagagaaaacatcagttattttatccagttgactttgtctttgcttgttattgtttgctttagagatttatctaagttgttgacatgattcagattctagtgtatgaaataaagcttttgaggggaagttgctttgaatggaaaaataaataccttaaaaaatatttagctttgagtgtgtctagtcctgtttgaattttttgtttttccttgcactcatagttgtattctattgtagtatatatatttgagtataaaattggttaacacactaagagttcagtttatgagatgggataaatttaaatctcaaagcaattttcaaatatactcattaagaaaatgcaagtatttatattttaaataaagtcattttccactatataccctatcacccttttattattatagacgttttctaatttccaggaaaacctcgtccaccccagtgactgatatatactctagcttgttcaacccatggcctgcaggccacatgcagcccaggacagctttgaatgcagcccaacacaaattcgtaaactttcttaaaacattatgactttttgttttgttttatttttagcttattagctatcgttagtgttagtgtattttatgtgtggcccgagacaatttttcttccactgtggcccagggaagccaaaagattggacacccctgatgtatagcttacccttcattcaaacccctttcatctttcgacgaagcttcataatttgtggtgataattgttttcatatcctatttttatttgccagctattatcatggctgcactttagagctatatcttaactaatcagaacctaatttagttttaaaaattctgtattttctgattagaagttaggatgattttttaaaatgatggcaaataaatatttatgttgctatcaagaaacttatctagtggggaatgtataacatttttaagtagccatggtacgtagaagagaggtagcgataaagtgctttgcgaattcagaggaggaaagaagtaattctatctggacaatccagaagaggtgtaatctaaaacagttgttaaatatttcaaacatagagaagcacagagagtaatataataacataataattgtgctacccagaattaagaaatattatttgcaaacatcaaaaaattctaaacttaatatctttcctccttctgaacaaaacaaagaccttagaatgcttaaactcaggcttcccctcccttttttttttttttttttttttgctgtttttgttgctactttgtcttattgttattgttgtttttggctcatctttgctccttacatcctgcttttcccattggagtttaatttgcttcttgctgaaacatttcctttagtggttctttttcacattttcctttttttgtcgggggagagctctactgtattttgtgttttcctcacatatgtctttcagtttactattttctgtccttctgtggataatctaatgcttaacctgtccattgaaacttttattccaagattcctgtttgattctttcaaaaaagaaaatgcctattcttttcatattgtcctttccttgccgtatggcagctattcctttcgtggtttcttttgacattaaatatacttcttttagaatttctttcagtttattatctatgattgtggatgtgtcagtcctgccattggtcatgtcttctgactcttttataagtgaggttcatttaaattttttttttccattttactgtgaatttttttttagtgggagttgttttcctgtgggtcttggatcgtgaaggcatactgttatagagattcatatttgcttctgacaaattcctgttggcttcactgagtctgaaccagttgttattcttaattttttgagggtggagcaggcttgggtagtctcattccttatgtgtgattccttttccacccatgccccagatgggttgcaagctttcttgtgactatacccaagctagtaagcaaaattttcctaggagctgtttcatagacagaagagtattttgtagatctaggttacatgcagggctgcaagcccagtttcagcttcctacctctaacaggactgagacctgtctcctttaatagagggtaacagaaaacctcacagttgactttggcttaagttcagggtacatggagatggttaatggaaaatatgtttggaaaggtgggttggaatcaagtacagtaggccttgaatggtaggctaaggaatttggacttcatgctacatatagcaggaatccaatgaatgtctttttgcgtgagagtcatgcagagctttgctctaagaagattaatttggtaaccatgaataggttggaatggagagaacatactgtgaatagggagatcaattaagagactattcacattagtctgtgaaagaggtaataaagacctgaaatacggtaacaatagtggcaatgaagatgatgtgagaggtaaatagatgtttatagagagattatgatacaggtttcacactggtattcaggagaaagagcattccaagatgaccccagtgaggatgctgaaactattaaggaaagtcagacacagacagagcgttaggtttgtaaagaaaggtgagttcgattatgaaaatattatctttgtagtgccagtgggatacccaggtacaaagggccacccatgcagataaacatattggactataattaagatagaaggacagaccaaaagagatgtggggcttagtagaacagaagcattaaatgaagccatacatttcagagacagaatcaagaatcaggaaagagaggaggtaaaccaagaagaaaattagtaattaggaaatagaaaaagagaattgtggggaatgatatgtcagagtagtaggagtgtggcccggggcatagactgatattatggaaatcagaaactggaagcatttcacggccaggggctatcactattagagaggtggaggaaaatgttgaggaggatgaggtccaagaaatggccatttaatggtaaccagagtcaaaatacaaggatatgaggaacaagtggaaggagaggcagtgagagtggaaataatgtagtaaattcacttctgaaataaaacttataagggtatacatagtatttgtgaaatatagatctgtatgtatatgtttgaatctatacaaatgtattatatgtatgtatatatgtaaatttttccccatgtctgttagcgtgtaggtattggcacccttgggttactctattaccctgtgataaaagattagcaagcaagattcttcttatcctttgaaatctccactttgatcttcataatagaggtacagtaaaaggggaaagatagaaagcaacaatattattgttggaatagacgtaggaggtcacagggttgggaaaggagaggtacatactattagcagagggtaaaagtgctttggaaatttgggctatggaagatctatcttttgtgaaagcatgctttgtattgaaattatcaaatagaagatagagggtggacaagaacacttacacataattgaatgtaccagatgctttacataaattttcatgtttcatctttcaaaacactaataaggagtgcatatggtagttctgtttttaattttttgaggaacttcygtactgttttccatgatggctttacaatttacattctcattaacactgtactaggggttctctgttctccacacccttgcgaacccttgttatatattgcctttttcatagtagccatcctaacaggtgtgaggtgatacctcattgtgattttaatttgttttgcctggtgattagtgatgttaaagttttttcacataccttttggccatttgtatgtcttcctttgagaaatgtctattccagtcatttgcccattttttaatcaggttatttgttttcttgctatcgagttgtttgtgttctttatatattttgtatattagcccctttctaggttctctgttctgttccattggtgtatactgtttttatgccagtaccaggctgttttgattactttagctttgtagtatactttgagatcaggtgatatttacatgcctctttgttcatttccttaagctttatttgcctattcaaggtcttttgttattccacatgaattttaggattcttttctctatttctgtgaaaaatgtcataagaattttgatagaaaaatgtgattagaattcagtgatggaatcattgaatctgttgatcactttggattttatggacattttatcaatgttaattcttccattccatgaataaggaatattttttcatttacttttgtctccaatgtctttcatcagtgttttatacttttcagtgtatagatcttcacctccttggttaaatttgtttttaaattgttggggttttttgttttgtttttgtttgttttggtagctattgtaaatgggattgttttcttgatttcttcttcagacagctccttgttagtgtatggaggtgctactaatttctgtatgctgattttgcatgctgaagctttactgaatcaattagtttcaacagttttttggtggagttgttagggttttctataaataagatcatgttatctgcaaacagagacaatgtaacttttcctatttcttcttttgcctaattgctctggctataacttccagtattatgttgaacagaaatggcaagagtgggcattcttggcttattcctaattttaaaggaaaagctttcaacttttaacagtttagtgtgatgttagctatcgtattttatatatatatggcctttattgtgttgaggtacattccttctatatgtaatttgttgatagtttttatcatgaaaggacgttgaattttgttaaatgctttttttatatttattgagatgatcatatggtttttgtacattatgttaatgtggtgtatcattttcatagatttccatatgttgcatccctgtgacaaatcctacttgatcatagtgtattgattcttttaatatgctgttgattttggtttgctaatattttgttgaagatttttacatctgtgttcattatagatattagactgtaatagttcttttctttaatatccttgtttggcttttgtattagggtaatgcaggcctcataaaataagcttggaagtattgtctccttttcagtttttagaaaaatttgaagaaggattggtattaattcttttttgaacatttaggagaattcagcaatgaagccatcaggttctaagcttttctttaatgacattaaaaaaaaaattatagattcaggccaggtgtggtggctcacacctgtaatcccagcactttgggaggccgagacaggtgagtcacctgaggtcaggagttgaagaccagcctggccaacatggtgaaaccccatctctactaaaaatacaaaaatcagctgggcgtggtggcgggtgcctgtaatcccagctactgggagactgaggcaagataattgcttgaacccaggaggcggaggttgcagtgagccaagatcgcaccattgcactcaaacctgggcaacaagaacaaaactctgtctctaaataaataaataaataaaagattcaatctccttactttctattggtttgtttacaatttttattgctttataattcagtcttggtaggttgtctgtgtctaggaatttatccattttttctgagttctccaatttattggtgtataattgtttagtgatttttttcatacctatgtggcctcaattgtaatatctcctccttcatttctaattttatgtatttgagtcttctttcttttttcttagttaatctagctaaaggtttgtgagttttatgtttttaaaaaaaccaacttttagtttcattgattttttttctttctattgtatgtctaatctctattttatttctactctgatctttatttccatcctkactgtaactttgggcttccttacactaactagttctttaaagtgtaatatcaggttatttgagattttttttctttttaagtattgtcttttattagtataaatttctcaggactgctttggctacataccataaattttggtgtgttatgtttactttttcattattcttaagatatttttcttgagaatcaaaacttcccttttgatttcttcttgaaccattgattgttcatgagtgtgttgtttaatttccacgtttgtgaattttctagtttttcttctgttactgatttctagtttcatatcattgtggttataaaaattactcaatatgatttcagtcttactaaatgtgttaagatttggtttctgggctaacgtatgatttattttgtaaaatgttctttgcactcaagaagaatgtgtattctgctgctgttggctggaattttctgtatacgtctgttaggtttattttgtctgaagtgtaattccagcttagtgttcctttactgatattctttctggattatctatccattgttcgaagtgaaatgttgaattcccaactattattgtattgctgtctatttctccctttagatctgttaatatttgctttatgtgtttaggtgctctgacttcggttcacatatatttacatttgttatatcctcttgattaattgatccttttatcattatctagtgaccttctttgtttcatgtgatggtttgacttaacatctgttttgtctgatgtaagtttacctgtccctgttctttttggtttccatttacatggagtatcttcactttcattctgtgtgtgtccttaaatgtgaagtgagtctctttcaggcagcatataattgggtcttatttttttttatccattcaaccactctatgtcttttgattggcaaatttagtctatttacatttaaagtaatgattgataggtaaagatttacttttgctattttgttaatggtgttgtagttatttggttgttttggagaccttttgtcccttttttcttgctgtctttctttgtgatttgatgattttctgtagtggcatgtttcttctattcctttctcttcatcttttgtgtatctactgtaggtttttgcatttttgttaccatgagggttacataaaacatcttatagttacgctagtcatacaaaaacatacaaaaacttacttttactctcggtattagtctgtcctcatcctgctaataaagatatacctgagactgggtaatttataaaggaaagaggtttaattgactctcagttccacatggttggggaggcctcacaatcatggctgaaggcgaatgaggagcaaacacatcttacatggcagaaggcaagaaagcatgtggcaggggaactcccctttataaaaccaacagatctcatgagacttactcactatcatgagaacagcatgggaaagatctgctcccgtgattcatttacctcctactaggtccctcccatgacaggtgggaattatgggagctacaattcaagatgaaaatttgggtagggaaacagccgaaccatatcattcttctcttatattttatgttttctgtgtcagtgtatgtatttttacattatatatccattaacaaatttttgtagctctagttcttttctggaaatgcttttgtctttcaacatttatattagagttataagtaatttacacactaccagtacagtgttagggtattctgaatttgactatatatttacctttgtcagtgagttttatactttgatgttttttttttggggatggcgtttcactcttgttgcccagggtagagtgcagtggcacgatctcagctcactgcagcctccgcctcccaggttcaagtgattctcctgccccaacctcccgagtagctgggattacaggcatgcaccaccacacccagctaattttgtatttttactacagacaaggtttctccatgttggtcaggctggtctcgaacttccgacctcaggtgatctgcccrcctcaccctcccaaagtgctgggattacaggcttgagccaccatgcccactctatactttcatgtttctaagtagtggccttttgttaaagtctgaagaactcccttttgcatttcttgtaacacaagtctaatagtgatgaactccctcagttttgtttgtctggaaaagtctttgtccctcattggtgaaggatagctttgctgcataaagtatttttggttggcattttttttttctttcacaaactcttcccacttactcctggtctgcaagatttttgctgagaaattcatcagtggtcttatttagcttcccttgtatgtgatatgctgcttctctcttgctgctttaaaaattctctgtctttgatttttgaaaatttgattataatgtgtcttggtgaagtcttctctgggttgaatctgattttacatctttatgtttcatgtaccttgatgtttatatctttccccatatttagaaagttttctgacagtatttctttctctttctctttctttctttttccttctttcttttgagacaaggtctttttttttttttttttttttgagacagagtctcgctctgtcacccaggctggagtgcagtggcgcgatcttggctcactgcaagctccgcctcctgggttcacaccattctcctgcctcagcctcctgagtagctgggactacaggcgcccaccaccacgcctggctaatttctttttgtatttttggtagagacggagtttcactgtgttagccaggatggtctcaatctcctgacctcgtgatctgcctgcctcggcctcccaaagtgctgggattacaggcgtgagccactgcgcctgggagacaaggtcttactctgttactttggctgtactgcagtggcataattatgactcactgaagccttaacctcccaggctcaagtgaccctcctgcctcagtctcccaagtagttaggactacaggcacacgtcaccacttaggcacctggagattgggaaggcagaaaactgtgggatgcccagtggccaaacctgcagggggtctgttgtagctatgctgactgctagattcctcagcagccagcaaaagcctgttagggtcttctgcagagcaagctgccgtggtccacctcagtgaacaccgtggtatcctcaggggtgaaatctcttgtggtagccacaagggctgttgaggtcctcagcagagaaggctgctggaatcctgtgcagagcaggccactaaggataataatgatttctgcttatatggctgatactgatagcccccatccttctttgtttccacccatgccagtctcttcagcaatctgggtggggtataactaatgctggttgctgatttctcaggcagtaccctgaaagtctggggaagctgctctttcatcctgctctccattgccatgccagtgatacttacaaacttgggagttccttttctatgctgatcagtgctagccttgggaatgggatgataaaggcagaatgaactgtttctttcttttgtgtggttatggaatttttgtgtcattacttatgggagttttcttccagtgtattgctgtagtttcttaagtagattcctgagctcttccagttattcccattcatgggtagcgtccaattattgttctttgtgaagaaaacgaaggctgggttttcctacttagccatctttctgacatcattccttgcttttctttatagctttgtcatatttacatattccatgtttagctttgcatgttcagaatttaatatgaatggaaccatgctcttcatattcttatgtaacttggtttttatgttttttttttttttttgctaagcattgtttctgagagtcagtcgtattgatgcatgtacatagctrtaacttatttattttcacttctgatagtattccattgtatcaataacaagtttatccattctcttgtcaatggacatttggttgtttctgttgttcttttgctataagaaacacgtctgctgtaaatactatgcatatgccctttggagtccttaggtgggggaatcaaataggttaccttgtctctgttattattgttttcctcctttccaggtggcttacacctcccttgtgtctacattttttgcaactctagaaaggaggggaagagagtttatgaggtattggggatagcaggggatagctgcatttactaccctttacttcaaaatagcttcttttgtcagaccattacacattgtagttctctaggcctctgccttaggccctcctcttttctcgttctatcccttcttcttaaatattaacatttatttttatggtttcaaataccatctaaattctggtaactccaaattggtatcttcatttcataactctcttcttttcacttggcccatatatccagctaccattcctcatcaccatgcatatgtctctactataatcacttcagactcaagtccaaaaccaaagttgggatctttcccttctttcctctcccacccttaattgcttctccagttttctatttctctgtgagggcatcttccctgatctatgtgattatgtgactaggtacctggaagttgaccttgacactgctttctccttcccaccctcatattcccacccccatatccacccactcactcactgaaatatttctaaaccagtagttttcattattttcactgccaccaccctaattcaaatcaccattgcatcaagcctggactagagaaacatcctcctaaggaatctctctgtatctactcttgcttttctctaatccattgggcagccaaagtggaccatttacattatcaggtttcctttttactttcttttttctttttttttctttttttgagacggagtgttgctcttgttgcccaggctggagtgcaatggtgcgatctcagctcaccgcaacctctacctcccgggttcaagtgattctcctgcctcagcctcccgagtagctgagattacaggcatgcgcctctgtgtccagctgattttgtatttttagtagagatggggtttctccatgttggtcgggcaggtctcgaactcctgacctcagatgatccgcccacctcggcctcccaaagtgctgggattacaggcatgagccaccgcgcccggccatcagctttctaataataacttttcagtggcttcccagtgcccttgaataaaatccacagtttttaaacattttctataaggccatcttttgtgtactttctgcctacatctctagcctcatcctgagctgaaaccacctgtcccctatattctcaatatgtactgtgtctccttactccttcatatatgttcttccctctctctggatcaccgttatactccccttgccttcctagctaattttatctctttggatctaagcttaactgtcatttttttagggaaacctgttctgatcttattcatgttggcttctctttttatccacattcatcaagccctactttctcatttgtaatattcattatttaatatgtttcttttctgctggattatacggtcaatgagatcacgaaggctttgttctctgttttattatcagggctacttcaatacctggcaaatagtaggctctcagtaattttttttttgagaatgaatgagctgcatgtatctaaatttctgcatttttgtcccctcactcttggagataaattactcatcctgcctttataaagatatgatgaaaattctggcacatagctgttactaacatggaatttctagtaaaaaattacattagacaaaccagaatcaggcactaggttttttaaggaatattaccaaagaaattcagaagctagtacatttatttttataatatctactgaatttccaagaagtgacacttgttcctcattgggatacacaaaatctaggctcatattacttgctatttttagattttttaatgaaactttgccttactctgtctcttccagtcattattctgaataaattaatagaaatgagtatcataatgttttaagaatcaaaaaataaaaacaatatttatgccatttttctgtgtaatgtcatctaagcatataatggcaatactgaaattagacaaacattgtattaatctcttgtggaaataaacatctgacttggaagaatatacttaaaatttatcaaatatcatttggcctattagctactgtttattatctgtttttcatggctctatctatctcatagcccatgttcctgagatgttcctgtgtttaaatgtatgtagtatatagacagaatctatccttagaggtctatcctttgagataatcagcactaccaacaacattgttcatagaatatattatacttaagtagctatatcttctgtgtgttctatagttcacacttaaatcaaggaagtaatcctttcattatgtaattatattaactgtcagtaataactgttctatccaaaatacctggtgtgctctttgatagcaataaattacacagttatagtataactggacttatactccagttataaggcagaaagtcttctccgagcaatctatattcagttattaaatatgagtaataataaagcattgtgttcatttggaaaccatgtgtcttttaatttccaaatatgagttttggtgtttgattggtctaaatgtctggcataactattcactctctttccaagtgtattgatgtaaatctgaattcagttttattattagtttattcaaattgtattctcactagctggctagatggtaaagtgtaagagtaacatatgactgcctgtggaagtttgttacatttttgtttggacttcatgaagccatatgttttttgttttttgttttttttaagatggagtctcgctctgtcgcccargctggagtgcagtggcgtgatcttggctcgctgcgacctccacctcccgggttcaagcgattctcctgcctcagcctcctgagtagctgggattacaggtgcgtgccaccacgcccggctaatttttgtatttttagtagattcgggttttcaccatgttggtcaggctggtctggaactcctgacctcgtgatctgcccacctcgccctcccaaagtgctgggattacaggcatgagccaccacacccagccggccatgtatttttataaccaagctgccctcagaattatgaatagtatttctgacatgtagtgtcttttctcatttatcttagaatatatggttaccactctataaacagtttgtctattattctggtactgtgcttagtttaagacacctaaccattaactagttttcagaatggttttgctttttagtgatagttgtgtgagcgcactgttgctctggttgtttttaaatctcactgaggtaggcttcargttgttaatgtaaatctttatagctttggctgaacttcctacaagagctgtgggtcttgatagctgagatcagctggctgatctctcttaatggcagttagatttgaattttgtgggctaggacacagatctgtttggaaatggtctgtttaatgcatgatggctttaaatgaagactaaaaaaacgggccaccttgtaaaaagaaagtcttagtctctagagttcactacctttcttagtttgaaccaatccaagtttttaactctccatagggcccggtaatttgaggtggaggaaactaatatgaactttacatttcatttcaatattaattccaagccagtgtgctttaaggattgtcacaaacataytatgactggacaggaagagtgcttgcctcttggtcttgagtgacaagccctgccctctgcccctagctgagaactcaaagcattgttaagtagcactaaaacgagctgagtccaagacttcagccagatggtcaatatagtgcttttaaaggaagggaaataggaaaagagtaatctcagaagcactcctatgttaaagaactaagaaactgaagtctttctgaagctaagtgtaaattattccactttctttgggagcaaaagctgcaaaatataacacaagaaaatgacagtgtaggaaaccaaagttcaggaacaaaccttcaagtgtggttttctaatgcttaatcgtatcttacgcccttctcaggatccattgctccttttccctccctcttctccaaggtctgtttgaaagggattttgatgggataggaaggcagctttagacagagcataaattagggcataagatgtcctttgtacaagaattatcttagacatgctttcaaaaacatactttttttgaccttattaagaaaataatcaaaggtatgattttttaagtctttgagtttagtctgctttcagtaaaaataaggtataggtaccaaaataagcaaacctcgtttttactttcctggtttctgcttatamgatttacacatatttaaaataaacccatgaaaaacaggaatagtgtcatgggattggctaaatagtcagagcaattacctccaggctcccaaacccaactgagcttgacttttggaagtaaatttggctaagacttcttcctcattctgttttataaaggtatacatgaaatgatactgacttctgccagaaaccccaggaatcctgttcagtgatgtacttgtaatggtcatgaaagaataaaaacacagatgtggattaaggtagaaaagtacagaaaacactaaattttcattgtgctgtttcaatgtggcagattctttaaaatacttcgacatgctacaataattaaaggttttaagaacattaagatacttaaaaaataaaagcccacaattgaataacaaaaatgaactttgttttattttttattggcattaatgtaggttgccgtggtgaaaatagtttgaaatacttcacagtaacagttttgtgcagccctagagatcaaaaacagcaaagtaaataagcaggactctcaacgactcatactcacagacatgtttaatgtaaatgattgctagaagggaagggcattttcttcagtgctatgcaaagaaattttaattgacttggttttggcagtgagaattgtacaacttagcattaataagtcaaatttaaaaatttgctcattactctggattatgactatgttcaagaaatactattttcaagcactaatcatttagataaaactttttttacacatttatggcatcaaggagtatgactgtttataacattttacctataaagctgaactgttttatatactctttatggaaacatggccataaattaaaagatgcaactgttttgaatattttactggtggtcctctgttttcctgccagcagtgcagctgtttcaggtttctcaggataacatataaaaagctgtatgcacactgcaagtttatgctcaaattgccaagccagatatggtatgactcaactttcccagaagcaagctgtaccaaaatgtgatgaatcaaaacagttagttgcacagtggtttgtattacagctatgaaaaccaattctcatttatgatgtttggcttttcaaggttgacaaacattctactgtggtgcttgaattttaccataagtgaacatctattgaagctaagactatgcttttcttttgaggatctgaggaaaggaaagggtgatacattatcatctggtgtgcggataaaaattagctggaaacttgtatcaggaatggaacatttcatttccaagttacctataaaaatattactcacttattatttgtatgatagttattgaattccctgtgaagccaggttaatttttagacctttctgaggtaacttaacatttacttcatttctcatgcatcagaatcttaacagttgatactttattgtgtcttggaaagtaataagcagataactttatggccatggggtaggtgtggtgaatccctatttcaatcctatgcgacctaaggttctatcaagagtttaacaacgactatttttcttttttttttttaaacagggtctcactctgttgcccaggctggagtgcagtggtgcgatctccgctcactgcaacctctgcctcatggactgaagtgattctcttgcctcccaagtagctggattacaggcacctgccactgtgcctggctactttttctatttttagtagagacggggtttcaccatgttggccaggctggtctgaaactmctgtcctcaggtgatccacctgcctcggcttcccagagtgctgggctcacaggtgtgcgccaccacacccagacaacaatgactaattaataayagtagtctctaaagtgggatgtgtcccatgaggatatgtaagatacagtwtatggagaaaatattaaaacattcattcattaatttatttagagatggagtctcgctctgtcacccaggctggagtgcagtggcgaaatctcggctcactgcaacctccacctcctgggttcaagtgattctcctgcctcatcctcctgggtagctgggattacaggcatgtgccaccacgcccagccaagtttttgtatttttagtagagatggggttttgccatattggccaggctggtcttgaacttctgacttcagatgatccgcccaccttggccttccaaagtgctgggttacaggtgtgagccactgtacccagccagaacttttatttaaatatttttatttcatcctttttctatttatatttttatattacactgactatattagtatcttatgtatataattatatatagtaacatatagtacattagtattctacataaaacatatctgagatatgttttatggctataaaatactatcaaaaatgtttttgtttttgttcaataaatattctcttcttccttccgctttcccctttcgcccttggcagagaagcaaataattgagttaaaaccttgatttgtggcaatgtgaataaattatagctaattccaggaacttagctgcatcctaccttgacccattttttctactggactcttatattgctctatatgttttagctacacaggtttattaaacatggatacagatgaaaaacagacttgttatgttagaagttataagttgctcatgcattaagattttgacacacaggaagtttgaatgaatgagtgaaaaaggttccaagttattaaaatgttctggtacctgatttattcatttgccataccagtaattctaaggtgggtgaagctcctttacttcctgaagaaacaagttagtttcttaaactaagcattaaaagaaagctggaattatttgtttccagaagtgttagtagtcatgctaagttgcccttctttggctagattgtccaattttttttaggcctgttttgtctatttttgtcaagatataaatgtttaattgctttaaaaaaactgtgtggttgcagaaaaaaattgtactgttatattgttgagatcaatgagacttttctgtatttactttttcagacattattttgaactcaggctcagtctcagagatttcttcaacatgtaattttctaatgtttcctttcctgcaaggaatgagacaatatattcttggaatattaaagtacttttgaagtaactcatacgttttctcccctcttccatttgtttagctattgagggtttgctttaaaacaaatttatgtagaaatatcagtactataatagtattgtgatactgtgtatttcttaagcatatgccaggaaggagagcattagttaggtgtccaaaaaacagccaacaaaacaaatcagctctgaaaatcgtgaagcagtgaatattttagaattatttttgaaacctctttcagaactgtttttagaccccgtggtaatttgctatgtaatttaatactagtttaggcactccatgtacagttggtatgtttccttttgaaagataataatctatttataataaaagtctgaatatttcaatctcggaattcctctttaaaacttgaatcagttttactattgctttttaaaatgttacctatttatatttgctttgtatatcaatgctacacttcttgttttgttttaggtatttaaaccatgtcagagctgcctcaccacaggmccttgctggaggctatacttcttctcttgcttgtcacagagcactacaggatgcattcagtgggcttttctggcagcccagttaaccatttataagatttggaccttggagctgaaccagggagctagcaaaagtaaagcagacttataaaattatagctatgtgcagctgcacaacacagtccttccactagcagctgtgttaaagtatttataaggagaaaatttcagaactaagttgagtaatataggggatatatatttgtgaaaaataatttttacttatatttttcagaggatttgacacgataagcctcatctgatgraagagaggaataaataattcmcctatatgtgtttgaggttgtgacagacttataaaatctttttaaaaaataaagctataatttatattaagttctgtggtttttctcttattacagtgttttacttgaacacattttaaataccattttgattacaacatttactgttaatatccaagtctattatttcttctcataaaatgttcccctttttcctaatgtcttgttaatactagtccagacaagtggatatatttcctttgaccaagttatggcaagaaaaacctgacccatgataatgtcattccctcaatactaaggactcaatgcctgttttaagcagtggaaaatgaggcaaaccttgatcaaggtgttatagttcccagctgtgagccacactcaggataaaacaaaacccagcattaacctgctttagtgacacattcaaagaagttaataaaatttaatacttaaatgatacctttcacctccaatgtaagctcattttatgatgaatcctttggagactggagaaggtacattttaagtacagttccctatgtataaattgtatactgatacagtttttttgttgaaacttcaaaggcttttattaccagggttttgcttaaagagtttagatatgaataggatgatattgcagcatctcaaccttgtatgagtctgttacatagagcattggatatgggatatagtttcttaaggaaattaagggatttcctatcaaatctctattacaacagatgttagttttatgggtagaaacttaggtgaaacaagacttgtggttacattaggatggactatccatctgtaacaactccatcttattttactaagcagttattaattaattttagcaatacatcttcatctttattgtacttctatctttgttaaatgagaaaaccaaggcatcaaataattgagtagacaaagatcatattcacaagttagtaaaaagccagaattagaatgcaggttttttttttcaaagtccagttccatctacattctaccagactgcatatcctattcctgtatctattaggtatttccgaactgaggattagtgtttttaagtacagtctataaatctgttcaaagaatagttagaacattgaatgtagagttaaggctttgcagcagccaattgcaaaaataaggaatccagtcttttgaaaagaaacactactgcttgttctcataccttttataaatgtattttaaaaagaatgaactaattaataaaacatatcaaaggcttttaaggcttgttttgagcctgccttattgtggaaattgcatgcacctggtttggcaaataaattccaaaacctttatacatttgtaaatattttgtagttgctattgctgtactttgttcaataggccaaatttagaagttaactgaccttatttgatcaaagggaatggtgaaaaataacttagtgacaattcactgaggtttagtgaattcactgaatttaccaaacaacagaaatattctaaattgatgtgcttatcccctaccatccaagtgatttactcttagagacaaaggctgtacatatctttcatctacatgagttaagtcttcaagtattttatgagtacagaagtaataattaacaactactgtattacctgtgtcccaggcactgcttcatgctttgtgtattacgtaatcctcaaaacagttctactagtattttccccattttaacagatgaggaagctgagacagtggttaggtaagttgccaacagtcatataacttaaaaatagcagagctgggatttgaactcaggcagccagactccagaagccatgctctagagatgactgtcaaacaactgctgtgctaaaactagtcctggtagtcgaacttcataagacttccaggaggttctacagatcaagtatctagatcttttatgagatataaatgacatcaactaaatgatcttgttgatgtcctaagagaagttctgagaaattcatgatgtagaaaatgattttactaataactatactccctcttaagcagatattaatggtacagaatacatttacatcatagttagtatacatgattacttagtattccttaatttgattcaatgaatatttcaactatgcttctcttagaagttgtctttaggctgtcaacaggttgtcagataattattttaaaatccaattaaggtggtagaaaacctgtcaaaaagttaacaaaattaaaaattgtatctaatgagctttccagctttctagctgtcattttctagtagattcatcaggaattcatttactaggtatcacatctgaaagtttagggtggacctagatttaaataatgaataatcacttatccactctgaaagggggaagttaaaacgttaatagatacatctagttctgttttctttacaattacatattgcatattttgtccagagtaactaaatggagacaagagtcttaccactttacatgtataaataagaacatcatttgtacacatactttataacctaggacatcagtgtacaatacttgggctgtttcaaaacaatttgaattaagtaagaatgagtgttccagttcattacatccctatactgcttatcatttattgccttcatttgtttacatgacctgccagacttctgaaggcatttgaatttgtaattaatgatctagattagggttcttaaacattttctgtagggccagatagtaaatattttaggctttgcagggtaacaagcaaaatcgtggatattatgtaggtacttacagaacaagctaaaacaaattgccacacttttttttttctttcaaactgtatccagctttattaaagatactttccataaacaatcatggtatttcaggcaggacatgggcagacagtcattaacagtatacaactttcaaactctcttcttcaatggactaccaaaaatcagccactataaaacccaatgaagtcctcatctgatgctctgaacagggaaagtttagagggttaacatttcacatttagcatgttgtttaacaacttttcacaagccaaccctgactttcaggaagtgaaatgaaaatggcagaatttatccgaagatccataatctagaaatggaaccactgctcttttgacaggtgccatctcagtggcatcactggaaagtccagattgccagacacactggtaaccaatgaccgggggtcaggtcccaacagatgtctgggcttaaggggattaagtctatgctgaaagatggaaagggaaaagaagacataaaaacgaatttgtttttccataccacaaggcttttgtgccaaggtggccatgtgtgtcaaagtcaggaaatccctcctcctgggagccaagaggaagtctctcaaaactagaagggaaagatgttttccccgtatcaatccagcttcagagatattctattagtgacacataccccttcccccaaaaacaacaatgaagtgttctgtgtgctaacaacatagcttaaaaaaagtaaaacaaaattctgcatttttataaaacttgataaagaatatttcaaactgtacagtcaccagaagtacagttataaaaaatgcacacacttcacttgggatctccagcaccttcccgctccttgccagcatcagcttttctctttttccctttgggtaccttctctcccttctttgcaggggcctttttaggcttgggctctggctttggaggagcaggtttagcagacaacctcgcagatcttctctgtgattcatccttcaccttggctttatctcctttagcatccccttcagtctttctcttgggcatggcggcggcggcggcggcgggatgtgggcaccgggtgtgggacgcagcagcgcgcgggctttggtcggtccaggggtcgttcttgcctcttctccttcacactgctcccacgcttttttaattgacaaaattcaaaatatagcccaattttttgtaatgccttttttggtgagaataacattgcctctaatcagggttctaagtaagtgttccctgtgatcaaaatcagttgtaaatgattgcctattaatggttatcattaaccatcattaaccattaatactaatggtaataagattttacacatttcatctttaaaaatgtcttctcatacagataggtattgccaaatactgctatcaatccaggagcatatgaaattaactgagcatattcatcacttggaaagcatttgtaaaattcttttacatttcttcccttgaaatttgccttttagcatgtcattattttaatcacttcttactgaaaattaggttgaatcacctcaattgcagttaaatagattttgaaacagggaaatttcctttgcacttgcacctaggtccctaaaaatgctgaactcagaaaatatactcactaaaatttgtgggaatggaaatcttgtttctttctctttgatagtatgacaaatgtgtaaggatattgtcatcaaatattgtgattcaaatatcgattgtcaaaatgactgtaccatatcaaagttgttttgccttgtgttttaggccattcttgcattgctataaagaaatacttgatactgggtaatttataagaaaagaggtataattggctcacagttctccaggctataggaagcatagcactggcatctgcttctggggaagcctcaggaagcttttactcatggtagaaggcaaaataggagaaggcacttcacatggcgaaggcaggagcaagagagtgtggggggcgagtgccacatactttgaaacaacaagatctcataactcattatcgtaaggacaccaccaaggggatagtgctaaaccattcacgagggccacatataagggctcacacctgtaaccttcacacattgggaagccgagatgggaagatctcaagcctaggagttcaaggttacattgaggtgtaactgtgtctctacactccagcctgggcaacagagcaagaccctgtctctaagtaaaaataaaaatagagtcaaagaaccatccagaatcatttcctttttaaagtgactatttatgtcgctttcaatgtccttaactctttaagcaactgttcttgccaaaggccagtaatcttaagtttattttctctggatatattcagctgctgcatccaaacataattaattcacaccatcaataaatggctttgcttggctaacaaatgattgacttagagacttactgttgttgcagcctcattttcattttgcgaagaaattctgctttgttatttccattttaaattttctaatttttctaacagttgcttgcctgtgagttgggaatactgtgatgagtggtttgtctggtaatgtcaatggttattcttttagcttagctatatagatgctttgtcgtctaattcaacatcaaaataattcacaccctactgtactttaaaaataacaacaaagtccacttttcttgttttgctataatagatatgctctggtaataaaaaataaaatgtgggttcatgtgatatacatggcactcaaaatgctgtcgttacaaccacatcagtgatttgtgatgtgtcaaacagcagtgtgaagtgatgacagtcacattcagtgtgtgttgcaaccactcaactctgctattgttcaagaaagcagctgcagtcctcacttcagcagcacatatactaaaaaactggaatggtacagagaagatcagaatggtccctgcgcaaggatgacatgcaaattcgtgaagcgttccatattaaaaacaaaaaacagctgcagatgatatgtaaacaaacgagcatggtatgttccaatcaaactttatgaactctgaaactcttaatttcatacaattctaatttttaaaactgatacataatagatgtcataaaattttcacgtcacaaaatgttcttttgattatttttcaaccaatggaaaacgtaagaacattattaggccacaggccatatgaaaacaggtggtgggacagatttggcctgcaggatgtagtttgcctgccccgttctaaataatttcattttttattacttttatggtgatagttaattggcagtaaaggagtagt

SEQ ID NO: 97691 - DNA, 58978 bp, Homo sapiens
gtgaattggctctctggaaaataaaggctgcagcataattcaatgttgtatactgttatctttagatttttaaagataatggaaaaagatcttcaataacccaaatgtagtcttcagacaaccccaaaccctcattttggccagcagcctagaaaagtatgaagtttgaccagactgataagcctggtcttaataaatgaagactgctttagaataggtggcgagaattggtgacgctgggttattcacctgattatggatagctgaatggaggctaagaccatttcctttgatatatgttagacatggccaaagcattcccaaccttgatgccaccttgacacttaaacctagcctaaaggatcttgagacctaccttattcttgaaggagtgtctgtcaagaatctgaaggcaagtgtgacttgaaggcgaagacgatcctttggtaagacaaaaataagacaaatagctgaagtttgaggagagggaaagcacagtaccttttagtctggtgatgtgaatcaactttccattcaagctactcaattcctcttttcccaccatatgttctatgatttctcagaggttcggaaatttttgatgtcatagttaagtcttagagaactggctctcaatcctgattgttcatgagaatcactgagtagttttaaagtgacaggtcctttggtcccactccaaaactactggatcagaatcttcaagaatgggctctggctaattgtggctttaaaagagttccacaggtctggcacagtggctcacacctataattctagcactttgggaggctgaggcagacagattgcttgaggccagaattttaagaccagcctgggtaacatagtaagacccccatctctataaaaaaatttaaaaaattatcctggtgtggtggcgtgtgcctgtagtccaagctacatgggaggctgaggcaggaggatcacttgagcccaggagttcaaagctgcagtgagctatcatgacacacagttgtactccatcctgagcatcagagcaagaccctgtctctattaaaaaaaaaaaaaaagaaagacttctacaggggattctaggtctaccaggccatactttgggagtaattaaatacctttagaagggttcctccagtttatgggagaaactgctgaatgatctttccaataagtttctctaaaaactaccagttggcatagttagttacattaatttttttgagatggagttttgctcttgttgcccaagctggggtgcaatggcatgatttcggctcactgcaacctctgcctcccgggttcaagcgattctcctgcctcagcctcccgagtagctgggattacaggcgtgcaccaccaagcctggctatttttttgtatttttagtagaaatggggtttctccatgttagccagctggtcttgaactcctgacctcaggtaatccgcccaccttggcctcccaaagtgctgggattataggcgtgagccaccgtgcctggcaaaatttttttttttttttgagacggagtcttgcccttgtcacccagcctggagtggcaatggcttgatctcggctcactgcaacctccatctcctgggttcaagtgattctcctgcctcagcctcctgagtagctgggattacaggtgcccgacaccacgcccggctaattttgtatttttagtagagatggggtttctccattttggccaggctggtctcaaactcctgacctcaggtgatctgcctgccttggcctcccaaagtgctgggattacaggtgtgagccaccacactcagcccagaaaattttttttgagacagggttttgctttgtctctcaggctggagtgcaatggtgcaatcacagctcactgtagcctcaaccttctgggctcaaacaatcctcctgccacagcctcctgaatagctgggactacaggtgtgtgccaccactcccggctaatttttgtattttttgtagggatggagattcaccatgtttcccaggttggtcttgaactcctgggctcaagccatctgcctgcctcagcctcccaaagtgctggggttatagatgtgagccactgcgtctggcctagttccatttttaaacctagagtttttctttatgagtgtcaaatagaatccacagaaagtgacataacaagctcactacacactcaaagatcaaaattttactttactgttgacattcctaatccaatgtagcaggtcttgaaccaaatgtttacatatgccatattatttcatcagttccacagtcgtatgagggattaccaccattttatagattaggaaacaactcaatggtgatagatagctaaagttacaaagctagtaagtgtttagcattattaatattaattgaggtaatacatgtaagcttgagtgcttatagtacttcaaatgctttacatgtacagagtaagtaactaggctataacttttaaaatatgcacaatagctccgtgaaataggaagtattatcaatatcatctttattttacagacaggataaataggatgtgaactcaagatatctggttccagaacctgggctctcggtcactaaatcataaggctcagcccactgtactcaactacacttgagccaaattctgtctgataacagcaggtaggcttttcgcatataccaagtacaggggaataagtgtttccaggtttcaacaatcttttggttcagctggctaggcagtattatatgaaatgggcagttaaggacagaacctgatttagatgtaaagtatgtggtatagaccaagtgttgtgggagttcggcaaaacctagacttgggactattgagctagatcctgaagattgactaggatttgggtaagcaagaaggaaagcatgcgtaagtgaagtcagagaggcagacatgaacatagcacattcacagcaggctgagaagatggtccccaccaagttggggagtatccattaaggagcaggaaacaagattagcttgggatgcagagtcttcaaccacactttcaggataaagacaagaaattcaagtgaggtggctcacaaaaatacaaaaattagccagacgtggtggcctgcacctgaagtcccagctactcaggaggctgaagtgagaggatctcttgagcctgggaggtcaaggttgcagtgagccatgatagcactactgcactcaagcctgggcaacagagcgagagcttgtctcaggaaaaaaaaaaaaaaaaaaaaaaaggaatgcaagaaagagccgctagaattacactaaccccacgaagaccggtgctatgctgctgctaagcttcctggatgttggcctcttactgtctgctccatattctccttggtaaaggtaaaagaccagtagaaatcctacaaattgctttagtaaaacctgggtttctttgataacagcaggtaattcaaatcttcatgaccaatatcacattacctcgagcccatagctttctagggacccagtctagtaaataaaatggaaggcagagtctatattcctaaaatgcaaattctaccttagagatatttgaaatttcatgcgttaagtgttgccatcttgctgcttcttttaaaaatacattctctttggagcatggatgttaagtttctttttaaaattaaaaaacatttagattcaggggatacacatgcaggtttgttacatgggtatattgtgtgatgctgagatttgggcttctaatgaacccatcacccatgcccaaatagtgaacacagtactcaagtttttttttctttcttgcctttatttatttatttatttatttatttatttatttagagacatagtcttgctctatcgaccaggctggagtgcggtgttgaactcctgggctcaagcgaccatcccacctcagcctcctgaggagctgggcctacagccatgtaccaccacaccaggctaatttattttattttatctgtagaggggtgggggaaggtctcacaatgttgcctaggctggtcttgaactcctggcttcaagcaatccttctacctttgcctcccaaagtgctgggattataagcatgagccacttcacctggccccaacttcttaagtaataatgctgatcagccttgtctctcttctcccactccctagaatttattgggacaatgggaactctggatacggaaaatgggaatgattaaaaacctgagaaaaggaattggcaaggtggtggaaatgaagagaactctttttgatttataatttttcctaggaccttttgctttgtgtcttgaaagaaagttgaaatagagttgaaaattttcttgagttacggagttaaggcctcattggaatggcaagaatattttaatgctaaaattcattcaagtctctaagatttaagggtgattactaatttcctctttttaatcttgattaatttggttcttcttcatggggcctatttcctaatttagtcttaataattcaacaaataaaccagcatatttattgagtgactactgtgtccaagaggtattgttctagatcagtgtttttcagaatggaatatttgtaccaaaacctcctacaacagtgcttatataagtacagacttctaggccccacaacagactcgcctacctaccaatgctaatctcagaggacagggattgatctgtttctcaagcatccataaataccatggtactagagcactggttctcaaacttgagtgtgcattggaatcacctggagggtttgttaaaacacagagtgcctggacccaccccagaattttggattcagtggtctggggcgggtcctaagaatttgcatctctaacaagtttccaggtgatgctgatgctgctggatcacattttgagaattactatgtacttcttgagaactactttgagaattattatgtactgtagaagtacaatgcactgtagtagagcattgtgagaaatataaaaaagtattagaggccgggcgtggtggctcatgcctgtaattccagtactttgggaggctgtggcgggtaaatcacctgaggtcaggagttcgagagcagcctggccaacacggtgaaaccccatgtctactaaaaatacaaaaattagcaaggcgtggtggtgggcacctgtaaccacagctactccagaggctgaggctggagaattgcttgagcccaggaggtggaggttgtagtgagcagagatcatgccattgcactccagcctgggcaacaagagtggaactctgtttcaaaaaaaaaaaaaaaaagaaaaaaaagtattaggtacaattcctgtcattaaggagcttatgctgtagttgggggagatacaacgtacactataaacatataacaaggaatatatgtatttgacaatataaaatataatacaatataatatttgacattgatggggtctttaggagaagatgggatttgatctgggtactaaaacatgatgaggccaaaggttcataggcattcttggatataaaagaaggaaaatatagaggtgtacaggggtggggtggtagatacttgtttatctagcttacagcttttaatttttattttttatagagatggggtcttgctatgttgcccaggctggtctggaactcctgagctcaatggatcttcccaccttttcctcccaaagtgctgggattacaggtgtgagccaccacgcccagctttgtctaggacacttatgggggcataagaccaaaaaggttggtgcagtctgtgaagagccttgaaagcctgtccttctcctcagctccacccacttcatagccttaccaaaagtgctgcacagccagaaagaggaagtctcccctgctgagtgtgcaagaggaagcacaagaaggctctgagggcctgtgagccataatgactgatttcacccatgagccaattgcagaggcaacagaagaccagtgcaccaaccaggctgggtccctccgccagagggtgtcaccatctaagctgaaagtgtytggggagatcagacattgctgtctggtgctcctctctcagtggccatcatgtctttgacatctgcttaccagcataaattagcagagaagctcactatcctgaatgatcgcggtcagggggttctcatccgtatgtataacatcaagaaggtaagcatgaacaatgggactagtactgattattccaacaataatagggcagggaaccctgaggcggcaggtgcagcagttagactcccacctttttttccactgcttttccactgactataatctacataatcactcagattatacaggccagccagttcaggaaggcagaagtggaggcttcttttcaaggcttcccctttctagatatgwttcttgccccaacgatggcatctgctttcctctggggatgggggtgagggtggggatggggaaacaacagtggtattccaagtgacttggataaaggtctggggtccaaccttctgggttttattatttattgttgatcctctacactctgaagagatctgaagctgggtctctggcaaaaacttttctgtggaagtgcttccctaaaaggaaaaaaaatagataattagstatttagattaaaaagggtaggtgtcttctgagctgctcctggggtagttcatgctgtggtggttgtgtgtgtgtgtgtgtgtgtgtgtgtgtgtgtgtgtgtgtgtgtgtgtttagaataggaactgaggaattgaaagaagctagtgacaagaggtgggctaggggctgggcaaaccataggaagtaaagagataaagacaggggtgtttatggggagttcctggcatagaaaataggggactttgggggagggagcttttgtgttttttgtaataaaacaaatcaccaggaacacggtttctctgtcaccatgaatcctgtaaatgccctttgggataagatacttacatagtgaacaaaattgtgacactgaatcttgtacaaagtctaactcctgagcagctgcttttcttgttccttccggcttcagttgaggggcggggaaacagcttcctctttgtgctggggccaagcaggcattaaactctacccatcaagacaaaatgcctaggttgttatttcgctcttagatacttggcttaatgtcttggaattttttcttgacctactcttatgctttttatttttatatttatttatttatttatttatttatttatttatttattttcggagtctcgctctgtcgcccaggctggagtgcagtggcacgatcttggctcactgcaacctccgcctcccgggttcaagcgattctcctgcctcagcctcccaagtacctgggactacagttgtgcaccaccatgcccagctaatttttgtatttttagtagagacggggtttcaccatgttggccaggctggtctcgaacttctgaccttgtgatctgcctgcctcggcctcccgaagtgctgggattacaggtgtgagccgctgcgcccagcctctcatgctttttaaattagttcccaggttgccttttcctaagacagattatgagaatgaatgttgcaagaagaggtatgtttctgaggaggaggagaaagggttgaaatatatatggtttctctctgcagacttgttcagaccccaaatctaagccacctttcttactggaaaagtccatggaaccatctctcaagtatatcaacaagaaatttcccaacatagatgtccgaaacagcacggtgagaacttggtccttctctcctttctctgaataattctctgcttgaatggctgaaattctcctcttttgatgcctctcttcaaacttggcaggggatggagtagtctttttttattaatagttttccaaggctcaaccacagggcttcaggttgttgtagagctttaagtcttgagcattttgagataagatgggattcttccagcataagctggagcgaatcatcaccccttttccattgcaagattcatgggaaaacattgtttttgtacaagacagctctatcaacccagcagggtacatgtattttattgtttctgtttcccactcactgtttccttgctgtttgtcttagatttctgcatctaatgggatatctctacttttcccttattaaatgttaaccctagatttttcacccatctttgtagcatctttgaattctgtttcttttgactttgatataaatagtatatctgttcatctgaaagggtgcttaaaatttcctctcatttagccctctgtatctagtcaggatcacatgcaaccattctacctagatagacaatctcctttgtttaaagaccttcagagcactgaagcgtttctaacttcctctgtcagtatatttcaactctctttctttttcttttcttttctttttttttttgagatggagtcttgctctgtcacccaggctggagtgcagtagcacaatcttggctcactgcaacctctgcttcccaggttcaagtgattcttctgactcagcctctcgagtagctggcattacaggcgcccgccaccacgcccagctaatttttgtatttttaatagagacggggtttcaccaggttggccaggctggtcttgaacccctgacctcaggtgatccgcctgcctcggcctcccaaagtgctgggattacaggtgtgagccactgcgcccggcctcaaccctctttaagaatgttttaggtataaccactgttcttcttgagttatttggatcaattgtcttattttgcacttttttattgttttgttttgtgtttctctcagcaacatttaggaccagtacatcgtgaaaaagccgagataattagattcctcaccaactactaccagtcatttgtggatgtcatggaatttcgggtgagctctcttgagccgtttccaatgtaggcaaggtctttcagaggctattctttctttagatgttcatgtatttgcttaaaacaagttcttgaaaaaatgagagagatgtactaatatggaaggatatctaagttgtattgttaaatgaaagcaaatttcaaaatagtatatgatacatcacatttctattttaaaagagtatgtatgtatatgtatttagtaaatatctaggaaagatctggactattttacattaaactgttaaaaataactacctttggggactgattatgactggcttcaatttagtaggctatgcatgttttttctattttaaaaattatggtaaaatacacataacataaaatttactgtcttaaccatttttaagtatacagttcagtggtactaagtatattaataatgcaaccatcttttcaccttgtaaacctgaaactctctaccctttatgcaataattccccatttccctttctttccagccccttgccatcacaattctactttgtttttgtgattttgactattctaagtaccttatataagtagaatcataaagcatttgtctttttgtggctggcttatttcatcagcctaatgtccttaaggttcatccctgttgtagcatattgtagaatttcctttttaagctaaataatattccattgtatgattatactacattttgcttatccgatcgtatgttgatggacacttaggttgcttccaagttttagctattgtaaatgatgctgctatgaacgtgggtgtacaaatatatcttcaaaaccctactttcaattcttttgattataaacatgaaagtggaaatgctggatcatatgataattctattattaactttttttttttttgagttagggtctcactctgttgcccaggctggagtgtagtggtgcaatcacagctcactgctgcctcgacctcctaggctcaggtgatcctcccacctcagcctcttgaatagctggggctaaaggcacatkccaccacacctggctaagtttttatattttttgtagagatggggtatccccatgttggccagggtggtctcaaactcctgggctcaagctatccacccacctcggcctcccaaaggctggactgtgccggcctatttttaactttttgaggaactgctatactgttttccacagtggctgtactcttttacattctcaccaacggtgcataagggctataattcctccacatcctcgccaacaattgytatttcgtttttttgacagtagccatcccagtgggtgtgaggtattatctcatctaagtttttatttgaatttttgctaatgattagtgataatgagcatttttcataggcttattggccatttatatatcttctttgaagaaatgtctgtttcattctttgaccatttttgaattggattttktgtgtgtgttgagacttaggagttctctatacaggttgagtattccttatggaaaattcttgagaccagagtgttttgaatttcatatgtttgcagatttcagaatatttgcattaggcagttgagcatccctaatatgaaagtctgaaatttgaaatgtttcaatgagcatttcctttgagtgtcwtgttggtgctcaacaggtttcagattttggagcattttggattttcgggttagggaagctcaacctgtataaactatatatctttgcattatttgagctttaaaaatttcaagtatttttccacaatattttatacaaacctactgtaaaatttctagtatagtacaatgaatattgttatactcttctcctggatctcctaattgttagtattttgccacattttcttatccttctctattttttaatgaactatttgagttagcctcatacatcatgacatttcctttcccaaatacttaagcatacatttgctaagagcaagaatattttcttacccaaccctaatataattatcatactcaggaaatcatacacaggaaatataacatacacaggaaatatatcatacacaggaaatataacattatgrctgggtgctgtggctcacgcctgtaatcccaacactttgggaggctgacggggatgaatygcttgagcccaggagtttgagaccagcctgggcaacatggtgaaaccccatctacacaaaaaaaaaaaaaaaaaaaaaaaaaattagctgggcatggtagtgagtgcctgtagtcccagctgcttaggaggctgaggcaggaggatcacttgaacctgggaagtcaaggctgtagttagccatgattatgccactggccactgtactccagcctgggtgacacagtgagactttgtctcaaaaaaaaaaaaaaagaaacaaaaccccacccaaactaatatacagcccatattcacatttctccagttgtctcaaggataatacattggatttagttatgtctccttcatctttaatctagaatgatttccagcctttgtcttgtatgacactgacatttttgaagagtctgggctagttatttttgagaaatccttcaatttgaaattgtcttattgttgatagtttttgggagcaatactacatggatgatattttatttgaattttaaataatgagcatgtattatttttataaacataaaaaataaaaattaatatgatgtttttgaaagaaaaattgataaggtattattaaaattttaaaaattaatgtcgtaattttacatttagaaatttgtcataaggaaacagaattgtttcatggggaaataaaaaaaggaaacaaatgcaaagacatatgtataagaatatactccattgcattatttatgatagttacaatgtgataattgatatatccaataaataaaggtttggttaaaagttcagagtatgtgcccacaaatgaatattctgtagctgttaaagtatacacacatatatatatatacacacacatatatattttttcttttcttttttttttttttgaggcggagtcttactgtgttgcccaggctggaatacagtggcgtgatctcggctcactgctgcctccgcctttgggttaaagcgagtctcctgcctcagcctcctgagtagctgggattacaggcacrtgccaccacgcctcgttaatttttgtatttttagtagagatgggggatctcaccatgttggccaagctggcctcgaactcctgacctcaaatgatccacctgcctcggcctcccaaagtgctgggattacaggcatgagtcactgcacccagccaataatatattttttatattaattggtatagaaaatgttcatcatatgttgtttaatgtaaaagcaaattgcagtaagacagtttaagacagatgtaagatgtaagatgtccctaaaatgtatatttacataggtaaatatgcatataaagaagattggaatttctgatcggtgggattatagtttaaaaaagctagttaaaattaaacttgtcggtattttctagttttttctacaataaacatgtattatttatgtattcaagaaataatgcaaattttagccctctgagcaacccaagcttgtggtggtgttatagtattttttcagatgatacaagaataatgtgttctgtgcctaccctaggaagcaaatccaggatattcagtagatcacatagtgaagagagaagtgaggacaagaaggactgtaatgtatgaacgagggtcaggtcagagagtattcattgtggaattgagagtagtggttagcaagagggtaggtgctggtggaggcagtgggaagaatgctggaagcacataaaaaaagtctcttactgagaaaagttgaagggcaaaggagattttagaacaccttctggttgctgcagtggtaaataaagttctgagcccaaggtgtttggtacggcttgtttaggaaaggaggggaaatagggacattgaagtatgatgcactgttaagtaggccctgaattagacagacttggtttcaaatctcagctttaccacttacaaactgtatgactttagataagaaactctttaaattccagtttccttatctataaaatgrggaaataagatttactgtgtgaggcgtctgtgagaattaaatgagataatgcatggacaacatctagcttggtgtttagcatatagtaaggcaatagaccaacacatgttatttccgttcccttctgattcttgtctgtagagaataagacctgcgtagtgacattggttgtgtgagtggctgaaagtgaatttcagctatattccactggaatttgggtgtaggctggagttgtagaaaggcattcctagcaaatgaggaagtatagacctagacagaggtcatgtagcatacagggaaaatcaaaagctctggrttcaagttctagtaccattccttactagctctatgatcttaggccagtttctttatttttctgcattcattcagcaagtatttatgatgtcaccyggctccccgccacattgcggaaacaagcatggagacggggcactgcctgcacagggcacattttgggggacagctaccctgtctggtgtgttaggcaagtttcttaatggctcttggccttggtttccttatctgttaatttagacacagcctttttttggaagataagtaagaagcacttttcctacacattttaataaattttgacaagtgtatatgcctgtgtaaccaccactacaaagtattgaatatttccatcaccccaagggttccttgtgcctttttttttttttttagcttcagccaatccctacccttcacttctggccccaggcaaccactgatctactttctagaatagatttttcttttctagcagttcaaataaagggaaactatacagcatgtattcttttgtgtctggctcctctcactcagcatcatgtttctgagattgatctatgttgttgcatgtatcagtgattcagtaccccgtcctccctttttttttttttgagatggagtttcactcttgttgcccaggctggagtgcaatggtgtgatcttggctcactgcaacmtctgcctcctgggttgaagggagtcccctgcctcagcctcccaagtagctgggattacaggaatgcgccaccacacctggctaattttgtatttttagtagagacggggtttctccatgttggtcaggctggtctcgaactcccgacctcaggtgatctgcccaccttggcctcccaaagtgctgggattacaggcgggagccacggcacccggcctcagtccccctttttgctgagaactattccattgcatgggtacaatttatttatccatttacctgttgatagacatttgagttgtttctagttttaggccattatgcgtaagttgctacaaactttcaagtacaaatctttgtggggacatatttttcatttcacttgggtaaatctagaagttgaattgctgaatcatatggtaagagtatatttaattttataagaaaccgccaaaccttttttcagagttgttccattttatcytcccaccagtaatgtatgagagcttcagtttctctatattctcatcagcacttgctattattagacttacattttagttattccagtgggtgtgtcatggtatcttattgtggtttaaatttgcatttccctgatggctaatatcattgaacatcttttcatgtgcttattataaatatatatatatattttgagacagagtcttgctctgtcacccaggctggagtgcagtggcatgatctcagctcactgcaacctccgcctctcagcttactgcaacctctgcctcccaggctcaaacaattctcgtgcctcagcctcttgagtggctgtgattacaggcatgtgccaccacacccagctaattttttttwtttttatttttagtagagatggggttttgtcatgttggccaggctctcttgaactcctggcctcaagtgaacctcccacctcagccttccaaaatgctgggattacaggtgtgaaccgccatgcttggcatcatattttttttatggtattaagtgcctgttcaaatcttttggcaacatattaaaaaaaaaaaawatatatatatatatatatatatatatatatatattccttmatctatcaattttacttttttagaaatgaaagtaccaatattcagtggagaaggctaggaastaggaacaaaacgaatcagtggaagaaaggctgaatgaattgtggtataccatgggctattatgcagctatgaaaaaggatgcattcatgctctaggagataactctgagaacttttggcaagtaggagtgaatgagcaaagcaaaattacaagcagggaatattacctcaattttgtaacacaaataatgaccaaaaaacctgtttctctctctctcttttccttttataatctaatagtattatataaatagggagaaaaataagaaaatattataagaaaaataatatcaggttgctaaagtggtttacctgggcgttctgcaggatggagtgtgggtgctgatgttgggggaaagaagtgtctgcaataaaagtgcatattaatttaggtaaaattatgtgtgaaaaggagaagaatccctatcatactagaatgagagttaaatgaagtatatgcaaattacttggtaagtacctcacacatagtgaattgtcagtaaatagaaactcatggaaaattagacagtattcccgtttgttaataattaactcctgagaacaggagatagaatccaggaacagacttacttcgtggtttgtcaatacgaatcgtttgatttttggcatttttgaagctacctattagataatctacattttacaaccttttttaatttggaggaatggggcatagggatgataagctcaggaaaagtgtgtgtaatgtaatagagacttgtgcctgtggaaatgtaggcatttggcagtgtaggtcataggggcccactggtggcttactgaggaggaacttcctccctctttttcacagtgacttttctctgttacttggtggctttctaggacctctaagggagaggtccctttccctcaagttctggtagtacgtcaccttctctttgattttttattaattcttgtcttcacttccacccccaggatcatgtatatgaacttctcaacaccattgatgcctgccagtgccattttgatatcgtaagaacctttgcaattctcttctatcgtagagtcaaagaaaaggccaggtctaggttgggaggtctaggtctactcacaggatggggtgggaagggactggaaggatggctattttgtttattccttctcaggactactataattgttttgtaaaaagtgctgaagtgaaaatatatttacatgttaagcagatcagcaatgtgatttaattaattaaaaaattacataaaaatcttcttcaccttttccatctcctaaaagctaccttatttcctggcctccttgtatattgagctcacttttagcccctgacttttgttccaattttcttattcttcttttcaatcctgtcagttcctacttctaaatagattcactcrgaatatattgagcactgtccagagtggttggggaaagaaggagatccaggttaattggccatgctgtccttgggttcctatgtattttccttgtagaatctcaactttgatttcactcggagttacctggacttgattgtaacttacacctcagtcattttacttctgtcacggattgaagatcggcggatactcattggcatgtacaattgtgcccatgagatgctgcatgggcatgggtgagttaaggcgagagtattatatgaagagtctcatacatggtgctatgatgtagagagtccctcatgcaaaggaaattgatgccatgatttcttatatgagaacctataatctacattgacccaggcaaaataaggtacacttttacatattcagttgactctgaaacaacacgggtttgaactacgcaggtccactttatacatggatttttttcaaccaaacatggattgaaaatgtagtgttcatgggatgtgaaatccacccttaacagagggctgactttttaaatggtgtgggttccgcagcactgactgtgggacttcagtatgcacgggatattggcatacgtgggagtcttggaaccaatctccctgctataatgagagacaactgtggctaactcttgaatatctgctagtggattattcaatttgcatcatctctgaacaatttttaatcctggactggcttctactctgattttcaggttattacaaaaggcaaagaaaattctttttagtgttggtaggaataatattagtaaggtaaatccattagaggtaactaatgcgtgataatacatttgaagccaaatataaatggattttgaattgtctgcagttctgtccccctccattagtgcaaatgtaagtatttaagggctgaaaaaatgaagactagagggatcagagtgggttgtggcacatcattctatgatgatgtgtattcccacatgcctacgtggatacctagacacatgccttacctgttagctttgaatatttatatatccttttgggttgtataacgatttgaatctaggcatattactggattttgaactaattaacagatttatagagtacctatcatgtgtccaaccctatttttgtgcttataaggaagaaaatttcatggacctgcccaaaatgaaatggttctatttagccatagcttagtaacctgatcctggagtggggtatctttayatgtaatttacagtgtagtatgtatatctttggaggtggtggggagtgccagcctatgcacatatctttatcctatatgcaaacataagagttcaagtcatgggtaagggagggctgtaacccctctcctctgctttcttctagtgaccccagttttgcccgtctgggtcagatggtcttggagtatgaccaccctctgaagaagctgacagaagagtttgggcctcacacaaaggcaagttccctgacaatggagaattcctcaggcaaaagtatattgtcctcatgattgccgctaaggtttcatttgcttttccccacaggctgtgagtggagccctcctctctttgcatttcctctttgtccgaagaaaccagggggctgagcagtggcgcagtgcccaacttctaagcctcatcagcaaccccccagccatgattaaccctgctaattcagatacagtgagtgcccttttccttttgttagtggaagcattctctttgccaaggccatcatctctgtagagggtgcttctttcaggaaatatcagtactaaagaatgctttagtcttcttctagggtatgtctctaagttgagcacttcttgtagctaaaaaatcatggttggtttggggcttttgtttggatcagggttagtggtttaacaaaagtgatctataagcagttagcctgtccatagaaggaatttagtaaatattcatagaatgaatgaatggatgaaacagagtcattaggcacctattaagcctagcagcaacttgattttaggaatcaattaacttatttttatttttttgagacagtgtcttactctgtcacccaggctggagtacactggcatgatcactgcttactgcagcctccacctcctgggctcaagtgatcctcccacttcagcctcccgagtagctgggactacaggtgtgtgtgccaccatggttgactaattttgtttattttatttaattttaatttttatttttgagacagagtctcactctgtcgcccaggctggagggcagtggcgtgatcttggctcactgcaacctccccatcttggttcaagcaattcttctgcctcagcctcccaggtagctgcgactacaggcatgtgccgccacacctgggtaatttttttttttttttttgtatctttagtagagacagggtttcaccatgttggccaggctggtcttgaactcctgacctcaagtgatctgtgtgccttggcctcccaaagtgctgggattacaggcgtgagccaccgcgcccagcctgtttatttttttgtagagacgaggtatcactatgttgcccaggctggtcttgaactcctgggctcaagtgatcctcctgtcttggcctcccaaagtgctgggattacatgtgtgagccactgtgcctggccaggaatcaattaattaataaatgtttttgtttgatgactgtgggctcaaagtccttccctcaaagaacttatagtctggtagggaacatatgccatgtagtcacaaaaatacaactgatggtacatgattagtgataagtgccaaatgagtgatttacattttaagcagtaaaataatccaaaggattaaccatcacagggagaaatcatgagaagatttctgagtcttgctctcttcattttattgttattaaaaatatctgaactgttgaagagaagttatgtgaaaccttttgcttgttctgacttctagtccaagttcctctttattttctcaactgtattgtttttcccttactccacttccagtgcctcatcacctccattattggcaggcttccctgctgttggtttatcaatgtgccctaaactagtctggtaaaataaaagttagttttttaaaaaaatttagagacagggttttgctctgttgcctaggctggagtgcagtggtacaatcacagctcactgcagccttgacctcttgggttcaaaagatcctcctatctcctcctcctgagtacctaggactacaggtgcacaccgccatgtctggctaatttttaaattttttgtagagacaaggtcacactgtgttgcccaggctggtcttgaactcctggcctcaagctatcctcctgcccctgcctcctaaagtgttgggattaaaggcgttagccaccaccccttgccaaaagttagttttgatactcagatcctagtttgtcctttctcctttagaggaaggccaagttaaataactgatcatctttgcttctcttctcacagatggcctgtgagtatctgtctgtggaagtaatggagcgctggattatcagtaagtttagtgggattagatgggagtggatgaagcagtatgttatatgaagaacaagttctaaaagtcttcctctgcactgttttcccacctacagttgggtttcttctttgtcatgggtgcctcaactccaatagccagtgccagaagctgtggaagctgtgtctgcagggctccctstacatcacccttatccgtgaggatgtgctgcaggtgcacaaagtcaccgaggacctgtttagcagtttgaaagggtgagagacacgagagccaaactgatcttccttgaatagtttttagcccctccaatatcctttttcagtctccacaagtgttcccagatataggtggtaacgattaattctaactattgaagaaatatacattaaatacctactattagctaagtgcttcactgggttttagggacacaataatgaataagacaacatggaggttaagagcacagactctgaaactagattgcttgggtttgaattcaggctctaccactagttgtgtggccttgggcaagttgctcaaatttcccatgccattacctcaatttcctcatctataaaatgtggataatagtagtacctccctatggcctacctcatagggttgttgtgaagaataaaagtgttattatttgtaaagcaggtagaaaagttcctggtacattgtaagtgctatgtgcttgttaaagaaaaaaaaaagacagttactgctctcgaggaatctatgaactggtagaaaataaacaaattgtttgatagagtaagagattataatgtgtaaacacaaagtactgtggaagcatttagaaggacacttaaactggcctctcaggatctagaaaaacctggagacaggtagatctgaaaggctaaacagttgaagagtgtgtgtatgtgtgtgtgtgtgtgtgtgtgtgtatgtgtgagtaattgtgtgtgtgtgtgtgtgcctgtgcattgggtagaaaggtaggggagttgcttgaggcaaagaaagatattctaggcagagaaactatcaagatttttgaggcaacaaagagcatggcaagttctgagaagttcatgtagttcagtgcatgggcatctgggttataaaaatgaagatgttgaggatgaatttggagaggtaaattaggatgttgtatgctttgctatggagtttgaatccatcccaaagaggatggggaactattgagtgatttcagacaggggagtgacatgatcatatttgcattttagaaaagatcattctggctgcatggaagaaaagaaattagatgggcaaaactagaggcagagattaattaagtaaattagaaggaattgaggatgatgtcgaggtttctggcgtggatatctggtattccttaagataagagagcatgtgataaaagtaagtttgtgggagaaagattgcgtggttagttttaaacaggttgactttgaaatgtctgtgggacactgaagacagatgtgttaggccttctattttatggttctggaacttgggagtgaggtctggattcagataaagattgctgagttggtagttaaagccagaagagtagttgagattactcaggagcacatgtggagtgagaacagaatgggaaaatcctctgtgtatgttgatatttaagggccagagaaatcagtgggagatactgaaaagaagagggaaaagagaagccaacaaagaaagcattcctagaaggaaggaccagtgatctgttagacgatgttgggagatcaaataaaataagaattgaaaaaatgttcattggatttggctctaaagatggttttagtgcccttcttgtgaacaatttgagtggtgaagttgaaacctgggctgcagtgagtttaggagcaagtgagagatatggaatttaataaacagctctttcaaagtttgactgtaaagggaagaatagagagaggtaaaatgagaaggaggagtgggtttaaggaaagggtcaaaataccaattttttttctggttgcaaataaaacatccagaaatgtaaaaagtgcaaagtggaagttgactacactatcacctcccagaatagtttgatgtgcatccttcagatgtgtgtgtgtgtgtgtgtgtgtgtgtgtgtgtataaacacataaagatggcatgtattttcaaccttatgaaagtaatttttaaaaagcaatggagccacactctatattatgttctatggtttgcttaaaaaaacttactatgttttggatatctttgaatatcagtctatagagacttattatttttaacagttgaataatattacattatgtggttgtaacatartttatttacaaaatcctctattgatggatatttaagctgtttccattttaaaaaatcattgtaaacaatgctgtaatgaacattcttaggcatatatctttgtgaatctgtgaatatttttttattttctttttttttttgagacttgagttttgcccttgttgcccaggctggagtgcaatggtgccatcttggttcactgtaacctccacctsccgggttcaagcgcttctcctgtttcagcctcccaagtagctgggattacaggcatgtacaaccacccccagctaattttttgtatttttagtagagacggggttttaccatgttggccaggctggtcgcaaactcctgatctcaggtgatccacccacctcggcctcccaaagtgctgggattacaggcgtgagccaccgcgcctggccttgaatctgtgaatatttctataggctaaattcttagaagtggaattgctgaagtaaagggtatgtacatttcaaattttaatagctcttaccaaattgtgctctaaccagttattatcaagagcctataagaatactgatttctcacactctcaacaactaagtattgtcattaaaaaccattgccagagttagaaagagtaaatctgagattaataattagaagttacaggaggtggatttgggcatatgcatgaaaaaactttctratgattactgcttctaaggaatggaagagatgttcgaagggtgttcagttctccatcactaagagcagcaactaacttgtgtgatttatagtttagggagttctttgacataaatgatctaatttatcttcatgaaaattcaagaataagtattaatatctttttttataaatgagaaaatggaggctcagtctcagtgtcactcaataagaggtgaaattaggacacaattccaggtttctggactctgaatcttttctctttccattgtgctatgcagagattaaaataattatccaatagattgctgtgaagttgaatgttgatttaattaagatactttccaacaccaaacttctttgattttgtgctagttcaataaagtagtggtttggagaagggaaaggagaggtgatgaagtcccaataatgtggtggcaatagtgatacaggacaagagaaaacaaatrtaaggaacatagagagcaaagagtctaagataatgctgggattctgagcatgggtcactagtagaaaaaaagagatgtggttaggagaatcaaatattgcagaaaattaaaaacaatgaaaaggccttctaatttggtgattcaaaagttcacattgactttagagagagcagttgcttagtgctgaaggctttgtgggattcaagggtcagtgagaggtgaggaagtagagagagtataggtgtctctttagagaagtttggtggtgtgggaaaataarcagaattcggtggattgtcagggtcaagcaaggatcttcttagaatamgggaggctttgaacttatttgttgggagaagagaataagccagtggagaaggagagattaaagtattaaatagataactgatacagtgaaattctaaaaggaagttggtgggaatgggacccaaggtagagattgagtaactacttttacttgagagcagggcctgtgttgtatttatacactgctccctttaaccccctcaaacctggaagagtaccttgatttgaaggagtcaaggcaggagcacaggaagagaagtctagccccacctttgccattaaagccctatgtgaccttgacaagtcatttcccttccctaggtattattttctgtatctgtaaaattatgaggtagagttgaatgatctctaagctgtgagtcttttattaataggctagggtgagaagtagggtttggaaagatcctgcctgtgagggctgcccatgctcccaccagggtataggctggactctctgaggactgggaaggtgaggcaagggccctaatrggtagcatggtcaaccccattgtgcttgtgtcaatcctcaggtatggcaagagagtggcagacataaaggagagcaaggaacatgtaattgcaaacaggtaaagggtggtgaatgcactctctgagaggggatggaataggaatctcttctcacttttgttctcacctaagccatccttwgtttctgtacagctttattgcctcaacccaagaacttgctgctaccccataaattcttttttcttttcttttsttttttttttttttgagacagagtctcgctctgttgcccacgctgggtgcaatggcatgatctcggctcactgcaacctccatctcctgggttcaagtgattctcctgcctcagccttctgagtagctgggattacaggcacccaccaccacgcccagctaatttttgtatttttagtagagacagggttttgccatgttggccatgctggtcttgaactcctgacctcaggtgatctgcccacctcggcctcccaacgtgctggaattacaggcaagagccaccactcctggcccttttttcttttttaaaccaagtctaacttgagcattgaaccttccttctgcctgatatcccttcctaaatatagctttcttctgtgctgcctgtggagggtttttaagggtgggagaggtgatagtcatgttccccttttcttccttagtggccagtttcattgtcaacggcggcaatttctgcggatggcagtgaaggagctggagactgtgttggctgatgaaccgggactactgggtcctaaggcaagargaagaaatgttgggaggggaatgatggccagtgataagagactgtgtagctacrtgrcactcacgagattttgcctttctgagtcttttgtcattcatttgtatgtatatatgcgattccctkgaacattcttggagtatcccaaaaccttttgtatctctttttttggcactatacgtagtatgtggtgtattaagattacttttatacatgtcttatcctctatttgagtgtgaatgaattggagacagagcttgtttttttgtttcaaaccacataaatgcccagtaaatatttctaaaactttatttgatagggagagaagggtactaattgtgagccagtgtcaacatgtgtacctgcctgattgtgtgttctgtagttgaggttttttggtgagtctgaatgtttattattcacactgttgtggctacacaattacatccatacctatattatcatggtagtttactctgtgctttgaaatccatttttaaagttgaaaattctaatagtctctaccccctccataggctctttttgctttcatggccctgtccttcattcgtgatgaggtcacctggctggttcgycacacagagaatgtcaccaagacaaagacacctgaggactatgctgactygttagtacttgacatggctaagaaccttgtccttagatggactggggacagggaggcatcagatgaccttaggaggtctcaatttctgccctgatatcactgtgtttgtctcagttcatatttctagtcttattcatctctgttctcatcctaaactttataggagcattgcagagctacttttcttgttggaggggattaggtctctggtccgaagacacatcaaagtgatacagcaataccaccttcagtacttggcaagatttgatgctcttgtgctcagtgacatcattcaggtatgatatttaattgattatactttggaaatttcaggatgatccytagtgattttcctattgaaaccactctggctgaatctcatgctctgtaagttgggtgtcaaaaggtccaatctaggctgggcgcggtggctcacgyctgtaatccaagcactttgggaggcctaggcgggcagatcacgaggtcaggagatcgagaccatcctggctaacatggtgaaaccccgtctctactaaaaatgcaaaaaaaattagccrggcatggtggtgggcacctgtagtcccagctactcaggaggctgaggcaggagaacggcgtgaacccgagaggcagagcttgcagtgagccgagatcgcgccactgcactccagcttgggcgacagagcgagactctgtctcaaaaaaaaaaaggtccaatctgccccttcatatttgttaaaagaaaaagaaaggactaataatctcagccgtctttttttccccactaagtgaaattacatagaaataggagagaaaaataaagagaaactggatgttagaatggcagggaacccggaaagtttccttcatctcttgcttggctttttctctctgtttttaacacttagcaattctttctaccttcatacgctgactgagcctcatggtcctagtttctgtcctagggaacctgtgcccacttgacagtaactgcagctccttttttagaacttgtctgtgtgtccagaggaggagtccatcatcatgtcctcattcgtcagtatcctctcctctctgaatctcaaacaaggtaactggagggaggtgggggaggcaggacatatgtgaggatgaacatcttttatccggaaatattgatctttgagccaggaagtaggacaagatgtttttgaagaggatctaccattctatgtagttggatattggtgtgctgtttattgtttccttttatacttccgtttttcttgcagttgataatggagaaaaatttgaattctcaggattgaggctggactggttccgcctacaggtaatgatctgttcctgttaaagattctcatcctcagattcttcctcccccacaatcccttctctttttatctcctaaatttgctttatggagtgagtcaactttgaaaactgctaattggacaagacatactcaggccaaactgtaattccaaggctgggggcctttttcattcatcttatttttctccacactttcccaactccaaccgcaggcatacactagcgtggctaaggcccctctgcacctgcatgagaaccctgacttagccaaggtgatgaacctcattgtcttccactcccgaatgctggactccgtagaaaaattgctggtggaaacttctgatctgtctactttctggtatgtcttggytcagagckctctttaaaaagttttattgtttccttttttcatttttttctccattatgccacttacttcaaagaattttgtttaattttttttttttttttttttttaaagagacagatctcactatgttgcccaggctggtcttgaactcctggcctcaagcaatccccctacctcagcctcctaagtagctgggattacaggcgagagccaccaagctctgaaccagagctcttcatcaattcatttgctctcttgcctggcctctgcggaggactgtcattcccctagacaattggaaagtgttgctgtttttgagatctccttaaggtgctcaaactccgcagctcacttgtgtcagctttttaccaataatcttaagtgataggaatttgaagttgattccttttgttctgtattcycttttgttcttttgtggaaagccatttggattttacatagtcttcgcttctctggggtagttagcccatatgtctagtttcaatctcctctctttggaaacgtcttcagattttttttttttttttttactctaggaacattgtgatttaaaagaaacaggaaaaactttgagttttagtggacaggagtgaaaataagtgagaggcctagagaatagggactttggagaatgagctgaatgagtttgtctttcttagatagcacttgacgtttttaggtgaccactgttgtacataattccaccctttgaaggatcaaacaaggagtatgtagcttactcattcattcaacaaaacacaatgtgttgtctctgccttctgtaagcaatgtagttggggagatataatacctatatgtgaaaaggacatcaacatagtacttgcaaatgtaagaaagtgtaaaagagtacatgaagttgagaggacatgggttgaggaaagatcagtctcatgggattaatttgagaagattttctggagcctgagtgttaaattttgagaagaatgtgaattaacactactgaaggacttctaaattagggggaatggcccaaatcatgccaaggttctaagggaagaatagcaaattttgtgcaaggaaagggaagaagattatcattaaacttgcctggggtcctttataaaagtctggaaggattaagtttcttgggttccgttctatcttaagggttacagaaattaaggagrgagtggtaaatatcggtaaatgttttttgaaagaatgaatatcctctccgcctcaaagggactagctcttaaactctatttttcttttcctttatttttcactcaccactttactaataaggactaaatcttgatttaaagtcttcccgtttctctgcagctttcatcttcgtatctttgagaagatgtttgccatgaccttggaggaatctgccatgttgcgttatgccattgctttccccctgatttgtgctcactttgtccactgcactcatgagatgtgcccagaggaggtaggtatcctgatctccagaccctgtcatctttctagtcrtcatccttatcacccaaaacacaattccaagggttgattttggtcccagaaagggtataaacatagatgtatgatatgagtccctaaatatctcagcttgatgtatcctgtctctgggcctcagtttcttcttctgtaggaatgggtaggaatcttctgtaagattcaggcaagggatgagagcagtattgtgaggaagaagtggccgtgctggtgatgacagtctcttctttggtccctctttcccatagtacccccacctcaagaaccatggtcttcaccactgcaactccttcctggaagagttggccaagcagaccagcaattgcgtcctggagatctgtgctgagcagcgaaacctgagcgagcaggtagactcagccctctctgtttcactctcccctctgccagcgctcagtgccttcccctctatctaactttgtttccctctcagatgccaagctcagtaactctttctctgaagtagggctagggcctttctgtacttgagtttatggcagaattcttttcttagtgtagtcccttcagtctttcctcccttaggactggatagaagtgtctaaaaatactcttatttgaacagctgcactccaacaaaatctgtgctctcacttgaagagttctgagagatgagttaactttctaatttacccctcctctctttgccctgcgtacacatactaaggacagtggcccccaggtcacctgtcttatctcatctttctgtctatctgcatcttaatctgtggctctctggacattttgaagcacctcttctgtgtttatcctcaaggctgctttcttgcctttttcttcttatttttcccctctcctcccttgactgactcttagcacctcgtcataattagttcaacctaaatttcagaaaatttgaaaatgagaaacttgttttgctgttgccctggagtcttctgggttttccagactacccacctttcctgggtttgagtcaggcttggtaaaggggagtgtgtgtatgtgtgtgtgtgtgtgtgtgtgtgtgtgkatacagatgcacagttacattattacttaacctttttatttttcatatgcaaattacatacaatggggataaaaatagtttctttacagaagtgtcttaaggattaaatagggtatatttaatatttgacataaagcactcaataaatgttacctgctatattagttggtacttaccgggcacaaagccctgtgctgggtttttggggacccagaaggaaggtacacaattcctgcccttggggaatgtcccagtttaagagaaaagggagtataaatacatgtttgaaagaaatttaaataattaatgcaagaagatatgcaaatgagtacaattgcaggtatattcattactcaatatgcttaatctcagccaaaaggctgagaaagccaagaagagatcatcagtcaatatgaataactactacttgcaagaacactggtaaagagatttgctctgtgctgtcgtctcagggatgactaaaacatgatgcgaataattttcacacatacagaactttcgcaaccaaatgagtataggctttctaaagttaacattctgagtaaataattactggcattgccattactagtggaattacatattttggaactgctttcagaatctgctacagacacataatcttttgcacaatctcagggttgacacatctttttccatcaaggtggacttgatttttttgaaacagccaagagtttggatttaaaaaaagaaggcacgactaaaagtaacaaaactggtttccttgtgtgggtcttatgctgctctcagagtgatttcaactgaggagcttccagacatgccctgctcatgctcagcagctctggagtaaatggagagaattccagtcaccctgaaggagatgtctgactaggatgtctgagtgaagacaagagatgccaggttgatgtttaagctaattagcaagaaatatgctacttaaaaaaaaagtggaaagacaatgctggccacattgtgaactccaaatctttggagggctgtggtgatgtgggtaactgtctcatgagatagaataggaagggatgtagtatgtgagatgattgtcccatctagcaaaaaataactgttttcctacattggaagaccctgcaaagcacaactgagtgggacttttagatcttgttctttatacttgagtttttccattaagaaaggttctctcaggatgtgggtgtgggagtgaggctctgatcccagaaagacactgccatcttgagacttagagcctgtacacacagagatatttatgaaaactgaaagaggtgagcacattctgaataggcccccattaaagaaagaggtgtgtggaaggaaagagagaggaaggcagaaagataaaataacagacaacaatggacaacaacctttttataactgtcaggtgccgttttagcaacaaatcccctttctccatttacctgtgtttgtttctgaagcttctacctaagcactgtgccactacaatcagcaaagccaagaacaagaaaaccaggaagcagaggcagactcccagaaaaggagagcccgagagggacaagccaggagctgagagtcaccggaagaaccgcagcattgtcaccaagtgaggacctgggccctagatggccagctgggtactgcatcaaagaaggcaggaaaggaaagagggaaggtgacacagaaagaaaagagcgcaagtcatggtggggaatgaggggcatggaaaagcacttaaatgcgaatttcctactttgcctttgaagtctacatcaatgtgtactcttctaggctgagtatccctagaaactgggtcatgggcccaacacgtccttcctagacattagcaggcagtgccagacctgtaatccaggctcattttcctttctagcatggacaagctacacctaaacttgacagaactggcactgacaatgaatcatgtatacagtttctccgtgtttgaacatactatcttcccttctgagtacctcagcagccacctggaggccagactcaacaggtatcactctttccttgtcctctgtttggacagtagtcttcataccctaccatatacctctatgtgtagtatggtggtcctcaaagttgggtcccattacattcatcctggtggtcatgccacacggtggagattctgttgcagtcagtctagcataggtcccaagcatctctattaaaagcaaacaaaaggaaccccaaacctctataggtggttttgatgaacaccctaaattgaaaccactggtttagtagaatgagcaaggcctttgcagtgagcagacctgtgttgacaacctggtcattagctaagacattggagcagatcgtccaacttatttgaaccagtttctttccttgtaaagtaaggataatggtatttaccttatttatggataattgagaattacccataattgagagttggtagagaattaaagttagtaatgagtgcaaagctcctgacatatgttaggctttaataaaatacatccctagcytccactttgcgcttcactccattgccccataaagtaagatgcacattggaattgggcactacagtctgcaagtgggtgaatgggaggaagaattattatgaataagtctcagcacttctgtgttttcttttggagtatgtagcttattcattcattcaacaaatgtttattgaacacctgctgtgtgtcaggagtattctaaaagctgtttatacagcaatatacgaaacaaataaaaacctctgcctccatgcttacttctagtggggaagatagataaacaaaataagaaagcagaatacgtagtagattagatagtgataaggaccaagcagaaaaataaagtgggaaagggagataggaggatgtgcggtgctggtggtgctggtggtggcagaagtaggtgttgcagttttagatggagtgtccaggaaaggcctctttgagaaagtaacaattgagtaaacctgtgaggacactgagaaagccacgcatgtaactactggggaaagagcattctaggtagaggaaacagcaagtgcaaaggctctgaggttcgaacatgccttctaggttcaagggacatggagaaagacagtgtgtctgcagcactatgagcctgggagagactggtaggatgtaaggtgagggaggtcagaaaagtggcagattgtgtatgcgcttatatgtcattgtaaggacttcggcttttattctgagtgagatgggagatggggagccttggcaggttttgtgcaaagctgcaatgattagacttgactcaatattttactctggctacattagcgggggcaaggacagaagcagggaaaccagttatgaatctatgttttgattgtcagagaagcaaatttatttttcaattgaggtttttgcttgggtgaagttaaattagtttgttttcattacatacacgttaactataaggaagaaagtgtctcagttgcatacacaatgtcaggaagatgacagtttgataatggcccatgtgcaagccttcagatgctggtggtggtttccaggccctggagcagcatgagtgtgacattcaagttttacccgaataatctctgatacttgcttcactgacatcattgttcccaaagccctaaggttggcctagaggtttggcctcagtgttaactctaaattagatcagtcttgcccttagtctgtcccttctgtattatcttccyttaagtggtacttgagaaccttttccctttcatttgtggagcagaccagccccacctttcccatcccctcccctgccataagcattttgccaaaaaacacaaaacaaacaaaaaactacctctttcctctgtggtttacattttaacaaggaaaaaagtccttagtcagaggactgactctaattgtgaaatctcagatacttgggggaggtattttgaaaggagttgggggtccagtggtgaggggtcttgctggtgtgcccctacaataatatagtgtggatagttattctmccctctctaatgttgcctatagctgcatgccagccacgcatgatctctattcagccctggcgtgccatggctactcaggattataatatacttccaaggatttctaagcatggttttccatttctggcagtgatcggaactaattcttttcaaggggaaaagataaatactttcactgggaatgcagagggtgtgaactgtcaggtagagttagatggaattagagagcccaggtcttctactacctgagctatttctccagaggaggaagaaaagcacagtaattagggatcaaatgttactggaatcaagtcccagctctgccactgccagctgtgtggtcgtcagcaatgatttattatctctgtgtctcagtttcctcatctataaaaatgaggataataactgtctctagcttattaggttactatgaggtttacatgagataatatgtgtagtaaaakcctagcacagcacctggaacacaatatacactcaacaattgttactgtatttgccattatgattgtaattctaattttttttttttaaatcacctagagccattgtgtggctggctggctacaatgccacgacccaggagatcgtacggccttctgagctgttggcaggagtcaaagcatacattggtttcatacagtcactggcccagtttttgggtgcagatgcttccagagtcatccgcaacgccctcctgcagcagacacaaccactggattcctgtggggaacagacaatcaccacactctacacaaactggtcagtgttgcttaggcttttccactgccttacttygtgttggcactttttcctttacacrgtaggacctcagggcccgagcattttagctcccagggtcatagactccaaaatggagggttgcttctccttsaggaatggagcaataacctgagacaagcccagatccccttctgtccaccacgaagtttccttctcaccctcactggaacatccttcagcctaccctgcagttatttgaccttttcyctctaatatctagttcttaacctttcttttttggattcttactgtttcaatttcaaatgatctctcttcctctttccaaagttctcttatttctctttttgcccttacttctccttctgaaaaccatctgcctactaccatctctctggaacgtctccttgtccccagatgtgactattgttcttaatagagaagggagcctcctccctgcaactggagaaggtgggaatcagcactgtttcctttgacatgttaaggaatggaaaggagctggatttctacctccccaagccactgggtggcgctcttaacccaaaatcagctcagtaggcgacaggctgcaaagaagaaccccccagaacaaggggaaacaaagtttgcaaatgcaaatgccagttggggccaggcaggaaaggtaaatggatgtgccacatgggccaggcagagactttgaggaggtggtgagagaatacccctctaaagggaacagccaccgcttagctccacctgattgctgccctactaaatccttatattttatgtaaaaatctgtttcaaaattttgacaaagaattttccataggtgccagagaaggtgattcagcccctcttcccctgtcagccgtttcagcgtaaattcaaaggaaaaaaaaagtttgactgggtttggcccactgacagttagcttgtgatgtctattagatacagacccagagcaagtgcctgggagaggcgggttggtcaagccctcctctacccacattggctgtagcccagctcctttaagtttgcccagaggtcaggaggaaatatttggagactgatgacctgtgctcacaggtacctctttgcccaggaggtttgagagtatatttcaaaggagtctaattaagtagtgacttttttcttgccaggttgagcctgtcttacctgacagagggtaagggtgaggggaatacagctgttggaaaagagcagtggttgagggaggggagtgcatgctattgcatttgacggtatagcaaaataccctccaggttagaggcaaagtggaattccagtactgccagttgtttttgatccatcagcttggggtgttaattagaacattgtgccatcttctttgagtttcttctccctaccccagtcttttgcagagtttttctttctgagctcagtggtagtagtagggaatgctggtagggagaagggattggatcctaatctatgttttcttggccaaccctgtaggtacctggaaagtctgcttagacaggcaagcagtgggaccatcatcctctccccagccatgcaggccttcgtcagcctgcccagagaaggggagcagaacttcagtgcagaggagttctctgacatctctggtgagctcagggcctggtcttcttgtcaaggagctgagcccttccttcaatgcacagagaataaaagactaggacatgtatttaggttggtgcaaaagtaatttttgcaattacttttcattgcaaaaaccacagttacttttgcaccaacctaatagtgaagggtaagggataaagtrtaaggaggacattctcctgtttggaattattaaatagtggtctgctgtcatggcatcttcttcttcttcttcttcttttttttttttgagatggagtctcgctctgttgcccagggtggagtgcagcggcactatcttggctcacygcaacctgcgcctcccgggttcaagcaattctcctgcctcagcctcccgaatagctgggactacaggcaaatgccaccatgctggactaattttttatatatatatatatttttagtagagatggggtttcaccatgttagccaggatggtctcgatctcctgaccttgtgatctgcccgcctcagccttccaaagcgctgggattacaggcatgagccaccacccccagccagcgtcttatgctttagggatacattttagagtcttagccagtgtttggattgctgatgtttaataataacgatgatgagatgatacatgacatttattgtgggctaagttctaagtgtttatacatattaactcacttaatcctcataacagccttggggtataatagatacacttattcccgtttttcagatgaggacactgggacacagagagtttaaggaacttgcctaagtccacacattcataaatagtaggacttggagttcgactccaggcagtcaaactccaggaactgggggcttaagcactgtayagcgctgccttccagtgtctagaagtgcttttgtgtctcagggggagrcaggtaaggagtgtgtagtgaatgagatgggaagcctttccctttctcaagagggtttgaaactacaagatcctttttaataggtttgtttttaccaactaattcatgaactatcctacttctttctccttcctctcacctccatataaatcagggacgctgcatagtatctgggacagggtgaagatgttccagtgacgctgtcctctccagtcttcttctttggggggtgctaagaaagccaaagtacacagttctgttttccagttctgcctccttcccatcatcccgcctccatcagtaagctgaccctacgctttacctgctgcaggtttcagatgtccccttctcatcaactctacccacaaactgtaggcagcctctaaaatcagctttaggtcttgctgacaaatgacaagcagcaggaggtaatgctgattcccccttctaccacccccaccccaatttcccttggttgccatagtgatggggcaatgctactgcaaaaatagatagatggaaagagaaggatgccctagggttgctagctgggggtagagaagactggagtaaggagctttggcagatccaaactggtagatcagtgtgtctcctttctgtcagctacagagggcgattcagctcttcttcctctctgtcagccattgcggcattatccaagttgatcggtcaggaaatcctttcatagttctgagctcagttcttcctattaaaacaggttgactctaaaaatgtctaacatctactgtggacaagactctgtgtcagtggctgtgaccagttccatttcctctgtcactgatgaaggtggagatcactggtcctgctttgaaagacttgagtgtggagccttgacttccatttctctctgaactcttattagcgatattaaacttgcctttcttctactggtctcttgttgttgttacttctggtctttcatggttttccctgctgggatggcccacagccagagatcatagctagagctccttcctatctggatttgtcactagtgtttctgacatgggatttccccagryaggctttatttaattcacaaagggccagagcagrctgggtggcaagggataaagcactgggactactagagaaaagaaggatttagaggaataaagaactgagactctgcgggatgtgtgttgattatgaaaaaagaaaaggtagctcaaggagaggaaaatttggacagtgggacactaagtaagggaagtaaagggaaaaacatacaataaacatcagatcttagatgaggaaatagttgtatctgctgggatgcagtaaggggcagtaagacattgcactaggcttccagtaccagcccctgctgtggttaagtggctccggacaagcacttaacccccttgcctgtaaaaccaygatgatccttcctatgccacataattcagaggactcataacatcatcataatactcctttatccatatattttccaaagtttttataatgtatcttatttactctcacatcaattctgtgggttgttcatggcagatattcatatcctcattttacagagaagtaaaccaggctcagagaggttcaatgacttaaggtcttacgtctaataaaactagtatagctagtacagcaagagtcaaacccaagtgtcatataaaggaacacrggaaagtatagattcttataggaaagtaaagtaattagttatcatttgtggtaagtcttggtgtgagtaccagtggagagagggtaaatgtcccatggacttgccagacttgtcacttgaatgtaggattttaggctatttttgctccttgacttctcattttcttttcttgctggaaaacattttaaatattcaaattaccctatagctgttgtacaaatactccagtgccttctgagtcccatctggggcctctgtaactctgttccagagatgcgggccttggcagaactcctgggyccctatggmatgaagttcctgagtgaaaacctgatgtggcatgtgacctctcagattgtggagctgaaggtactatggaaacaatcccttggggaaaagatcctaccttgaggaaagagggtggktataggagactgggggggaagatgtaacattggtctcttcttttcctgcttaatgtctctgtgttcctggactacagaagctggtggtggaaaacatggacatacttgttcagatcagatccaactttagcaagccggacttgatggcttccctgctgccccagctgacaggtaagcatcctcttcccctatagtgagaaggagctgtggaatcacattgcagatgacagggttttcaggaatctggaggctaggcggggtctgtagaatcaaaatcatcaccaatccctctctaaattatcttttctaacacgcttctttctcctcaggggctgaaaatgtgctaaagcgcatgaccatcattggggttatcctcagtttcagggccatggcccaagagggacttcgggaggtgagttggtggggaggggtctgtcacagagtcacagatacctctgtgggtagggtttgtatgakaatttgtggaagtattgcgggaatcagttttaacttctgcttcagaaggggttggtgagcattgagaagagggagcgtaatttggcagagatcctagaagatccctaggaataaatgagcttaggaaacctagaggcataaggagagggatggcttggaaagctggctaggttcttatctaaattgagtgcccctcctttttttttttttttatttctacctatttttgaaggcattggtcatggtcttgtggactcatttatcttctctttcctccaggttttctcctcccactgcccatttcttatgggtcccattgagtgcttgaaggagtttgtcactccagacacagacatcaaggtatggaggagtgcaaagtagaatctaattaggagacttttgttgttgaaaaggaggtagctaggatcttgtaagggagagcgggttctgaagaacaccatagggataagggcgagggtttgaataggaaaactggtcagatgaatattcttggagagaaagagcagagctggcaagatgtagggggatggagagaagtgggaggctgggagacactatgagggttggggagacattactggagggggaggggtaagacctaggatagtatctgtaggttttcacctgatatgagcactgtgcaaattagataaactatgtgcaaacaagtccgctctttagtcttgaggttaggtactgtttataggaagatttgttcctttcattcccacccaccctgcctgccctcagtcttttcttttcctggccttttcttcctcccatccttaagctttctggttcctctatgtctgtttcacctgcctcagacccccatttactacaggagatggtgagaggaagaagggcttccacagacaatataagttaagcatccatttcccacccatctcccacctttgagtcatcttgtcttttgaatcatctggaactaagaagtatgctatggcaggaaatacagctagagcctaggaatagaatccttcaaatgcatagggcaggctccttctcttataattgattcctttaatggagagtggtctgtgttaagaggaaactagttagcaggaagaattaaagttatgtgttaagaaaatcttcattactttgagatcaaaagagttgtgaaatttccacctctatctgcctaaaatcatgaggggcaagtgactgtgggggcagtgagggggcagtgtttcactaggatagctgcccctcttgaaagatctttgattttaagctgagcctgggtttctggcacctgctgatgttggtccaaatgctctaggctgtcaggagcttgtctagctgatatctcctgggtagctccaatctttaggctctgcctgcctgtgaaaataagcaggtaggggcagagagggaggatggcctgtccatcagagatgctgttactgcctcagaggagcaagaagattagaagaagaaaagataaaatcccttcaaccatccctttcttcctccagaaaacctcatgaaccaggttccttatctctgaggccgtggttccacaaacggtcatttaggtagtaggggatttaaataagggcagaacagaaggtggcaaagatttggcttctgtatcagtaccacagcaaagtgtgtgtatgttggtatgtctgtgggattctttttttttttcttgagacagagtctcgctgtgttgcccagtgctggagtgcgatctcagctcactgcaacctctacctcctggattcaggcaattctcatgcatcagccccccgagttcctcctggaacttcaggttcatgccaccacacctggctaatttttgtatttttagtaaagacagggtttcaccaggttggccaggcttgtctccaactcctggactcaagtgatccgcccaccttggcctcccaaagtgctgggattacaggcatgagccattgctctggccagtctgtgggattacttgcataagatacttagttgtccagtattaaaacaattatccttgttctttcaaaaaacatttttttaaatctaaaaaggggtctaggtacttagtatgggagtaggggcttggggctgtgtcctgggaacctgattgtaagtacaatgagacattcaggtatcaatcaatcaatatttattgaatgccttctatgtgctcagcattatgttaaacactagagaaggtaaagagaaatgcaaaactcctgactttaagataaaggaagaggatgtaaaggcatcacattttctctgttagtcactagggtcgatgtgtggtctaatttaatcttcacaacaactatgtgaggtaaatgttattatgccagttttatagrtgggaaaatgagggatcaaagaggttaagtaacttttagtcaaggtcacacacttaataagtggtgttgctaggacttgaacccagatctgtctcactccaaagctttttgctcccttcactatgccatgaggttttaaaaagctatctatttggcaagataaggagatgagtcttgcattccatctaaaaagataactaacaccagatgctgtgtgtgatcaatgctaagtcagtggtaccaacgtaaggagggaagagctggctttgggctgaagtaatcaggtagcgctttacagagaagatgagatctaagggatggacgtaacagatataaatagaggagagaaaaggaccctcaaaagagggaagcacytgaaccagagtatgagagaggaagttgtagtttggggacagtgaataaattatcctggcagcaccgaataaaggaagtatttaggaaaatgaagttgaaaaagtaaatttgtacgatggagtgtcccaaagggttattttccctgtaggatagggagagctatgaagggaatatatagagaagatgacaataaaccagaagtttaaaatctacgattagctggacactgtggctcatgcctgtaatcccagcactttgggaggctgaggtaggaggatttcttgagcccaggagtttgaaaccagcctggacaaaatagcgagactctctctttctctacatatatataaaagcatctttaaaaaaaaaattaaacctgtgatccaaaagtcctggctatgcattccttctgtcaagccattgtgtcctgcgaatcctctctagaatgttattttcttctctccaggtgaccttgagtatctttgagctggcatctgctgcaggtgtgggctgtgacattgacccagccttggtggctgccattgctaatctgaaagctggtaagattggggaaagggggcgagatttgggaaaggagggcttgggccttattttgggtgaaaaaatgtcaatgtcaaagaagcctttatttgagattatatattcagaggatataagctgggagtgaaggaaggaccctaaccttcagaaaatacttacataggcgatttagatttatcctcaggtttcaactagttgatctacatcctcaggttccaactagttgatctaccggtcagctaaaaagtactaagtgagagtctgtttggtgctctgcaagtgctcaaagccatttacaatctggttgggaaaataaattaatgcaaatgaaacaatgagagaacaatacaaaatagtgggttgtgtggtatagcacccaaaytccccatagtgattttgtgctttctccctccacataatcaccttgacactgtttatttcttcccatctcacacttaacacttttattttccattacacatttcctctgatttcagtcatacctatacacactcagaacaggatgaaccaaggggctaggattaaggcctttcaaaatggccagacttacccttcttcttctctcatggtgggtgagaaccttttgtcttctttctgcctctccatcctatcaggcagtggacaggcatcctagggttgcattgtacatcagcagagcccttggctgaaagttctgccctgttgccagggaggcctccaggactcaggcccttcactataggtggatgctagtcctgtttcttcaggaaaattaagtaataacttgcccataggctttataaagtgttttcatggatattttctcctgcgatcctcacagcaattctgtgaagtaggacccctgtaacagataacttctgtttgctgactttattcacttttcctcttttcctttttccctctcaccagatacttcatctcctgaggaggaatataaggtggcctgcctgctcttgatctttctggcagtttccctcccactccttgccactgacccttcttccttttatagcattgagaaggatggtaagtaaggggtaggtttgagacaccagtgctattcaagttagtgtcctggggtagagagaggagacagagatactggaaaatatagacttctgacttgggtgtaaagttctgtttcaaaaagcacttgaaggctggacaccgtggctcatgcctgtaatcctagcactttgggaggccaaggtgaggtgggtagatcacttgagcccatgagttccagaccagcctaggcaacgtggtgaaaccctgtttctacaaaaataaataaactagctgggcagggtggcctgtagtcccagctacctgggaggctgaggtaggaggatggcttgagcccaaggggtcaaggttgtagtgagccatgattgcgccactgcactccagcatagtgacagagcaagaccctgtctttaaaaaaagaaaaaaaaaagaaaagaaaaggaacaaaacaccaaaacaccccctaccctgaaaaaaaaaaaaccagaatgagagaatgarctatgcataattcgatttcaataagatttcataggaatatcctgcctctaatctcaaaatgccttctcatccttttggtgtcaaatactggtggctcagcctgaaaacatgagaaattactagtttgggtcatcctggagtggcttactttgtcatttcctcttttttctctccatctatatcaataataacctaggttacaacaacaatattcattgcttgaccaaagccatcatccaggtgtctgctgccctcttcacgctctacaacaagaacattgaaactcacctcaaggaatttctggtggtgagtgggtctaggttataaagaatggaagattgcaaagggctggaattggtttgacttaaatctgtagacaattrtcgttgaacaggcttttgagtctaacttcccacctaattcattcagtaaagagtgagaagctactatgtgaaaggcaagagtttcttctaaatttcctaacagctggtgtttcagcctctgcttgaatatttggaaagatcattggacaaagagtcagaaaatctgagttctgatttttgatctgccattaagtagttgtgtgacctctgaagtgccaagattttggggccacggtattttcatatataaaacagtgagattaaactgaacccatgaattcagattaaaccgaatccatgaaccttggtatgcatcagaatatcttggggagcttgttaaaatacagattcctgatctttacaccagacctactgagttagaatattgtagggtaaatctaggcctctgtgtttttaataaggcctctgggagatcagatgcacattcaagttgtagagacactgagttttatcatctctaaggccctttctaactctgtatggacaaatgatcaatgactacttctcaaactttaatgtaaatcagaatcacctggagagtttctaccttagtagattagggtggggctgaataatgtgcatttctgttcccaggtaatcttgatgctgcttgtctgggaatctcactagaaccaatggtctagatttctagggactggaacttaaaactaggcagcrgattccactgtaggtcatatccaatttcttaaaaaaaatgttaaaaattttagccaaaatttgacttcctgtaactctcaccatggatcttarttttgcctctgggaaaactcagaacaaatacaataggccctagaattttccattctaaatcctccatggaggaattttgttcatatacttctgatacatggtccattcccctctgcctgcttgagcattctcagtaacaaagagcttatttctttgcaaagtatggtcccgatataagaaccagggcctcatctgtctccttccaggaggaaacacagcggatcatattgttctctcaggaattataccctcattctgagaagtacatgtcagggatcataagattggttggtgtgtctctatttaagctgaggcacccaaccagatagacctggctctcagcatcttaaatgcaaagaggattcacaccagatctctgagaaggggtgagaagggaatcccccacccttgccttcccttttatcctctgtttgctaaatgcaggtcacctgggcctgggatacaatgaatcatgtttcttctttgatcctttgggggtttggggatgatggagatgacagccatttgggaattgactggagaataccacgagcaagagctgtgtctgaatcagaggctcactgcctctagtcagatagggagtcagccataaacagcctgatgacagtggtgtctggaggctgcctaggaaaagagaggttaatctcctggcatacatcacctgcctttgctctaggtygtttccctgccccttgcaatctctcccctagcactcctggcaacctgttgtctgcactgggaggtcagtgagatccaggctggcttataggcaacatgtatctctgaaacctaggagatttgccactttcccaccctgagtcttcaggaacattctagcacttcttaactctctccttgatcttttcttaacttcctgcagcctgaggccatttgatactgacctgtataaaaatctgctttacaaattcttcccttacaggtggcctctgtcagcctcttgcagctgggccaggagactgacaagcttaaaaccagaaatcgagaatccatttctctgctcatgcgcttggtaagtaccttatttaaattggtgtgagaayagggaatggaagggccagagggagacttctgtttagggtctttgcatccttgccattcttgtcacccaaaagcattaactaaggacttaactctgcataaccctctgaatgtagtcctcacattctgattaacattctaaacttgtcctataatcccagagtagagtcttcaaggacttctgcaagacagggccttcctggcccctaagctggctgggcccatgtcctgcaatgttcccgagtctgatctgatagggcagctgtgcccsttattggtaattacctgtccagtacatgtttggtttcacttgacaattttctaccactgcatttcttgtttttaagagtactatgaaaagagtgctggataacacagagctgaactcagaggttgaggggtgggggctcagaggagggaaaggattttagctaaaaagctctaaggcagggagcctggtgggccatgaatcaggcagctcctgctgtctcttctccttgcttcccaagctgtgggcttctctctactctggcagaaagttttgggaactctgactcagttaactttaaaagtttttttcctcatggccctgtttccctcttcaacactcttactcactcttttgctctgattctccatgttagtaatgcacttaggtatggacaggaagggcttttgccctgggcccagtgtttaaaaggccctccttgagccttcctctagtagagtgttctggggccctcctctggccaatgggaagaggtagagcctgtaccccaccttgaggcccatacgagagatatctggggccccagaatattttgctaagtagcttcagcccacttgtagggcctgtgttaaacttcttcctactgaggcggaccgtcctactggtggatatacctctagtgcccaagggacgtgtggctggagtttagatatgcagataaggaagtctacaagtgcacacaaaatccctctaactgagggtgggaggagaagggggactgggctggaagcttgtttcttcccttcaccctgttctggtgcagaacttggaggagcccaaaaattcttaattcaaacctgggcttccataagactacaaatgtacattgtgaaggttgaaagctagaatatactagtttgttagcttgatttaattagtcatgtggtatgtggacctccatctgtattcttgtccgaggcccagaaatgctaggggccagggattcctgggattccctccaggtctccttcttgaaatacacaggcactgagtgatatttatgccttagtttctccaactagaaaaaggcctaggctgggctggttaaggattatgagagagaggagaatggacttgggggtggatgtatttgtgtgggatgtgtttggtgaggcaagagggcagaggaggtagatgaggggagagtgagggcagtgcccatggtggtgggctatgtgggggcacaatacatagagcagcagcatggccttggcaaggcaatgaactcttctgagacttcggctctctatccataaaagtgggtaataatccttatgatagagtggttagaatccgtaaggtattatgcgtgaaagtgcctagtacatagtagatgctcagcaaatgttagttcctgctgtctgcagctcattttaggttctggattactttggcatgactcttcacttcctcaggtagttttcacccctgtcaggttggaggtgattctgtattacccacctgtattcttacctccttctgcttagaccccttccaacaccccaaaatgtggaaagtgtttgcccctgtggccttccaatgaagccaacagagtgacgggaacagagctaggatcaggtactttttgttggagggagaaactagagggactagttgctgtgaagcaatttaaatgcaaatgtttccacagagaaattggaaatgaccgaaggtgaaggagctgtattctgagttaagaggctactcatgtagcctcaaattctgaccagcacttctgtccccagagtctttctgttttggctgtcaagcctgggccatgcctgcacctcagtgttgccagtctgttcctggcacaggtttcctggggaaagacatggctcttatagaatcatggaatcctagatgccagaaccagaccagatcctggcaattagtccagtacttacaagtcataaagatgaggaaactgaagaatagggagggaaagatgacaatcaaggtctcccctaaaatatatggcagatttgggactagaacccaagtttcttggccatcactctagggctgtttccactcccgtaaacttctgccacttgggagccctgttattttcttgtgctttatggagaatagaaagtcttgggccagtggatttgcttgaagtcattattcatttccctgtacctgaggatagcaccttggagaagacagctcatctctttcccagctgagggcttgaaagtcttgcctagcaagaaattctttgatatttaacctatcatcagggctgcagttttaccagcagatttcccttccttcagcctgcagtttctgctcttttgcagctgttgtgtgtgcatgtgtttgagaataggaaaatcttacacattttaaaacttgaaaggacttcagagagagaaacacgttagagtagatatggtagattctctttccttagtgaattttcaggacttggagtaccagatatattgtggagaacccatctgtgtgaattgccagaggatatgggacacctctccagagtgtgttttttagtctcattacctcttggataaggaaggcactgaaggaaatacaccctgctccttcctcagggatggggaccctccagtccaccgctaggctatgctgctcttcatgaacatgccctgtccacccacctccccctcttcaccctcacccccactctcattcttctccgggcatcttgatctatcttcctgcttggctgtgggggctgctgggattaccgcagcacacaggcttctaattaaactaattaatcatgcctgctcctttatgcggcatccttactgttccccaagcactgtactgagagagggaggagactgaggcccaacacaagaggacccatgtggattccaggcccccttccgtggcctgcagtggtgtttgtttctcttgctgcaaagctttgtaattagcacttttatacatctttacctgcatctgtgtgctgcccacccacatgtgatttagcatccagaatgggagagaatgggttttgctgcactgggaaagtggttctctcctgctgtctgcttctgtgcccttcacatagtcctgatgagggggtcagggtcaatgataatggagctgaagatgccacattgccttcctgcagccaaaccaagtgagggaagaggggggtgtgatttggaaccctgttcacttgtaactctcagggcctcagagggcctgggaactatgcaaaaggaacagggtatcacagacaaatgccctacctgaggttctcatctcttggccccatctctttcaggtggtggaggagtcatccttcctgaccctggacatgctggagtcctgtttccmttatgtcctgcttcgaaatgcctatcgggaggtgtctcgggccttccacctaaactgaatgcctgccagtacccactgaagagccctttggaccttcctaaacccttgccatagtggaagctgtggtcactttcgcagggggtgggaatggggtggggtcactaaggagagagggtcaggagccagagttgatgagcagatctgtggaagaacaatccagggctgagaaatcgtagagcagtgaggcaggctgggagcatggaggacagcttatggaaaaagttagggcgtggggccacatgtgtgaattttacaatgaaaaaaggagtaacgtacaagtatattttctatcttctggtgacttgagcttgagctctgacaggcatgggcctctccgaccttcatcactattcttaggataatgctggcgggcagagatgatcaatcatcatattaaatcataatgagcttataatcctcccactggagctgctattgtctcctgcacattcattaggaccattatcttctctcttcctttttcaaatgtgttcagcaaacattcaacctgctcctactgcagagtagcagcaaaggagcccctcttttcctttgtggggctcttcgaggggtcattgggtctcttcctttgcccccagcttgactgcgtttcctactggggcaaggaggaagtgcccttcagagatgttcactgcccacctactctactacattgtttgttacaagttctctcttgctttaacccctyctgctttgatatctccacaacccagagcagagggtcagttagtctccgtcaattctaggttacatgacaactgattggcccagacttaggtgggttttccctcctgtaccatttgggggtactctgccttttattgggagggactaatttaaccccaaatccttttgtcagcctgggtayagctgttgctccaggaagggatttctcttctggatcttaaatttcacagacctcattaggttgtatggccctgagagtgggtatccttgagggagtacaagctgtttcaacttagcccttttctgcgctaattagaatttcaagcgtcacagagcctgggggctttcaagatagcactaaactaggtttacttaactccttggcaggaaatagtggcccccatgcatcacttctgtgaatccactgccagggagaagtggagaaacagatcatatatgtcacaggtctagagtggttggaattgacaaatataattagctagttggttaattagggtcatgtccatactttcatgatgaaagggaagcagttgtcggttttcagcaaaaacgattcagccttcctgaagcctatttgatagctgttttggggttttgtacakgtgtttgctttttatttcttgagacccaggcttagtcaatactttcttaacttggcacccataatcaacatacagatttttcttagcaacagttgtctgctctttagggtggaagcgatagagaatcctgcttcgtgcatcagcaaatcctccttccttgctatgggaagggcttatgttctaaagggtgattcagtgtcaggcttatgagactgagagtaaagttgatgaggaagagraggctcagaagtatctgaacaactactctatatgtttatatttttctgcttgaggggatagagatccctcctccatctgcatctgcatatagaactgcttaagaggacagcaagacaagttgctgcagggggatggagggtagacagaatgcctttttttaaaactgaaaattttattgagatacttaatccacctgcacttgtaagaaatcatacagagaaattctattttcctttacacagtttccctgaatgctaacatctagcaaaactgtagtacactgccacaaccaggataactgacattgatataatctactgatcttgttcagatttccttccccagttttgcttatgttcatttctctctgtgtgtgcacgtgtgtgtgttatctatttctatacagctttatcatgtgtaggtttgtgtatctgccactgcagtcaacatacagaacaggccgggcgcagtggctcacgcctgtaatcccagcactttgggaggccaaggcaggtggatcacctgaggtcaggggtttgagagcagcctggccaatatagtgaaacaccgtctctactaaaaataccaaaactagccgggcgtggtggtgcatgcctgtagtcccactactcaggaggctgaggcagcagaataacttgatcccgggaggcggaggttgcagtaagctaagatcctgccacagcattccaggctgagtgacagagcgagactctgtctcaaaaaataaataataatttaaaaaaagatacagaacagttccatcaccacaaggatccctcgcattgctcttttatagcaattttatagcaattttctcctcccacaacccccttccccatctctagctcctggtaacacagatatattctctatttctaaaattttgtcatttgatatatctttttgtaaacatataattatacacacatatttctctaccacttatactttttcaaagtgctttcacatccttatagcaattctgcaaggtagccagggaaggctttcctatttcaggtcagaaaacagatttagaaatattaaatgacttaatgaaggtcacatgtttagcagtagaactagaactgggacccaagtctgatgttcagtcctagaccttttctacttgcccggtctgcctcttcacaagggaagacttgggttttagaatccagagaccttagaaggagcaaattggagaaggtgaggacatgatggcctttactaccggaagcaaaaagtgaatgtccagaggtgaagggacagagaagtaacaggacccatcagcatttcaggcaatttgcttcctttaccaggagggtctctgtcctcttacaacctgggaaaaaataagttgtgtcccaggttgtaagtttgctttacttaggcccaaaggaactaaagaatggatatcagaaatctcaccccaattgttttgtcttacaggcacagaataggttctagcctcagcattttcattaatgtagtgtttttattaacatctccattaacttgcttgcagcaatgagatggaattatgcctcccacaaggcctggggcaagatacttgcataggtgcccccttttgtttggacagtagaaacactgcctcccctgccatggtgttcaatccagttggcaggtgggccagcttcaaagtgcagaaggaactgggtgtggtggctcacccctgtaatcccagcactttgggaggcaggcggatcgcttgaactcaggagtttgagaccactctgggcaacacagtgaaaccctgtctctccaaaaatacaaaaaattagctgggcatggtggctgttgtctgtaatcccaacactttgggaggctgaggccagtggatctcttgagctaaggaggttaagaccagcctggtcaacatggcgaactccgtctctacaaaaaaatacgaaaattagctgggcgtagtagttcctgcctgtagtcctagctacttggaaggctgaggtggggaggatcgcttgagtccgggaggcagaggttgcagtgagcgaagatgatgccattgcactccagtctgggtgacagagcaagatcctgtctcacaaaaaaaaaaaaaaaaaaaaaatgcagaaggtccagggcctggccaaggggatgatgccctgtagcactttgctttgcaggaagggaacaactgtgctgtgaataccaggatccaggagggagggagggtatatctgtgtcccccagctagggacaaggcttccttaaccttaggtcctcatgcttatattagttcttctccaacaaagtttgactttgagaagaagctggcacatggctgaaatgcactcacgcggttgggggaagagtgttcttccagtcctcctccccacagggcctcctgcttctcctaagtacctgtcatcaaaggagatgaagatgaatcccccttcagcccccacacctcaatgagttgtcaagtactctccctcccacttgaataggaagcaggagcagcaggccaggttgcaggttgaggaagtcagaagttaacttgagctgagtttgcagctctggagagattgaggagcagacttttctcttgtcactttggaaggagaggattgtgaggctgcccctttaaatagcattcccgtaggaggcagatcacatccatccgtcacctactgccaaagcatcatttttggtttctatcaaactcaaagcttgttggaaaggattgtggggttaggggagtgaggaggcagagcctcctaggggtagggggcagtttagaagctgaaaaggagaggaatgagaaggagcctgggaaaggtgggggatgaggacaagaggaaaagacagggagagaatagttgtcttttgagcctcagagtggaacaagtatacccaattcttatctgtttagagacgcagcaaggtagaaatgggattgtattgcaacaagaggaatgaggttgagactaaacaccaggactggtgactaaagaaagtgaaaggagccacagagtgaaaaaggctgatagacttggctctggttttatcacttactctctgtgagaccctataatttttctgggttagtttagttctcatttatttttatttttactttttccatcaaactgtgttgtctatgaagttttcccatttattaaatgaagggaattagagtggatgaactctaatgtctctttcacgaataactttgtgtgtgtgtgcgtgtgtgtgtgtgtgtgtgtgtgtgtgtgtgtgtgaattagccttaaaatgaatcaggagcagggggtcttgggagagcaggatgtgacactgtgttaacaagaaatgttgagagagccctctggatgtatgtcttgcctctttcccacctattctagtttaaagacctgcctaaatttggaaactccttagctctaatcctaatttactaattagagctctttagcaccatcctaatttgcaattcttttgtagtttccagcccatttcattttcagttgataaggaggagattgctcccaaattttcagaaatggactgtgtaggagtgtgactagggtctcagatgcagccatttcttggctgggtctggggaaaagccaagggatgtgtgctaaaggtagatggacagagggtgggaagtcccttattatttccacttttttctccatctctgactctgccatctctttctgcctctgtactttctgggagctggttctgctgatacttctgctgaatctaaatgctgacctaacttggcaattcttttatgttaggagtcttagctgtgacagttcatccgcttcttcgcccttccatttcacttcttttctccttctctgactgggagaggaggagcctccactcagtatttagaacagagtaaataccttctcctgatcactcctccttccaacctccagaattttttgaaattaaaattcacattctgggatcctggattagtggcctgttttggattcagtagttagtgaatatatctccactttctgttgacataggagtttccccaatgccaaagcaggtggtcattaagggagagaacaatatggagcaagagaggtggttcctgcaagagtcctaggtaggactcggttggatggaggaggctttgcccttttacaaggtcttgagttcaaattccagttcactccttccacaaatgtttattaaccagctaggctgttttgtgctgggcctttagctcctagatttctttctctgaagacagaacagaaaaaatgagctggaagtgcttcaggaggggttttgatatcaggaatgctttcctggctgtgtagagttattacctagtcaaagaagaagatgttaagctgggtgcggtggctcacacctgtaatcccaccactttgggaggccgacgtgggcggatcacgaggtcaggagttggagaccagcctggccaatatagtgaaaccccatctctactaaaaaatacaaaaattagccggcgtggtggcccgcgcctgtagtcccagctactccaggaggctgaggcaggagaatcgctggaactggggaggcagaggttgcagtgagccgagatcgcgccactgcactgcagcctgggcgacacagactccttctcaaaaaaaaaaaaaaaaaaaaaaaaaaaaaaaaagatgcctgctctggagagctttgaacttggaagaaattcctatctgctaggcgggcaggcagaagtaccatggagaaggccacagtcttggagacaggtggggaagatcaagctgagggacccgaggccaagtgtgggatgccatcacagctcagggcacaccctgaacttttccaagacaggagcacaggtggggtctggtccgactgggttccgagtccagatctagcagggaaagatgtgtgctcatcccctaccccgcactcagacatgggacacgcaggcagctaggcacacgtggatacatggaaccacaaccacatacacagaaactcaaaacacacggagagaacccacacaaccacccacaccgaagtccagcccgccgcctccgctgcactctgtaaacacgcactcacatccgccagtacagggcacacgcagccactcgtccccggcgcctgtgtgcgtgcgctcgcccttgggcgcttctgtctgtgtgtcccccggcttccaatcgttcctttgggagggggaggagtggctgtgaggagtgagagactggcgggcaggctgaggagaagggagggagagcagagggaggggggaacccggccgggggaggaggagagaggcgaggaggcggctctggcagcgcgcggcggcggcggcggtagcggcagcagcagcggcggtgcggagagcttggactgggagcccaaagctcggctgggcagcgggagaggaggagccgcaggagctgcagctctgccagcttgggccgagcctagagacaccggcctggctggtccacgccagccgcaggtgggaagggcctgggatggggggtgagggtctctcggctggggctgaagctgagccgaggtgctgtctcctccttctgttccgtagaccgtggctgagcatggagctgtccccccgcagtcctccggagatgctggaggagtcggattgcccgtcacccctggagctgaagtcagcccccagcaagaagatgtggattaagcttcggtctctgtaagtccccggcccgggaatggggggaagggaccttagggagcctgagcgggaggaggaggggggataactggagcagggctgtgggctggtagattctctttggcacagatgttggcaggtgcgaggaagcacggccctgacacgcgtggccaggccacatgtgcaaggcatgtgcggagcaagctggccagttggagcgggcttaggagttgcaaaggtaacgatgtgcctgtgcctgtggaccccaggctgacacacgcagcgcctagaggcagcacagtatatgcagtgtggcagggctgcaggagggcagtagaggtgccaggctgactcacacatatccatgtgcagagttgtgcagatgtgagccacatgacatgtgtgtgcatgagtgagcgtgggtcacagaggtatgtggagtgattgcacacagctgtagatctactgcatgggaatacttgtgccaacctgtgggtcatatgtatctcagttgggattggtagtttctgcctcatgcacagggagtggggtgggggttaccccatgcctgagctgctcatctcttggggcctggaaactcactctatgtattaatgatgaggggacccacgtggaatctggaggggggggttggagccccca

SEQ ID NO: 97692 - DNA, 21417 bp, Homo sapiens
catggtgaaaacctgtctctactaaaaatacaaaatatagccaggcgtggtggagcacgcctgtggtctcagctcctcgggaggcagagattgccgcgaggtgagatcacaccactgcactcactccagcctgggccacagagcaagaacttgtctcaaaaaaaaaaaaaaaaaaaaaaaaaaaaaagagggaagaaggctgtgtgaagatagaggcagaaatcagagttatgctgccataagccaaggaacaccagagccactaaaagctgaaagaggcacacagaattcttccctaaaggtctatggcactgctgacaccttgaattcagactcctagcctccggaattgtgagagaattaatttctgttgtttaagccacccagttagtggcactttgttacagcagtcctagggacttctcacttctcaccccttctccagccacagcaacaagcaatggctaacccttggcaagagggatgcaaggtttgggctggggctggggcccagtaccctctgccaagcctgggaggacgggggaaggaggactgggctataactttcaaatgactcccctatacacactcccctgctgagcagccccaagagaaaagcaggcatctgctccccagtcacctagaggaacatgtccagagcccaaggggcccttgccctcccattcctggaaacctaccctcatcccgtcctgtggctggggaattttccatcctcccacacgcaagtcaaagtcattagatttaatcattaacagggcgggtgttaattagcaaaacaggatgattgtccatgctgatgaggacacagctggacatcaagaatagctgatccaacaaggctggggagaagcaggacctggctgaaaagacgcaggagctgtgcttctgtagacaacttccccctaaattctgaaagcactgaaatccccattcttcagcccttttttttttttcaagaatcaaaggagaaaatagtcgcaagtgtttaaggggcgctaagcacattatggacattatctcttcctacctctcactatatattattataatagggatacctattgctaatccagttttaagggtgagaacattgaggcccagagaggttaagcgccttgcccaaagttacaaatctgctaagtggcagagctaggatttggccttaggcagacttctccagaggctgggtgtttaaccacaacgctgacaggagctagtgtggaggggcagaagagggtctctgcggtcagaggtcacgctgacctccttcctgatgcccctgattctgtagcatattgtgcttccacttttgtaactcatggttgatcatgactcacccaccactgccctggctcctgctaggccataagctgtgtgtcaatggacagactgtatctcttttatgctccactgtttccccagcacttagcataatatctgacacataggaatattcaataaatatttgttaaaagaataaatttaaccttttagagggtttgggatagaaggggctagctagaggctagctattagctaggaatggggtcttctggactgctgatgatcatagtgttaaaatgcatctccgagaccttcctggccaatatgggaaaaccccgtctctactaaaaatacaaaaattagctggacgtggtggcatgtgcctgcaatcccagctactcgggaggctgaagcaggagaatcgcttgaaccagagagtcggaggttgcagtgagctgagatcgtgccactgcactccagcctggtgacagagcgagactctgtctcaaaaaaaaaaaaaaatgcatctcaagaggtcatctagtccatgaccctgctttaggttcagccattaccctgccatggccaccaaatctggtttactggggaaagtgctggcctggcttctggaccttggaagagctgttcctccccattgccttgatttctcctctctagcctgaagggttcaactggctgttcttgaagtctctttcaccctaccagtggatttggggattcatgaagaggcaaagcactttgaaaatgagcatcccctctgtttgaatcaccagctctggccccattcccaagactgccagctgcagggagggtgtgcactcaagcctgacagaactgcaactctgggcttttctcacaggcaaaccaggacttgcacagtcagaggaggctggacttccaagtcatcccctaggaggccacccatctcctccaatgctgcttctggggctcacgagaagctctggaaacttcttgcagggaagtcttctagatgggctcaaaaccccgcaggacaaacagtctcactgccgggcacctacatctcttttccagatgaaggcttactccccacctggcctccctctgtcttcacaagggttggctcctaaaggctattggtcatttccaaaggagcaaagccaccctaaaagacaatgattcaccccccatggggattttcagagcatatgcctcaagctctgagatgattccaagagtttccagaaatgtttgagaaactgcagcacgttggcatgagcatatggcttcctgggggaccacttggatggggtcgctgctcctttgggtgcataacagcagtctctgcccttatctcctcagagctgtgtgtataaaaagtgtgtgtgcatcatgttgtcaacaagccggagtgtgcctctgccacactgcccaggcagggagaaaggcaaagatacagataaggtcctggggctcctgggttctaaccctgtttctgagacatgctggctgtgtgacaggagcaccctcaactcagaataacagaatattagagcagaagaaacctgcaaagtcacccggtccccttcattttgaagattaggaaactgagtccggttgggggttgggggagcaaccccagagtcacccagagagttgatagcagatggaggaattgaaccctgacctttcatatcctggcccaggtggcccatcttagcaacacctctctacactaccctcccctcgagaagcaaaataaacaccgtaatacctgccctccctcctgggtggttgtgagggttagtaggggtgagaagggtggatagataaaaacagaaagtgctgacagcgacaaagagcagccccattaacccagagtccagtgccgaaaataggggagggtgagagtcattaagtgactgcatcacccagtcacatccctgtaactttaaatatttcatggagccagcagtgcaccacatacagctgctgctcctccagcccaggctgtgactgcagcagggctgtgaacacaggcgcctaacatagaaacatgcaagctgagggaaggagttgggatgaggcaggctctaactcttactcactctaggaaaggttccaagagcaggcatcaggccctttgcagtgccccaggcctgtgtgtgagcaacccataccttcatacacccaccggcccaacaggcactcacatagctatggacataaataaaagtcaaaatgacaataaacacacaccttcacagacagacccattccagcttacccggcaccaaaggctgcacccagccacactccacctccctgctaaccataaacgcttcgcccactttccccagtctcctcctcccaaagccagtactgggagccatccctcttccctctccctcctctctcctccgctgcctctaccccagcaccagctgctgccgggacccctcttcccacgcagcccctcatcagccatctctccagagctcaagctctcttggtctctctccttacccgtggctttcaggacaaaggactctgagaatccgggacttgagaaggcaacatagggtgggtgagagacttggggaggaatttccatgaccagaccaaagtttgagggagagcacggaatacgaaagaggactaggcagcctggatgtctggggtgggggtggagaggtaaccactctgagaggtgaccacccctcaactctgccgtcctgccaggaaataacaataaaaccagcagctacaattaaccgtgaccttctatgcaccaggtactctacccgagatgatactcaaccctaggaggtgggatcctctgtctgttttacaaatgagatggaggctcatgagagaagcctgagtccccagacatagggatgtgggaatcctggcttcacatcccatggtcctggtagaatgggatggggaatagacaagtcacctatttagaggatatttgggatcctgctctgtggatgtgtggttaggaggtggggtgagtaggaaggaggccagagcaagcaactgggccctaatgagccaggtatctccctagcccccaaccgttatcctctctgcttcagggccttcacgatctctttctccactgtcacttcttgtggggggatctgcgcaaaggttgggaatggagacggggaagcccaaccagctgttttccacctggccctgccacaccagagagcaaaggggccctgcaagtgcaggctgggtgtcaggagtcaatcctggagtccaggtgacagcaaaacaggggccagttaacctgcagacagaggtccagctggcccactgggtccccataaccccagccttaccctgagaaaactgagcccgacatgtgtaaaaagatatggctggggggaaggcaggacaagttattttgtgaggttagaggggaaggggccttgtgaaatcaaggtctggaaagggctgcccaggagaggaggcaactgagagttgaggctgacaccttagaggagaagatgaccatatggttctccaagaaccaggcatgaatctgtatggcacttgccagttgcttggtttaaggctaaagagacagaccccttcccctcttccaggactccctgtgccctcctccccatccccagttcttctctccaccttctcctcccgaaaagatgcatccagccctacccctccccagtgcccagcacatcccctcccccatctagtgatccccagtccttagaccgagcacaccagctcctgtgaatatcctgtctccctcactggctcgtattgactggcatcttagtcttccaccaaactagtcagttcttcccatagtctaacctccattccttcagttacagcagctcgttttcagtatcctgccaatagtgaaattagaaaccaaccctatctgtaaacaagccaccccaccaaaggagtttctctctccctccccaggcattttccccttgcaggcctttcacctactttaccatcccctaatttagcaagcagaaagagaactcgatttcacaagcaggattggctccccaccatcgttattccttttgtcgagtcccagatggtcctctctccccaagccctccacccactcccacaggcacttcgagagaaacgcgccctccggagaccctctgaagtcttcagtttcctctccctggcactgagggaacacaggacgggtgtgcagacttcgtatttccctccaagtttttacctccgcctagtgttttccttgcaaaggaaagtccctctcgaagtctaaccttaatccctcctgctgcatgcctaaatcccctttccatcttttctctataatacaaccccctttaaaatcataaatgcaatcttcctctcgcgtttagtctcctctcctgcagcgcccctctactttcctagccccaacaacctgctccggctaggagaagttcttcctagccactccccaccccaacgccctgcccaaaactccgaggacactgaggtatctgcctgagctgtccactacgacggctcccgggccacgcccggactcggcggcccgcggggcggtgacccccgcagccgccggtgcagccacgacggggttaaggttccgggctgggggagggggagggggccgggaggggcgggtgcggagccaatcggcggcggcagagtccccggagccgcgagctgggagcgctgtgccgggagccgggagccgagcgcgccgggctggggccggggccggagcggagcggagagggagcgcgcccgccccagccccgagtcccgccgccttccctcccgccgcagcgcgggcccaccggccgccgccccagccatggagcaagacaacagcccccgaaagatccagttcacggtcccgctgctggagccgcaccttgaccccgaggcggcggagcaggtgcggagcagggcggggcggcagggcactcgcccagccaaggacgagggacccctggactggtgggacccaggatccctgcctagtcctcccttagcagtgcgcccttttgaggacgaacgctcagtttgcggggggcgggggggggtcttctgtcccctcccccaccgtcggagccacatctcgaatctgtgcttctttgagactgaccgaaggaagagcgcctccactcgatgcctggccccgcgagagtcgctctcttcctccccagtcctgggggagggggcctgcttgaggacacgacccctccctccttaaacaaccctgcatcccccacccagtcaacccccactagagtttctgagcttggtggtggcgctgaagggaatcagcagcagtgcgggaggggcctggggaggggtcggtaatggagagggagcctggaagggtgggagttggaagaggagaaacagctctccctgtcccctcctaactgggggccaccttgctgggctccgaaagtgataacaggaagggactgaggaccactgagagggctggggctccagggagaggggagaggggtggtcgagttgtaggctgaggctcccttcttcaagtctccgcacatggcccttattcccaactcctgccctttggagtggggagtccrggtgggactgagccagcagcactgggaggccagaggtggagtctttccaggggctggggtccaagctgaacaatatgcaagggagaagcactgtgacagccttggctcaaggggtgggagtccagggccctggcccagcctcctagcctggtctatttttagctcagagcagcctggcagagggggcagtgtatgagagtgtgtgagcaagtgtatgcctcggtgagagtgagcgtatgtgtggagagggtggccacccgtggtccttactactccttgtttgccaaatatttgcttatttgcctattgctccatctctttgtaatctctgtccatttgcctagacattcccattcctaaagaatatcartttcccacaaggtcagttmtctgtttctctcaacaagctgccaggctctggctggccacccccmacctgaaaaaaactttgtgacctcttgggatgaggtggagagagtgttttttgtcatttttgttgctccagctgtttggtagaataaggtctgatgtgaagggaagcgggcaggggtacacactctccctaccacttcagcttcccaatgtggagatagggttaggtacctgcgtctccgtcctctctctggcctggggtgagccaccacctcagagctctaaggtgtgactacgggaaggctcttggtgaagcctcacaaatctgtagaggatgaggaggatggagagccatcagcatgggttgtgttccctgggagtcaggggaaaggctgctatgcctggaggcagggtatcagccaggataacctcagacccaggaaaaagggctcaagagtctggactgtggaggttggggatgcagttccaaggagaactgcctcccactggcacagacagggcccgacacctgtatctgttgggtgttggaggaggcaggtgtagtaggtgggtagggaggaggaggaggaaggccagctggttcagggatctaggagacaagggaggggcacaaggcaatcctgaggagtcagagggaaaaaagagagccgggacttgggcctactttcactaatcttcagaatttgtgtctcttaggcctgaaattcttcctgtggcctaacctcagcccctcctgctgtgttaggcaaaaagctccaggcttggcaggtgctcctaacccagaccaacatgggagggcaaaaggagttggaagctctgagttatagagcacagagtggcaggcggtggaggggtgcccacagcttccagatccttggcatgactgctttggaaagaaatccgaggcraagttatcacatgctcctgagagctaggatttgggataggtatgagaaaaggaaaagagaccatctacttatttcccactagttcaggtgcctgggaggtacctcaggaagtctgactttcctccttcctgctgtaagggtatcacgattcccaaggactctgaatgcttagaaaccttgtccaaagcaaaggaataggtcaaggaagtgatgtgtccaagaccagacagccctgctgccctctgtcatacttgcagtctctttcttgggctccccactctgatgttatctcaacccactgatcgccactccaccctccttgtctctttcctactaccaccaccacaccctgcccctccaggatggaaagaagtagaggagtcttctagttgaaggatggcccccaccccatatacatgaagcagatggtccccagcccatgtgtatcaggaatgwccagagacgactcacagttaatgtctgtgcggctcatccatgtgcacacttacacacatacacaaaggactggtactgcggggaccttgcaatgtcaccaaaaacagatgccactgaattctcctgggaaaatgatgccctacccccacatacccccattctttgcatcctgtttcttctttggaaagagttcccccctcaggcttaaacagcccatcttaccatagccagtaccccccacttttctgggcayagagaggggcagtgttcacctctgtcatccccccacggccagtggtgatgattctaaataatggacatgcaaagataagggtttgatcattcagtgtcctcatcctactcctstcagcccaggataattctagcccttttcccagccccatttgccttccctccccactgctaacctagagggtcatcctctaacccccatccttccacttgcttccaagcctctaaagcctccagagaaagggggaaaactacacctcccaggagtccttgaactgacttcaacaacaatcaactttattggcagcgtgacaaaagaacaacagtggggggaaagggggctcagaggcagggcagtcagtcagctttatatgttaatttcttagactaggacctggagcctaggataagatttttcagctacgctttgggccctgaccagggtcctgcctagggctcctccttgtattgatattatatctaccatgacaaggattcccccaaccccatttcttgacaaatcagaaaggcaatgtatccaaggacagagaggacattagggagtgaggggcacaggccagaggagatgcacgttcagatcctcctctgtgctgtcctcccaggctggggggcgcttgaaaaggatgctctctccaggcgctgtcacacaaaatgttaacrtcttgcttggggagtgggttagaacactgagagaaagccctgtgccctcttaagttatttctgaccattgatccaggatggacggaaggacagcaagccagagatcaatgcattagagcagatatgcttagatggagagctggggccaggaccagggggaggtggagagacagaacaggggaatggggscatgcagggaggcgaggtggtcttctggatccttaggattagctctccccaggggagggggaggagcccagggatgttcaccctggttcaccaatgtaacatggcatttttttttcaacttttattttagattcaggggggtacatgtgcaggtttgttacaaaggtttattacatggtgctgaagtctgggatatgattgacccagagagtgaacatagtacccaataggtagtttttcagcccttgccctcctccctccctgtcttttattccccagtgtctattgttcctatctttatgtccatgagtactcaatgtttagctcccacttataagtgagaacacgcagtatttggttttctgtttctgcataagtttgcttaggataatggcctccagctgcattaacrtggcattttttgaggtgtgttaagtaggctagcctggattatgttactgagtggttttgggtggggctttgatgcttccacgtgtacttgacctcttccccatttcccaccttccctcagattcggaggcgccgccccacccctgccaccctcgtgctgaccagtgaccagtcatccccaggtaagccaagggataggttgctgaagggcgtgggggccactatggcagcaggtcccaatgagaagatgggcgctagatggaagaagaacagctctgagaaggcrgggatgtcctcagtmctgaaggcaggaaggtggtggctagattgcagaatattctttgcttttggaaasatggagcagttctaggaaagggagggrgaccacctggctcctaagccccccaggaattgggstggtcaactgagtgctggttgctgcgacaacagccttccagatttctccagcaactgagatgctgccacccccacccccagaggcagtgtcagctgtgagggggagggaccgcctccaccagctcttcacagcccccagagggggaggggaaggttagaagcagctcagggagcagctgagattctggtcaccagcatccccatcgaggtctggggagaaaacaagttctcagagaatggtagagagcttgacaggagtatggaagcgagggggacaggctaagaagctaggctggggttcaggatgccggggtctccagcttgcctccagctataccttccagaccctgcacagaataaattgactgtcctctatcactgttccctcctatgcagggcttagttctggctgaccctggggtgggggaatgattggaaagagaaagagacatggatacttcagaggargaaaaaaagcaaaaagactacagatcctgcctttggggatctccaggtctgaggcaaagatgcagacgcaaattgaccacagagccaaggacgggactagatgcagagggatggaggcagcggaagcacaggagaggagcttcggggaggaggtctggggcagccatgagggccaagagcctgggggcagatgtgagggacagatcaggaggagcatggctgcagaatcccctcccctgagaagtcagctctatggggatccctggtttcctgtccttatcaccctctcctttccctgttcccttcagagatagatgaagaccggatccccaacccacatctcaaggtgagctggcccatcccactaagcccagcccaaaaaacccccacattsattaggggattattccttaaaaccctgccgcccatctctaggatctttttgactcccgcttccctgtacctctaccccccaaatgtgcatgagtgaacatatacacatgcaccccacacacacacactcacatacacacacacactcacagtctccttgctcaccattgtcgasgtggttggggaagcaggcgttttcttaccccactttttgaagctcacacctaccccaggctccaatccaaaagcctggcaaggcagaggaggaaggcaagsggggctggagggcatggggggctagagggcaagggaggggtctggagagcaagggggggctggcgcccatctgtgctctgtgcccttcacagtccactttggcaatgtctccacggcaacggaagaagatgacaaggatcacacccacaatgaaaggtttgcaagacccctcccatccctttttctcctctgtgcctgaagctgaagaggagaccgaatgccctttggaagggaggtcgttaaatctgcctttattatggtagaactgttgctagacgaactgaggctgaaatcccagttttgccactgactagctgggtgatctgggagaaactgcttaacttactgagccttgaatactacctcattatggcagataaaataatatatgtgaactcaccggcacagtgcacaacatgtacaagatactcaaatttttcttgaatctaaattgagcctttccaccttcccccagggaagaccatgtatcccagcaagtgaggagtatcccttgttcttaaagcctcttctcctatgcctcccttatctgtgaagaagartactttttatggtctagttttcattcctccttattgccagctaatgtcccctccttgttcagatctcagtggatgggaaagtcaaacacccagcaatgtgtgctgagcctttagtggggctgttgaatccggaggcccacaggggagacgctaggcagtcatatccagtgttccctccctttctctgtgtccccagagctccagatgatggttgaacatcacctggggcaacagcagcaaggagaggaacctgagggggccgctgagagcacagraacccaggagtcccgcccacctgggatcccagacacagaagtggagtcaaggctgggcacctctgggacagcaaaaagtatgttcaggctggggagggccccwggcatcctatttcccagcccagcaggaggcaagccttacccactgcggggaggggaaagagttggagcctgggagaggcctagtagtaggcaaaaactgtctcaaggatatggatctgttggcatgttcggcatatatttgaatcttcacttttccttactgagtgacaccaagccctcccaacttgaacctcagagccccactgtggctacatgggggaaacccaccttcatgggaacagcaatcacaggctagaatcctggctcggccacttgctaccttaccagctgagaggccttgaacgacttaacctcagggtataaaatgataatgagggtgcctgttgcagtgggttgtgtgtgactattaaatgagactggctgttgacacagcacccgacacacacagagcatgcaataagtggaagctggtagcagtgcgctatgtcccttatcctagatatattccagaattcagaatgcttccaattttatgaagatatagtacataaactgtgtatcgcatagtattcccggcagagaaccctacaatcaaacacataatatttctgcaatccagtgaatggtctcactaagcagaataaagactaaaaacagcctcctatgagttcatgtcaggtttagacacatattgagttttgttttttaaactgtagagggtttattctttccaatttgattgaagattttttaaaagtgaacatatagtagtaattgtgatcaaagaaaaccctgttggtcttgcctgattgcacccaacttggtcctggggccctctcaggggccactggggtatgggtgcagtgaggagaagcagttccctccccaacacctttatgaatgccacytcttcctcccacccctatgttccctccycagaaactgcagaatgcatccctaaaactcacgaragagrcagtaaggaacccagcacaaaagaaccctcaacccatataccaccactggattccaagggagccaactcggtaagaccccagggctgggctgccaggtcataggagaggaggctaatattgtggacaaaagcaaggggctaatatttggagtctaggaaaaggaaaacaaagaaccagcttcagtccctaaaaagttattctttatggtaaaaggacttgtatctcctctgacagacaaaaagaaatggatagctgcagcaagaaggattgagattagactttgtgtaggacttctggctcctggaatgggtgagagcagtaggccrtggattttttgataaaggggatttggaacccgaagggagatcctcacctgcccagctgaagtgggcagtgkctctccctgcctggaggatgcattgatgagataacttcctgagctttgatttcataatccgcagccccctgcatagactggacacaggaaggactgctctcagacatcagaacaagctttctgagacattagatgttgacaaatgggatggccagaaggggaagggacaaaatgaccctctggcctctcaccttctctttctgtcccctttcccccataacaggtctgagagaggaggaggtatcttgggatcaagactgcagtttgggaatgcatggacaccggatttgtttcttattccttcactttkggggaaaatctcttgtttttaaaaagtgataaatttggtgttaggtccttggcactttccttcttttccaactgggagaatcctttctccctgccttcttgccctgccctctctgtagcccccaccctcctgccaagctgcctctgggaaggaagaaacaggagctaggcagaagccttgagcagggaagagttcttcccttagccctgactttacttgctgtgggaagagagatgagggtcagataggtgggaggactaacttccagggtgccaagaaggaagaaaagccccaggttctcttttcttattgaggaacgatccgaccacctcacaggcctgccctgcagctggaagactcggcgctctaaggcctgtgccgtgtccagctgtgactgtgcggtgggctccatctgctggacaaaaggggaactgcaccatggcacttggcccatgggaaagagggtrtggtggtgtgccgatacctcctcgcctgccctccaagccccagctgccttccttttggattcccaagcttcaggatgtgttccctcttccagctgtgggaccgctgtcccttatttcaacccgttagcaacaatggatagagaacacagtggctattaatgaagaggcccatgctggagactggaagggttcccttgtcctagacattgaggggcccagataagaccaaaaccaagcataagagaagaaactgtctcagatctcacggccaggcctctctcctgctgctgtttttgattttcccaggtagtgggagagaggaaaggagggaaggcaagattctttccccctccctgctgaagcatgtggtacagaggcaagagcagagcctgagaagcgtcaggtcccacttctgccatgcagctactatgagccctcggggcctcctcctgggcctcagcttgcccagatacatacctaaawatatatatatatatatgagggagaacgcctcacccagattttatcatgctggaaagagtgtatgtatgtgaagatgcttggtcaacttgtacccagtgaacacacacagtcaggcctggtctcccttctttattgttctctggctatagcaggggtctgggaaaccaagggcaggggtgagtcacatgcgtctctgcccttctcggggtggggtagggtggaagtaccagggtagcaggtctaggagaccatggatgtggatttcgcatgaacagggcccactgtacaaatgcatggttggtatttacaagaaagaaggagggcagtcacctggactttggcctttcctggggcaaggtgggggcaaggaggagcctgaggagaggaaggggcaccgcgcctggctgggttctctccagaggacaggaaggcagcagccctgagccccttgtccatctgcctttcaccgactacccctcacttgtctcaggggaggagcttcttagtgcctgcagctgggccagttctgggacgtggagaggaggggacagaccctctcttttagcaatgcaggattactcaccctccccaggcacccttgaccctaacccagctggtgtcgatacattctgaaggtgctttgctggggagatcctcaaagcactttacagacattggtcggatggagcctcccagccccaggggagaggaaggaggcaaagggctccggactcagggcaggcgacaagccccaggggcccagaccagtcccaaggaaggtcccaggaaaggcctcccgcagcccctggtcacaatggctccttttgccccagtcactatatcagaaagggagggaaggaagattcagaggatcaggctggagatggggctgaagcagcgcaattctggggtgaagaggatgtcctctccaccccattcccaggtcctagaaaggtaccatgccctgaaggaatccactcccctccccacacatagggctctgaaaacccccagctttctatcctattccagcccttcccaggggaggaaaaggggcacccagacctgccagctaagatctggggtggggggctgagggaacccccaaaatgtattgcttagaaacttggaggcaaaaaggatgggggaggtcccagggggctggcatctctgacccttccccaaggccctgggaagcctccaggaagctccccgctccctggcagccacctggccatgaagagaatccagaggctgagggatgggcacagtgaccactgggagcctgaagttccccagtcttgctgccggaacattaaagtgcaccccagtgggtgtcaggtggggaggggccctttccccaaccccaaatctctggcatttggccttcaggtgggttgtttcttccacgaccacgctcccttggagcagatgggggagccagtcctgatggatggtgctgatgacatcaaacactttggactcaatgaagacctggggaaagagggagaaacttcagtgccctgagctttgccttcacctccaacctgaccttccttctccaagtcctgatccccactcagtcccgagtagagctgtgcaaaaaatgcccttcagaagggtgcccagccaagggggtgaataggggctgaagtcgaagtcacgttcagctgccctcactgagctgtgtgccctggctgggctccttttccctaaccctccctaaggtgcggtgcaggttagctgtcacctggcatgggcccaccctgttctgctgctgttctgagaagctacctcctttgttcctgcagggactgggggacagaagagcgtgggaggatttccctgctccacccacactttggctccattctatgtcttcactcgctccattttactgctcaaaaggggagagagaatgtcgcatccactggagcccagagacgacccaacaaagatgccatgatagacaccagctctcctacaccctccaccacaacaggctcacctgggccagccccagggctaatccagattcccattctggttgtgttcatcttcggcaggggatgggggggcctcttcttcacagggggacagctcgtcaatggacatctggttggtgatgcctgtagaggagcataaaggaggctgagcttaggccaagaagtattcttccccagaacccaaggagtatgtggagacatgtaagggattctcatccatcaacctgccttcaagctgaactacattcaacccatccccacttgggaagagcctctccagccttgctaaaactcagaaccctcaacaccaccctaccaccccctcacacaggaagagatttcccagccagggccaccaaattagccaaatctacaggggcaccatttacagggaccacagtgtgcacagggacccttgggttgtggaatatctgactgtctctatcatctctacggcccccattcttagaacattccaggccactcagccagtctttcctgtgatctaactggtctgatcagctccactcccaaatcaaggagtccggcaaagggtttccccaggggcttaagaaaaatggacctcctagtgctccatgatccacccacacaagttctcacccctgccctctgccatggtacccaccacttgctgcccgttccttccatttctgcttattctcctgaatgcgcttgacccaggtggaacgaaagctgaccacatcagggttggggtctcccacttccacatccagagagggctggcgccactgaaagctagaagcagaacccccaaaagccgcaagaggtaagccccagcccactccagaaccaccttagccctgggagtgcaggacatggaagaccaggagaaggttcagggaacttcatcttcctcttttcctctactagatattccccaagtccctgtccctctccccctcatttcacccctccctctccacatcttccctcctggtagaaggaaaattaaaacaagattagccagaaggcagaaagacagctaatggaagaaacaaaaatatggtgaaggggagcataggtacaggtcacacccttctgatcccatccttctgtccctgacggcagagggactcccaagcttgaagcagcctgcctccccaccaccccaccatggctgtgagtcggtcctctctgtgagtccaaatccctccctaccactgccttcctgaaccaagatatctggctaccccagccaccctcacctgggctggtttttagacttggagtcctcatccgccaggggctgaacactcttctctgccacgtcagtcagcacagagaatgtgggctccacaatgaagtcgatgaaccctgcagtggaggagcaatgccgtagagatgtcttactattatctggagggctaggcagagcatgcagctggcatggccaggacccctggctgcttatgaaagaggatggagaggtaacctggggctgaaaacttcccaatgcagggcaggctttgggatgatgtcttggtgccccagagagctccttcctgccattgcagccccctggcctcctaacccaggaccccatgctctagcacagtaggctttcctctacaggaagaatggtttggggggattgaggacttggagcaatcctgacccaggcagcatcttttccccctcccagtcctccccttcctgcaggagaggacactcacctatctgagactgtgccactagagtggaagtgcggtcacagagtggagaaaagggcaggcccaactctgcctccttgtcaccctagaggagggaacagggtaggaaagctggagaggatacctcagacctaccagatctggggtacaggtggcaagtggtgggggtggggggttgttgtgtgaaatttctgcactgttgacctggaaattagtaatatgcaaatgaaatatatgcaaatgaaatgcaactattgttaggcttttaggataatggggttttaccccaaggatttgggatcaggtcagagactacaggtagcaaaaggaggatgtggaacaggattggggaacttggagggcaaaaggggagagaaggcccccataggcacagggaaggcaaagatgccacgctacctgacggaagaattcctccatgagggccttggtccaacggctgtggaccaaccactgcttggttgggtggctgatgtcagcagcatggagcagtagagacagggccttgggcttgtcaatcctggttggggcagatggcaagggaagggagactgatcttttaggaaaaggaagttaggaccattccctaacttcccacgcacaccctatcacataacttcttcctttttttttttttttttttgagacagggtctcactctgttgcccgggctggagtgcagtggcacaatctcagctcactgcaacctctgtcacctgggttcaagtgattctcccacctcagcctcccgaatagctgggactacaggcgtgcatgccaccacacccagctaatttttgtatttttttggtagagacagtgtttcaccgtgttggccaggctggtctcaaattcctgacctcaagctatccacctgcctcggcctcccaaagtgctggaattataggcatgagccaccacgcccggcctcacataacttcaaacaccctccaaagctacacacacaccccacacacagacacacacacacttatatatgtttaggtagcagcacgggttagtagctgagagcccaggctcttagaatcaaagggcctgggttcacgtctatacctaccacatgttagccgcgtgacactgagcaagttacttaaaatttccatatttcattttcttcaactctaaaatggaaataacaaccctaccacatatcgagtggttctgagaattaagtgacaaacaacaaataagtattcaggagagtgtctagcacataataagtgctcagtagatattatctagaatagtaataattattattataccctcaacaatgacccgctgtgacactgcatcccacacataaacaccttacacagagattaacacacaccttcaggacacacacacacacagtccactctcacacacatttatacattcccactcacttctaagcaacattagatgtaattatggcatttgttctatgcatttttttaaacctcgtatgactctcccaatagccctatgagactaggaactaggggcaagctgttgtggggggaggcgtatcattttcaccatttcagaggtaataaaactggggcagaagggttgaatgaattttccaacattccagagtaagcctgtcccagagctacgatgagaacccccatcttagattcccagcccaaagcactctccagtggatcagctgccaaggctgtgagtaaacgtaaggacacacacacacacacacacacacacacacacacacactctctctctctctctctcacatagagatgcagtctgatacctgaagccagtggagtctctacagcgaggtaaagacctggcacaccaactacccttgtgtatacccccccagttcacacacccctccctctggcctggccccagccacaccccaccagatgccacctctccagctgttgcaaggctgtcttcatggtcttcacttgctggaaatggcaggacatgtctgtggccaacaccatctcaatgaccagggctcggagttctctgagcggacataaaaagagaagcaatcagtcccctcagcgctgctgggcaggaggtccaggaagtggaaaatggagtttgtggtaagggagtctcttagggatgccaagtactggcttctgctcacacaaactcatccttggtgaggttgatgaaaatgttcatctcatcatcctgcatcaatcggaaaacagagctgatgtggtgattctccagcactgaacgatcattgtacacgatggcacattctgacctacaaagccaaaggtcatcatgaccaccccctgtaaggagggactccggcaacctccccacctcctcttggcccctcctgcccctgccacatccccacccctcacttggtct

SEQ ID NO: 97693 - DNA, 13536 bp, Homo sapiens
acatttgcaaaatttgattcaggaaaactaaacttggtggaaatcattaccaccaagaaaaaccctgtgatggaggccataattataaaatgtgttatggataaaagcatactgatagaagaaccctatcttagttgtaaaatcaatgcaaaaaagtgttaaccccagtgaaaataattctgctaaaataaaactagaaaattagtatagacggaaatattttaatttggtctatagaaaatcgatgaagagaatcaaattggcttagtgacatttactcaaaaaagagtttctgagtgaaaattcatcactgagcataattcaggttaatgtgctaaacggcacaacctgctcagggtcaaaacgcaaggctgaaagatcctgatgcattgcgagagcagcagaagggagcaaccactccacctgcggaagttaggtggggcttcacacaggaggtgccgttgaggcagactcctgaggaaggagtgagcatcctgaagatggggatttgacctgtcaacattgacctgtcaaggtctgggacgtctgagatttggtgtaatgatgtacactcttgggcaacagaagcaggtgctttattccataaagcagacccattgttgtacggtggagtaagtgtttatgtggtcttaatatatatgtttatctaggtggtcttctgaggccaagaatttcatccaaaaggaacttccatttattgtatgctatttggcaatcacttgtgtgtattattaattgttgtacgatccctgtgaggtccatgctgttatccccattttgtaaattagaaacctggaggaaattagaataaataactccctccttacccaggaccactcaagattagaaccagcctgactggttttaaaatgaatgccttaatcactaggttgtgttgtttttccatctctaccttcggggtttaaaatcactgatggataaaggttaatttcaagggttaactccagccagcattgctttggaaaatgaccaccgtaccatttcagtgctcagtgattcagccacatctctcaggagtgctggggcctaaatcagatgatactacacaatgtcctcactggacatggcaggagacttcagaactggaggggtaacagtggagggctgagccagagtccacagagtcaggaaggagacagatgggggattactaaatgagaggagccagaaaagagaggaagtcagaaatctgggcagggacagtgtgatcccacagtctcagagaagaatcagccagaaagataggagctgtattggtggaaaatcacagatggtagggaaaggcagcatttcagaactcaaacaggcaggcaaacatgaatactaatgataatagctaccatttgttgaacatttattttgtatttagtgcatttattcaataaatatttataaagcacctaccattctagatgctgggccaagcactggatatgcagtgatgaatgagataacttaggtttgccctcatagaacttatattctagtgagttttatgctgtatgtcatttacccctcccaagaatcacaggaaaccagaattactgtcaccgttttacagatgaggccactgaggctcagagaagttaaggaacttgccctggtcccaagagaaaaagtggaggagcctggatttaaacacagttctgtccaaagcctgtgaaccaacagcctgtgctctgagaaagcaagtggagaaaaggcattagacacagccataagaaggctttggggggaatagttggagtcaaggggaagtgatagaagacagatttcaaaggtctaaggagggagtgggtggagattgatggaaggcggagagtttagagattgtatttgaccagaaagggaggcagagggactccttggagattgtatttgaccagaaagggaggcagagggactccttgaagactgggaatctagtgcctgcttgcaggcagagggcaagtgcctgagccttgagaaagtacagacttgaccttgagagagtagttgaaattttgttgccttctaggtggtcagctgtagacagaccttctcctgggaactgtagggcctgaaattcccaaggtctttgaggtcggagcaacctgaggcctctgaggccaaagcatctgcgatttgagggtgttccctagctggtgatttccatatataaggacatttcggtaccccaagcagccagtctagaaccaattggtctgccccatacccagcggctccaggaaggcatctgaaaacatggagcaggaagctccgtggctattgcgtgttatcccctagcacaccagccagccgtggagtgactctttgcaattacaaaccagcagctgagtagacgcagtttaaaagtacgttgtaaaagttttatggttagtgaagataagtgcaaaattaatccctacagaacaaagcaatttaaaaagtacataatgaagtgattagctagaaatggtggggagcagaaggagagtgcccaagaacaattttactcaggaatggtcttcacactttggttttttcaattgcattcaatgagggagctgtataaaagagagattaataacatgcacaaacgaggtaacaattgatgaaggatttggggagtcaacctgaaggaaatttttaccttcttaaaaagtttggatgaaggggaaaaatagctataaaggctttgattgggacaattggtgaactttgattatagactggggatttgataatagtcatgtatcaatgtttaatttcctgaattttggaaaaaagcaaaaacaaaagccaaagaaacctggaagctcacaatgtatgttaaagctccccagagtcattttctgtctcccttttgtttccatttttgttctttgttcttctttagctgagtctgcatgctggtcggtatcagaccctggaaggtagcttcttggccaccattacattgttattctagttttcctggaagagaccaccaagcaaggccagaatcagttcctcagaagaactgccacaaactgagcaagggttccttctcctcctcctctgacactgctgtggttttccttggacaagatccgatattcataaatctgaagttgcagaaggaggggtcaggggcatctccaaatacaaatgttcttggctttgtaaagcaatgcaaagggcagggtacctgtgagcacatttttttctagtgctgtaggtgctggtatccagaaattacccttacacacaagtttttctataaagtttggtatccagaaattacccctgcacacaagtttttctataaaacaaagcctacctgtatacaaagtcagtcctgaaaataaagagttaacccctggtgtaaatggcccaggaacaccattcactcctttaggtcttgcctctctctctttctgtctgtctagtttgggaaagttcaagagacagggctctggtctctggagcactgaatggtggggtgctctgttttattcctcaggcctgcttcaaatgctgcacatcaggaggtgagggtcttgatgacttgcttaattttcaccacactaggattgtagtaatatagagaaatcatggactaggggagggaaaagattagtaagaccatgattttaagacagatacttatttgggatttcagtgtttctaaaatcaggttggaccttatacatttggcatatataaataaataataaatatgtaaataaattttaatttactgtccaaactagaagcttttgcgagtgaaagggggtgctactaataacagtggaacactaggtataaaccagaatagtccccagcaaaccagaacatatggtcattctactgagaattttttgtgcatgtttaatcacctccttaaatgccccatctccaatatagtcacatggggagttacagcctcagcatatgaatttgaggaagggggagacaattcagtccatagggagtgctgtaacagaaaaaacacagtgtaagtatcagaaagtcagggattttttatattttgttctgtggtaagattcccatctcctacaacaaagactggcacatagtaagtgctcagtaaataattgctgaactgcattaaagcagaggagggacatgctctgatgtataattttaaaaagtggattggagggcaatacggattgaagggcaacacgacaacgcagaaagaccagggaagaggctctggatggagatgcccacacaaaaataatagggacttggaccaggatgttggctgtgcagatggagagaagtgattaaattcaagctatatttaggaggtagaactgtctgcttttgccgatgtattggatgtggagagggaggaagaagacattgctacagatgaattacaggttacaggcttcggctattagatggatgaggggcagactaagggacagatggggaggcagggaagaaaatcgggaacttcgttttggacatggtaaggttgagatgcctgagacacatgagagtgaaggtgagacgtaggcacttgggtatataaatcttgagctcagaggaatgtagtgtgttttctcctgccccgaaaagctgtggtatagcaatagtgaatcttatcatcagtggaatattatagtgataataattatagctgatacttaggggcctctaaacttcttccaggtgatgaaataaactgtctctgtgtattacttcatttaattctcacagcaactatctttggaatttatcacttttatctccatttcatagacaaggaaactgagtgttggaaggtgaagtgaattgcctaaagtcaccagttcagcaaatgggaaatgtaggacttgacaccaagactgtttggccccagaggctatgctctgaaccataatgacttcctgtcttccaaaaggcaggctcttggatccatatcttactgtgcttctaaattatcctgtgaccctgaaccttagtttgctcacctgggaaatgaagggaggtcctggttaggttcccttcagttctactctattgcagtatgctgatctcttttgtaaatctgtattaaatgagagtttgctatcggtgactttcagagatgacaccagagatgatgcccatgctgacgattcattctgatgtctatgaaaagggcaaatcctttaagagaagatgtagcataccagtgtttataatctgagtttcatttgattaagaggggaagctctttagaacaaatatcatttctgagcgagagaatgttcagcatctcagcctcatttgtatcatttgataaaagggccccactgagccaagtgtgaggatgatgcttgagccagacacatagacaccagacattcctctgatgtctgctccccaggcttggccacattgcctcccaccaaccccatctcaatgacacatccattacctgccatcagttggctctatggtgctgggaatgacagagtgtatctaccctggatttcagaaaggaccctcctggcttatcatggcaacaccctttggacactcgtttaaagagtccttctttgggccagtgttatccttttgggggcatctggtatggacggccaatttgaatctgactgggacatgctaatgagccattcatatgtgtgggatttgtttctgattcgattaagcttcagagagaggaaagaaacagccactgattagagacataaaaaaagaaatactttaagtgagtaagtggttcatcttcatataggaaagtataaattaaacatggtccaggagatgcgctttgaatagcagctggatagcacaagcatgtccacaaggagacggtgcctcacagcaattgaaagggacttaacccccaaaaagggctctgaatatgctgagtaaataggtgagcccagttagctgataaaaatgactctcagattagagatgggaaggtttttatttggattttagaaaattgctccccactccatcgccgccatattgtctgtgtgagcagargggagagcggccacagccgctgccgcttccaccacagtgtgaagaaaacaggtctgaaacaaggtcttacccccaagctgcttctgaacacagtgactgccagatctccaaacatcaagtccagctttgtccgccaacctgtctgacatgtcgggacccrtgccaagcagggccagagtttacacagatgttaatacacacagacctcgagaatactgggattacgagtcacatgtggtggaatggggaaatcaagatgactaccagctggttcgaaaattaggccgaggtaaatacagtgaagtatttgaagccatcaacatcacaaataatgaaaaagttgttgttaaaattctcaagccagtaaaaaagaagaaaattaagcgtgaaataaagattttggagaatttgagaggaggtcccaacatcatcacactggcagacattgtaaaagaccctgtgtcacgaacccccgccttggtttttgaacacgtaaacaacacagacttcaagcaattgtaccagacgttmacagactatgataytcgattttacatgtatgagattctgaaggccctggattattgtcacagcatgggaattatgcacagagatgtcaagccccataatgtcatgattgatcatgagcacagaaagctaygactaatagactggggtttggctgagttttatcatcctggccaagaatataatgtccgagttgcttcccgatacttcaaaggtcctgagctacttgtagactatcagatgtacgattatagtttggatatgtggagwttgggttgtatgctggcaagtatgatctttcggaaggagccatttttccatggacrtgacaattatgatcagttggtgaggatagccaagkttctggggacagaagatttatatggctatattgacaaatacaacattgaattagatccacgtttcaatgatatcttgggcagacactctcgaaagcgatgggaacgctttgtccacmgtgaaaatcagcaccttgtcagccctgaggccttggatttcctggacaaactgctgcgatatgaccaccagtcacggcttactgcaagagaggcmwtggagcacccctatttctacactgttgtgaaggaccaggctcgaatgggttcatctagcatgccagggggcagtacrcccrtcagcagcgccaatrtgatgtcagggatttcttcagtgccaayyccttcaccccttggacctctggcaggctcaccagtgattgctgctgccaacccccttgggatgcctgttccagctgccrctggcgctcagcagtaacggccctatctgtctcctgatgcctgagcagaggtgggggagtccacccyctccttgatgcagcttgcgcctggcggggaggggtgaaacacttcagaagcaacgtgtctgaaccgttgcttgtggatttatagtagttcagtcataaaaaaaaattataataggctgaaaaaaaaaaaagaaaatttctccccaaatccctatgacatttaagctcattgtcattctctggcagcaccagtgacagtaatgggggccagagatcttatttcaaaacaaagaagtgattacagtagatagcgcaggtgtcaatgggaccctgatttggaacttgctaatacttctgtctctgagtttggggcttctatagggttttggttccatagatatgcctggacttgaactagcttaccttcccagccttgtgcatcgggaagctgtgagggtcagatccttctagattttgtgtcccctgacaagggttggaagagtctggctgcagccctggcctcaccagctggctccctcttgcgtaagtggagttgccacagggcttctgtctgtggctttccaaggaacctggagctgtatgtcatcttcaaacctggacctttcctctaccaccctggctagcttcacccttggtttcctgccctctgctctggttctgagtttgaaccaaactctcacagcagcccgatgtgcaggagtccaaatgtcctgcctgccccttgcagctccctctctcaccccttggggctagatctgctccctgcatcctcagcctctagtggggtactgctttgaatgaactcatcagctggaattgggaagcggtcaccttccagacactccatctgtccctatacctggagctttctcatatgagccccacacaatagattgaacctctggaaactggtgcctgcagggaccatgcctctttggtcaccttgcctctttacatactggcagcatcacagactgaaacagcagctctcagaactgctggaaatagaggttacccaggaaatgtcctattttgctcacacagtcccctgaaggctggctgggaggctctcctgtgcagcttttctccaagtagtgacttggggactctgattgcttctcttgtgggttcagcatctttgaacttcaagttcaccctggcttaaacatccagcagatggtggggtggggagtagaagtgcacctaaggagacacactggatagtcacctgccttccccgggaagtggcagaggccatgtcctctctcatctcatcgatttgcaccctcctgactgcaaggggtgcagggaaatatggaggagcacccaggtgtcagtgagcaataggggtctctgccacacctttggagaccactctactcctggctcagtttcccaacccctgtatgtcagagcctgacgtcttcctttttccaacttgtcttgagtcccatctggcctgagtttgaacaatagtaatcaggcctgttggctgatatgagatttgaggtaaccacgaataagcccttcttggtcagaaccattaaagataacttctagtctcaatgaccacacatttgcaaagcagtcctcctggaatgtccttccctgaactcctgtggcccagtcattataggcagagcactgggtccaaggaaaagccaggccccctgtatgggatgggccagtttgctgagaatgacacattactgttgcccctctaacttgaccctgggtttcctgtgggtaagcagctgtttcagcaaatcccagattcctgcaaaacagccttttaagtttttcttcatggaaagcttccagacattccagcccagcttgtctctccttggaattctgcccaatgaatcctgctgcctctgatagttatgagggatccctttcaaacagaggaactgcttcaactgtttgttagggctaacccaaatgttcagaccccttcagggacaccttccaagaaaaagcatcatttttttttccaagcagcaattccacacagaggactcttcggaagtgttgattgcaagaagagggcttgggaaaccatatcctcagggagtgtttttctgcaggctctgatgaaaggaataagcattgtcagattttttaaatgttctcttacactaaaatacattaaaataactaaatatgtaccccaggaaacctgggagaacaccaagtaaagtgcactgaggataacgcagaactaaagcctagctctggttccttcattcgtgcaatttatatttttttgagcaccgctcatgtgccagccctgtttagtgtcttggtgaggacaaagttgacatgagccttctctcagagttcggtattgtgggcacataaacaacaaaaaacctctctctcactagtaatcaggggaggttgcaaattaaaactgcggtgagggagaatttcttgcccatcagattggcaaaaattttaaagttggacaatgtcaaatgttggcaaggataggaagcaatatgagcctcatccatgctggtgggagtataatgtgatccacattatttggaacagtgtcacttttcctaggaaagttgaacatgtgtatataacctatgctccagaaatttcagtgagataaatacatggaggcctgcccactctcgtgcaccaggagacacatacaagcgtgttccgaggagcaccatccgtaataccggaaacaagactgtcgaccaactaaagagagcataaataaattactgcatatttatacaatggaacactatggtgatgaaaataaatgaagcaagaagcaagttgcaggatgtgtacaatctggttctatttatatagcgttcacaaacaggcaaaactaaacaatgtgcagtgtaggtttatggcaaggaaattattaaaaaaattcaggataatgggttacctctgggggtaaggaaaagcactcagaggtttctaaggtactgccaaagcattgcttcttaaggggggtggaagatcaacagttgttctttgtactatgtgtctttaagctgcacacacacacagagttatcacacatactgtgcaagaggacttacaggtgatataggaatgcatagccaaggcatgagccaaaactagggcagccagggaaggtaggtgggaattagcaagggaaataagtgtatacgtggtaggggcatgggaatttccagtaaagagaatggcagaaagaggggacagaaacccaagaatgtgatccacctatgtccatggcataactggacgtaactagatggcatgagagatgaggctgcaggaaagagacagggccagttctcagaggtcttgcaaaccatgttaaggaatgtgctgttatctggagactaaaggttaccagtgtgggagtgagatattttggagggaggttatctccacactgacattgtcttcatcctggctgctctgttgcacgccctgaacctgacttgctgatggcctctggcttttgtgttggccttgtccagatttgacctctcttccttttttttttttttttttttttcctgagacgaagtcttgctcttgccacccaggctggagtgcaatggcgcgatcttggctcactgcaatctccgcctcctgggttcaagcaattcccctgcctgagcctcctgagtagctgggattacaggcacccgccaccatgcccagctaatttttgtatttttagcagagatggggtttcaccatgttggccaggctggtgtcgaactcctgacctcaggtaatccacctgcctcagcctcccaaagtgctgggattacaggcgttagccaccatgcccggccctctcttctctttcttattcccatgcagagccaggatagaatgaggtgagtgaaatgcccagggtacaaaattgtaggatgcctggagtgtcagtgtcctgcccacccctattgtttgcctacatctctgaccgttcagccactctgcgagtgactttctggtcttctgccagctctccccagccctcagcctcagcctgcatccacctcgtcttcctccccatagcctgctggttttggcttttcactcttgtctctgcttttgcagccaagttaggcgagacagttacacgtaaaaagataattaaccacatgagccaagaaataaggaccacatgagtcgtacaagtcattagttccaagagtttggaggagctgggccaggccggctttggatggatgtggagagcaggaaggaggctttctgggctaagagaacagtgggaacagtttgccaagagcaaagagctcattaaaagtcataagaagatgaaagctgcacagtatctgagatctgatcttgtggatgtggctatgaagtacaaggctgaagtgccaccaaccccagtcccttacccatggtaaccgtaatgaataaattgtggcatacttctccactgagactggacagagcctcagaattcttcccaacacagtgcttcagaaggatattaacaagcaaatggatttcacacaggagtgtaaactcatttgccatccctgtcatagactatggagcagtcatgagtcttggagtagaagagattatcaaactacatcccattgctttgtctactatgtgtccctattttaacccaatttacaactctcagttgtgtctcaagtactgggcatcatttgaggcactggctagaaaatgcaaaatcacagaatacaaaaagtagaggggacctaagacaacattgagtccagctcccccatttggcagctgggggaaattgaggcttgggagcaggaggcttgtttgtgtgagtggccaatacaagatgtaaccctgaccttgtaccagtggctcctcagcctgggataagaaagtgatctgagcctccctgagaacccactacatgcccgcctttgctcgtgggagcttgtcacatacagcatctcttttaaacctggggaatcattattcccaagaaaaagctgacatccaaagacaggtccaagtcaaagactaatatatgacagagccaggatttaaaccctttccaccagcccctaagacctccatgctttcttgtatttctgggtgggtgtttcaagcctcttcagaagcgataacagtactagggttttctgggaagggccggtggtgagtgtgattttgctctgccccaggtaactgttctctacaatccactttaggttcttggtcacatgtgggaggtggtcccagcagctcctctgtaggcatatctgagcattttgtgaggttggagcctttctctccaatgagttcatggttccacaagaggaagctgcctgctatcgcctgtgctcatttgatgacttcctaggttttacgacattaatttaagctctgcagcccaagtaactctctttgattgcagcagtatgcgcttaaatgtcagagctttgctgaaaaaccacttgagtttgaagaaagtcattgtgttcagtaaaatctagccacattttatgtttatgacctttattagggcatcccgctgagctagttaaaaccatgcctgtatagtcagtgaaagcccaggactctcagattcctggattcactcattcaaataatagttattgaatatagactaagtggcaggtgctgatgtatacagtggtaaacacacagacacgatcctgtttccatggcacttatagtccagtgaagggagacagacatttaaagaataaatacagaagtaaaagtattttgagtaagtgttatgaagaaaaaggcagggcactaaagatattcagaggggatctaatttacactgggcaaatcaaaagaggtcgtatttgagctgggtcataagtgggggataaattattcaggacgtgcgatagcaggtgcaaaggcacagagagaggaaagaacttagtgtagtcaaggaacatgttgctcagtgcccgtcagaagcctcaggacccagccttgtgctgatgtgccgtcaggtatgcccagtgcctgcaggactcagcacatgccctcaccatcgtatgtgtaaattagggtctacatcttggtggtttcttcctgtgccctgttccctgtgaccacacctgccttctctgtttccaacccttggtgttcatttctcaggcacc

SEQ ID NO: 97694 - DNA, 44807 bp, Homo sapiens
cagctgcggtgttcccagatcacaaacatttaggcttgtgtccactgtaaaggttgcttcagaattttctacctggatgtctgtatatccagatatgaaatgactggacactgtaggtggtgataaattcttccaccctgattactcatgaagcagaaataattagtgcctacctaacctgtgaataactatttgaattctgctattttcaagggtaagtggaagaactagtaacccagtttataactaccagttggcccgatcacctttgcctcaaagacctgccccttgggatgctgtgataggtttagtttttgccaagtaccagtgctatttgatagtctcaccttgcctgctcttttgtataagtgtagcccatgctgtgcattgcacgcagtgggtacttaataaatactgaatgaatgcagcttatcatccatcatttggtctgtttcggtctcagtttcctctatgtaaagtgagattattagcaaatgagtgcttatgtattttccagctttaacattctatgggatctctggatagccattttaaattacctcgtatctccaaggctgtttctaagcaacacagtaatacttccctggaatccttgcctgacctcttcagcccacacaggtgtgtctcactgggccttcttattatctggtggtactcctcaggttgttatttagcttttcatatatgtaggtccttcccttgcaattagagtgtaggcttccaaagctagatactatataaaatatacaaataaagacatatcacccgaaggcttaatcttaatgttttctagagggaatactgggcttcagaaaacagaagaatcaagataaatgtcaagtttgtggttagggaaacttggtgtatgatgatcctgttcttcaagatagggaattctgcaagtggtacaggtttggagaaggaaggagagcagatgactttagtgaagtgccacattctatacctttttctgggagactttcaaagatcattaaacaagaaaagattttgagatatggaatcttggccaaatgaacatattattactgtgtttagcccagagcttcccaaatgattaaacatagtgttgatctaaagaaagaaactgaggcaaaattaatatagggagcgagtttatttgggccaaggttgaggagtgcagcctgggacacaaaggaagtgtgaaggacgaataaggagagggggcagttacaaaggttgtttgcaggggattctcattggttcacagaagtaacattgattagtgattagctatacattgttgaactctaaggtatgagttacggtgtccagcatatgggattgttaggttaatttatggctgcttaacatcactcagcgtagagcccacatagcaagaagagattacttagctcaagggaggagtgagaggtgactgctgtcacatttcaatgcctcactgggccagataattcaaaggggctcatacttctcagataaaaagtttcctttctttcccaatagcttttaaaatttttattatttttttttattgaaactgagtcttgccctgtcacccaggctagagtacagtggcataatctcggctcactgcaacctctgcctcctgggttctggcagttctcccacctcagcctcctgagtagctggaattacaggcatgtgccaccatgcctggccaatttttttatttttagtagagatggggttttgccatgttggccaggctggtcttgaactcctgacctcaagtgatctgcccacctcggcctcccaaaatgctgggattacaggtgtgagccaccacgcctggcctctttcccaatagatttggaaatcctggtgtatacaacacaagaagagaagcagagctaggaaggaaccctgagaacagctaacttttaaggaatggctggaggaatttggaaagtaatacccagagaggtaggagggagttgtaactgctggggtttaatcccagctcagttcttccatagatatttaggaaaaccaaatctcgtgttttactgtagaagagcaaggaccctatgagccatgtctgggaatgtggagagctctttggaagaaacggtgtacccaatgtactcaagcacttccagtttcaactgaaaggggcccatgacattgtcattttctcttctcaaagaaaccacccctttagctaaaaggaaacccgtattaatactctcaattctaagcacatgagaataatccaacagctactcttgaagctataatgaattgtcttaaaattagatctaatatagaggaagacaatctaaaactaacaacatagaaaaataaatattctgagtgagttagttacatcattctttccctatcgtctgggactggactcaaacttccctttaatggtttatttcaatctcaacaatattagattaaaaaaaattcctacctgtgcacggaaagctgagaaagggtaaaaaaggtacatggtgcttatgttggtgggattgtataatggggtagccactttggaaaacaatttggcagttcctcaaaaaattaaacatagagttacctatatgacctagcaatttcactcctagttgtacaataaagagatatgaaaacgtaagtccacacaaaaacttgtatgcaaatatttataacaacattatttacaatagacaaaaggtagaaacaacccaaatgtccaccaactgatgagtggataagcacaatgtggtatatccatacaaaaaaatattattcagccaccaaaacgaatgaagtattcactgagatagcacatggatgaaccttgaaaacactacactgaattaaagaagccagacacaaaatgcaacatattgtttaattcatttatatgaaatgtccagaataggcaaatgcacagagccagaaagtagattagtgattgcttagggcaggtgaagggaggaatggtgagtgctaatgggtataggatttctatggggggctgtgataaaaatgttctaaagttattgtaaataatagtgatagatgcacaactctgagaatatactaaaattactgagttgtatactttaaaatagtgaatttatagtgtgtgaattttatgtctcataatgctttatttaaaataaaagaaaacacaagggggatgcatactttcttttcaagatatctaggtcttcaacacccaactgccttattaccagcagtttaccttcacagctgtacagcagctgagaggtggtcagtcttattccccattccctgtttttccagaataattttaggtggtcaaattaatctgtctccaatcaagatttatttttctgctagtgcaaataacattcaactgttggtttctgatgtatttgtaccatcagctttgtcttaacatttatacaacatgacataggacatgttcatttatatagtttatctgtacatttcttaggtcacttttcaaaagtcaggtttgttgaggtataattcatattcagtcaaattcacctgtgagttatatgcattggtggatatttatagtaaccaccaccacacttgagatgttgactattcccatcactctaaaatgtcccttcgcacccctttgtagtcaacctcccctccccacctccagcccctgctatcccctgatttaatctctacccttaagacacttttcatttcctgttctgtgttctcatggttcatcctgaaatgaatctctaccagctgggatcctgatttgtatccctacggtgcccaatgtggtacctggtacctaaaaggtgctcagtaaatgggtgctgaataaatgaatgcatattttgtttttcaggttctatcaaatcatatgggagactttgttccctgatttccaggatgtgccatttgaaaggggctatttatactgggaaagaccttcttgcagagtcttatgcaacctttcaaaaaatgggccatagtgatttccaatttcagagatttttgctgagcatttcaaacatatccctagacttggggcttacaactttgttcatccagcaagtagatggaaatatcctctctcaacctgagcaagtagatggaaatagactctgggaccatatgcagctgttcttctctcctccaagctctcctccccatctttgatccctccatctccacttggcatggccccagagtcccatccagagcttccctgaacaagttctgggagattccagaccacgtttatgaagaactccaagggtagagccgacatctgcttgaagctttctcatcatgcaggttgtggctctgtgaaaacccacctgctgctggctcatcagtcaggcttggatcccattggtcctttctgagctaattcctcttctatcttgatgtgtgtgaatcagaaactgaacattccagccaggtgtggtgacagagacctgtaatcccagcactttgggaggccgaagtgggagaattgcttgaggccaggagtttgatagcagcctgggcaacatagtgagatctcatctctatacacacaagcgtgcgtgcgcgcgcgcaccaggcatagtggtgcatgcttgtagtcccagctacttgggaggctggagtggaaggattgcttgagtccaggagttcaagtgagttcaagtacagtgagctatgattgcaccactgcactccagcctcagtgacagggtaagaccatgacaagaaagaaagaaagaaagaaagaaagaaagaaagaaagaaagaaagaaagaaagaaagaaagaaagaaagagaaagaaagaaagaaagaaagaaagaaagaaagaaagaaagaaagaaaggaaggaaggaaggaaggaaagagaaagaaacaaagaaaacaaacattcccagagcaagtataagagtattaacaggcagtgaacaaaatccccctttgccctgacagttccatgaaatgagctagtactcaaagaaaacttccctttcttgaaaagtgtgggtattttcccccagaccatcttactatcctcaagcagatgggtttccacgcactttctggtgctgacagccccctgctgtgccctctgaacacagacactacaaaaaacccatttcacctcttaagatttgcaccttgcctccaagatgaagccttgatgctggcatccgaatgtatccaaataaaacctaattccctttcttcctcctttgtccccacacatgcaggccgtggcttccctagagtagctctggtagacagttcctgctcctaggagacagttgcacaatgtaaacctgcaccaagatgtaaacctgtaccaaggtcaaagtttcagggtgtgaactccttggtacaatgatgaggttctgctacatgctgctacgtaaacaaaataccgaaaaggtcttaattttttgctacatggagtaattgtgttcataaccccacgtggacagacaaatcattagtaaatcaaagggagccaaagaaattctttctatagtaagggtgacagggtggggggctgtgaggattttgggggtggatggggaattggagacaaggaggcttcagaaaaagagaaaaagaaaaaagtgaggtttaagtagaggaaagcttatattcttcatgaaaatcaaaagctgtggcggtcaaacttttgtgttagtagtaccatggtgaaaacatattttactgcgttgcgcgcgcctcacacccacacacacacagaagtataatggaaatcaatttaaaataaaatgtagcatagctagctataagcttaggacatctgtgtgtgtgtgtgtggccgcgaacagcctgacccgggcggagcgcaccctcgggccgcgtctcccccgccgtaccagcctgcctgaccgcgcggaggaggagggcgggcgcggtgccgccggggcgggaaggtcgcgggcggctgctccggactgcagctcccgcggcggtggcggcgtatcgggacacggcgcgggatggacgcgcaggactgccaggcggccgcatcgcccgagccgcccgggcccccagcccgtagctgcgtggccgcctggtgggacatggtcgaccgcaacctgcggtgagtaccgcccggtccacccctggccgggccccgacggctcaggctgcgcggggatggggcagggggccagggcgcggccgaggccgcaatcccctctgctggcccgggcccaaggcccagcattgtggcttccgggggacctcggcggccccctgagaactctagggctctttggttgcccttgctatcctcagcctcaatcccaacctggaccagcgagactctcaggtttggtatttcaggaagttataacttttgggggcttctgaaatacagatgccagggagatggttgaattcctacaccaatctctattatctgaccattttgctaacatacaagatggatctgaatgacattagtaatagtgacaatagtaatatatgttgtaatcttggacgggatcctcttaggtcaagggcctatctgtgtaggtggaaaagaatcagaaaatccgtgcctagttccctgagtgtgaactccctggcatgtatttaaagaaaacacctccagtatgctaaagatgtacatagtgtgttgaaaccataacttggcattacctgtgccaagttcttatgttgtttaagtctgaaatgtatcagtgggtgtttcgggttttgtttctgttttcttcctcccatggatcctcggtttaaacagtaatcttaaattacctgaatccacctgcaacatattgtcagtcttgtttgcactgaagccaggtattggttggagatcgtggacccaggacacgtgggtatttcatttagttttgttggtgtgggaaggtattggcatttttacttccctctttctattccttttgtttaatttgtgctgattagaaaatatccaaaaattacatccagacacaggagacctcactttggagtgcccagagtgatgatgacaaacggggatcttttctctctctctctctcttttttttttcttttttgagacaagggtttcactctgttgcccaggctggagtgcagtggcacaatcttggctcattcccagggctccagcgatcctcccgtctcagcctccccagtagctgggactacaggcacctgccaccacacygagctgatttttgtattttgtgtagatatgggttttcactacattgttcaggttggtctcaaactcctggagctcacagattccacctgccttggcaccccaaagtgttgggattacaggtgtgagccactgcacctggtctcttttctcttctattcctttttattctcattgcagacagcagagtgctggcagctctgcaggggcccagtcacctagaacccatgcctcccagctctgggttggatctgaacacgtggcagaatgtcctgattgcacttgtcaaactgcatattaacaggacttctctcccagatgtggtgattctgggaacgttgacatctaatgtttttcactttgatggtctctgtggaattgatggctgattatttaacatttatttggcagtaaagggcatttattaggcagagaatcaaagttgcacatcatactcatagagaataacccactttgttgataatggrgtgggagatagggagttggggaccatctattacttgccttactaattagtgaaaaaagtctcaagagacacttcctgaaagaacaaaatactagcgtatgtcttcatctgagcagaagattattggctaccataagatgtgctgaggctgaggcccagacccatttccactatcccaagtcctctttgattcttggagccgggttcacttaggtgagcaaaccttcatggagggcttgccatgcccctggccctgatcatggcactggaactagtgggatgtgttgtgagacccaagaacatttcatcatatgattttttcagtggctattttttaatgccttgggaatctagttatttattttacaaaaatttttatcaaatccagttgctgcttaaggtgggtgggccaaggagagtaagtctccactttacaactggttttctttaaattagaaaaatgaggccaggcattgtggctcacatctgtaatcccagcactttgggaagccaaggcrggcagatcatgaggtcaggagatggagaccatcctggctaacacagtgaaaccctgtctctactaaaaatacaaaaaattagccaggmgtggtggcacatgcccgtagtcccagctactccggaggctgaggcaggagaattgcttgaacctgggaggcggaggttggagtgagccgagatcgcaccactgcactccagcctgggtgacagagcgagactccgtctcaaaaaaaaawaataataaaaaaagaaaaatggaaaatgtgctccagaaggaagttgggggaaaccaaaggtttattttcctcctcatttcccccattccaccccaagtcattacaatcctagatagtgctcagaaaatgtgcaggagtaggctgataaatgtgttcattctttccacagcgttggttctttattatctattggatagtattctagtcttggtcacacagcagtaaataaaacagacaaaatccttgctctgtggagcacacattgattcatttgcaattgtaagtaaaaaaaagaaaatgaagtccttcctctttcctctgaagctaccaataaatgttgcttccttctcccttacaaaataaatgcactctctttctattttcaacctatgcgtcaatatttactgagctcagccctgggctagacagagggaaatgtaaaggaagcattctatgccatgttgttcttgttgtctgtggcctgatagagtggagaagacagggctaataatgggaaagccatcasagaacaattcaaggccagctgaggccccgttattatttgtgggaggaaagacaagagaggagaggtcaccatggaatgatctctccaggagactttgacaaaaaagagatacttccatgggtgtgaaggaagaggggatttggttgggaggatgtctcccggtgcttggtgacaaacacatgtcgactgagtgaattggcacacaggttgaaggtacctgtcttaatatttgaaatagtaaatgtagttagatttgggcttcccaaagttggtttgcagaaacctctgagcatgagtgattcaccctgtagcagctcagactccaccagctttcaccagtaagaatcatccagttaggttctgagtcccctgtgggayrctgtgtggttacagctgcagctgatcaaagggcaagtgaaagaacaccaaagcaccaaggtggccgtttgatgtggctggccgttagcggggattgggctgaaactgcatcctctgctcaaataaggtctattagccactggtgacttttgatcccttactgatctaggggaagtcaaattgacaaccccttagttaaaagaagctgctttgcattattgatgctctgaggatctggtcactckgttctcttcccgcagtgcatctcagaaaagtgcctcgagctatttgagagaaggactgtgtatgaattattccttaaaaaacagacacacatttccctctactgcctctgcttcccaagcagaccttcaaaacatagcttagcgggagactaccctgcctaccttcaaaagacagcttagctggagactaacaggcagggtggaggtgagtgaggggagcttagaaggaagccagcaggagccagcagctggaaggaggcacagttcagccttgggttcagttctgtccatttgggcttgatctgtggctcaaagtggcttctctgggttttgatttcttatctctaaaatcagaacaacaatgtcctctccttcctgccgccttcatggcaggggtggtggggtgctattttaaagtattatgaaacaatcattttcatttctttcttgctgattttatgagtaggcaattgccagcgtatgatgtattcaaaaatctatccattacccttagcccacatatcttttccacttcttgcagaactgctggaaattcatcagagattcattatcttctctcttcgtgcctcttccaaacacatataagtgctctgatttttaagtcattaacacttcagggggaattaatttttttagaggtctttctttgatgactttgttatcagagggctcctgagaatacaggagcaggaaggaggaaagaagaaaggacgggaccctgctgagagggctaaggtgcagaaggagatcttaaaacaagattgtctatgagcagaattttgccagaggccagctttgttcctggggttcatttctgcttacatggatgtcaccaagactgtgacatcctggagatcattataagactatgggatcagacagacctgggtatgtgtggctctgccattcattgacttgtgaccttggaaagattacttaactttccagtctcatttgcaaagcaaaggtaataattatcttccaaaaatgcctctggtctagcatagaaatcagggcaggggagacaatttatcaaaaatgctttccagcccctcaaccttaccatttgattatattaaacagttttaacaatgatctcttrcaacatggaaagggacttacttaatggataatgtgggcaaaaactggaagcaggaggtgatgacattgacctcctgtatccctcacctctctaagaccctcacaagagaggtggcttgagacagaggtgtccttagtgacccctcatggacaaatcgtcacttgtatgctgacagctcctgattgggtggtttgtgtcacagggaacaatagcgtaggcaagatgtgcatgcgcccatcccactccctgaccaggctccagccctgtgcctcatgggtccatctcttccagggatctcatctcagaagtggggtctcctaacactggctcatttcttcctaagataagtccagaatatagaggatctagggattattccctcactgcctgagactaatgataagaatagctaacacatatagtgcagaattgtgatataattaaaaactgcagcaactgttaaactgtctgaatcctgtttactggtgactttggggtccagcctcagccttctatggggctacagtaagggaccaaacctggctgtggtgcgaacatatcccttcccttcctgtccctgccatgtcctggctttttcagctactggttggggccctgccctattactttccttacctggtttccccttagtcccagtcttggcctgccgtgtagataattccttgtcattgtgtaaaagattttgcttaaatgccatctgacccagaattcccagtgttagtctctgaaatttgggggcggatcacctgaggtcaggagttcgagaccagcctggccaacatggtgaaaccctgtctctactaaaaatacaaaaattagccaggcatggtggtgggtgcctgtaatgccagctacttgggaggctcaggcaggagaattgcttgatcccgggaggcagaggttgcagtgagctgagaacatgccattgcactccagcctgggcaacaagagcagaactctgtccaaaaaaaaaaaacaaagaaaaagaaaaaaacaaaccaagacaaatggattaatttcgaaaaccttgtgtgtttcccaataccttgcagatattttccacactcctgttcaatgctcggaagaaaaattgctgctctgtatgacagctttactagtaaatccttaaaagaacacgttttccttcctctgatagacatgctaatttattttaatttttgtaagtatggaccttccataaattttcctatataatttttcccaaataaagacctcagtacccttaaagttgtgacgtagtgaaaagacatgtcagctgtaaaattgtggttagactgaaatggtctgaaacttatttaatattgactttgaagtctagcaggaatccttgcaaactgttgggagtaaagagagatgcatggccttgtgggtgggggttccattcacagtccttctagttcttacctgcttgcctcctggtaagcaggtagttctggacatttcttgccttttggctgatgattaggtttcaccgaagtagcagaatacttattattttcttctaggcctttttaccttcttaggggaatggtctccactgcttttaaaaagctggagacaaggataaggattgaataactctgtttctctattatgagccatgacactgatgctattttaaaatctagcttttaggtttttgttttttgcccctcctctgcaggctagtcctagctgataaaataaaatactctgctaggagtttagtgtagtagcttgcaacttagaagcctgttaacctgtgtaggctaattcctttctttgattgtgattaaaaggcatggaatttgattcttgaagttgataatgatttttactttccagtcaaagccccatttcttgtggatttaaagaaaccagagttaaagattcctcacacagtgaacttctacctgagagttgaacctggggtgatgctagggatctggtgagtgcacggatgggacaccgggttgcttgatggggcaggtgttcctgttaggactcagaggagcagtgctgtgttacctgcccacggagaggtcggtgctcctggaggtacctggaggctgtttcctacaccttcctcttctgttgatttgcttgattttcctaagaattttgctttggagtatagacatttaggtgttgcccttggcttctggcctcacccatcccttctgccttattccataccacccttgccttcatgcccttaactccagacacactgtcctcctaggacatgctctgccttcaaggcttccttctatttctcagctccctgccttccctcttgccttgctaactgtctactcatctattggatcttactttaattggtaattttcagaaaagcctttcctcactgcccgttttaggtatgtgctgtcatggccatctgtgcttgtcccttttgacaattattcccattgtcatgaaataaatgtttgtgtgatgatttggttaatatttgtcttccttacaagactatagcttcagcaggtgatagactttgttggtgggttttcattgcttagcacaatgtttggcacataaagggcattcagtaaatatgtcagatgaggtcatgaacagtctattgtcttacaatgctaaccttaacatttcttctgtttagttgtaatactcattcttggctgccaagtttccagtgacctgttttctatttcatctccctgagttcaaacctttgatcataaaatgtttaggaccaacccataacttcttcctactctgcagggtacagttcacccaaatgtgttggaatttagaaatctttttattttttgcttttgccccactggtccttggtttggtgagtcagctatctcatcaagatcagctcatccagcaggcagcagtgcctatattcggagtacagaggccctggggatgatggcagactttctgtccttaartgatggagaggacagaagatttgtcacccttagccagttctccacatcccatggtgacatgtcatatggcagtgtttgcatttgcagcattcactggtttaacaaagtggagaaactggaactcacacagatgtttaaaatcacaaggttwcttggtttctggagcaaaatagtttagtgttttagttcttttctcttacataaactggtttctctttaaattatttcctacttatctcttcggccgaactcatggcagatggtaaacatctattatcttttacttgtttccctttttaaaaaaaacaatttcaatgggctgtacctaagaactgcagtcttggaaaattaacaggtgcagaagtcagaagaacgaaaacagtaagtcgttaaaaggcattgtctctgtgcatggggacatggggtagggcagttgtggttctcgtcataagactttttgtggygttagatttttatttttgccatgtgcatatattagtcggataaaaaattaaaatatatgtatatatatcataaggagactttcrgcctttggaaaggatggagaattcctctttctacatttgtttaaacctcccttgctcttcaggcacacagtccccagctgccggggggaagatgccaaggggaaggactgttgctggtatgaagcagcccttcgtgatgggaacccaattattgtttatcttcatggcagtgcagaacacaggtcagtggctctgcttacatatttttttttcaggagattgagagcatttcagccccatgggggaatgaaggacagggctctgtttttaactctgtaggcatgccttcacatatttcttctcctttgttgaaatctgagggtgttctggcaataagcttcacttaaaaagattattctatatgtagaataatgtggatccctaactgaggagaaaagaataactcttccaaaagttggatgttgatttcaaagaaagtgatgattcctttgctcccgaagagtgtctgaaatgatggattgaacccatgaatgacaggaaagggaacaggcacgcattatgggggaaaggaagagccatttccagatcagagatttttcagaacactacagtggagagtcctttatttagctttaatgttattagctgaaaatatgactccttaagagaggtcacacggaattctgaccacaggtactggggaccgtctgactaattctagaatattcatacctcagcccattctctgtagtcccaacctcgctctgtaacaaagaacgtctcccaggagtctggctccccttcgatgtgctgtcagagcctttttgggcctgtatrattatgttgggtgacgatcatcggctgtgactgtgcccctgaagcttggggcaggggcgatgtgcctcagaaacacacagatctccaccatcttgggaggagcacctgcctgtgactcccttcctccctgtctttttctggcaggtgactcgcctttctcaagactcgccttttctcaaggggcttttttgatgtgtccattttagagccacatttgctgaaatttcctgtgaaacccagcattttttttttttttacatttccccttctcctagttatttattcctccaacctgaaagagaaaggcgtgagatcagataccagcagcacgagagtgatttttattgaatttgttatcatcgttcctaattcttgctttttttttttttttttttaaacttccttcacagggcagcttcgcacagactgaagctggtaaaggtatgtctgaagaggcctcaaagcacccatttcataagtctgtttgatatgtcataagattttcctcaggccctccgcgtggttgttttttgagaggtctccagggtactggtcagggtgggttgtggtgtctggggctcaaagtcccaccggtggacttctgctcctacactgatcaaaacagaaccgagcttctctaggtcccaaagtaccttcgtgaacttaataayctcattgccaaatggaggtgaagacatttttatttgctttctctgagggctgggggatgggttgagagaggttttttttgttgtcgttgttgtggttgttgttttttgagattctgttgcccaggctggagtgcagtggcatgatctccacttactgcaaccttcacctcccaggctcaagcgattctcctgcctcagcctcccgagtagctgggattacaggcaccaaccaccacgcccggctaattttgtattttttagtagagacagggtttcaccatgttggccaggctggtcttgaactcgtgatctcaggtgatccacccacctccgcctcccaaagtgctgggattacaggcgcgaaccacctcacccggctgacgtttttatttgctttctctgagggctgggggatgggttgagagagtattattaaggtgcaaaatggtcactccttttaaaagaatcaacctttttaatttctagtggttataggctaaagacacagaatgtctgcttttttttttttttttttttttttgagacggagtctcgctctgttgcccaggctggagtgcagtggtgctatctcagctcactgcaaactccgcctcctgggttcatgccattcttctgcctcagcctcccaagtagctgggattacaggcacctgccaccacgcccggctaattttgtttttgtatttttagtagagacggggtttcaccatgttagccaggatggtctcgatctcctgacctcatgatccgcctaccttggcctcccagagtgctgggattacaggcatgagccaccgcgcccacccagaatgtctgcttttaaaaggcattcaaggctgggtgcagtggttcacacttgcagtaccaacactttggaaggctgagacctggagttcaagaccagggtctcaacttaatgagaccctgtctctacaaataattttaaaattagctggatgtggtggtacttgcctgcaattccagctactcaggaggctgaggcgagaggattgcttgagcctgggagtttgaggctgcaataagctaggattgtgccaccacactgcagcctgaatgacagagtgaggagaccctgactcaaaaaaaaaaaaaaaaaaaaagtcattgaaaccctggcttcagcccatgtaaggctttgtagagtagcacggtggccacacttgctctcctcactccctgctgcatgactctggtttgttgggacagcccctgtgtttccaggtatgcagaagatggcaggctttccacttagccatatctgcctcagaactggttgaacaagctgcctgtttatcctcttccaccctctggttaggtaatctccgctgctggtgaccggctggtgaccacagggacttggtctctcctcccacatgctggctcccaccttggagttctttcctgatcaaacaatattagtggggcccagaatcctggcagtaccagtatctccagtgctttcttcatcctctctcccctgtgcagacaggaagctcctctcctgtcccctcccctcatcccctcatcactgccttctcagagccaatgcttgtagagtggcagggggctgggtgcagtgttgcccaggagtaccatgtttattcatttttaggtttgctttcccctctgcaccctgccctttgcattccccacgtggaacgtggtaaagctaatgtccgtgagaatgtgcgtgcttttcccctcccactcagagctgtctcaatgttcccagaaaggagaagagctgtaggtgtgaaatgctgccaggtgatccttgtggtagttaggacgggtggggaaggagagtggctggtatggcaggactttgcccccaggcagatcgtgggcatcaagtgccagtgccatcattgcccaacaggaccaaacttccttagcccttcctttcctcctctggataggtgatttctttaaaaaaataaattttcattattaaattttcattcattcatgtattcatcactgcaacagactaatacagctattttcatttatttgcattcccacctagtttttacttctccttataaaaggcttttgttactatatgactgtatctatatatacgtttaggttgtgctcttttacttcccactattttatagacattcttccatgttttcacagtcactagttagccagtttaaaaggttgtgtcattctccattgtatttataagcaattgtttacttaactgttacactgctattggatataagatttttcctccctgcatttgctttaactaatattgtttcagaaaactataagcatctagatttttcttctttcatgtctttttcctagaaatgaattcttaggagtagggtttgttgcagttgtggttcttgggttgtattgcctagtggtccttcaacacgtgctgcaacacacacgcatattcccattttcctggatgcttagctgcttggctaactttcttggagggaatgtaacagatatgtaaaaggtatatttagctccttgttattagtttaatttgtatttacaagttcctaatgaggttttgccacccggatataaaatgcagtgggaggaagcggagtatttggacaggggcagacccaggagtgaatcttcgttctagttctagccagttgggtgatgttaaataagttacttaagctccgcaaggctcagtttatctgtaaaatggggataatatctactttacagtacagttgtgaggattaaataaagtttcaaaagtgcctgcacagtaaaattttgtccttttttatctctcttttctttacctatgattgtatttcttcttcttcttttttttttttttttttgagacggagtctctgttgcccaggctggagtgcagtggtgtgatcttggttgctcactgcaaccttagcttcctaggttcaagcgattctcctgcctcagcctcctgagtcctgggattacaggtgtgcaccaccacacccaacaatcattgtatttcatttcatgaaaaattatgttttcattattcatatttaatataaatagcttcccctttttgattgcttctrctacaactctgtgtagagttcttattctcaaggaatttttaaaaagaracatttatagacctaaaggcgactattattgtttctcacttttcagaataatatttacatatgtaaatgttaaataacttggccaaggtcacacagcaggtaagtggcagagccagcgtgagaccccgggtgtctgaccctgctcagccttcctgctctccgtctctcccactgagcctcgccttctcaagttggaagtcaaacaccagatttcaaaaatacrtctttccccacctgttaaacttrtgtgtatgctttgaacatacagatacctagagcatcctagagatgtttctgacagtgcaacaaactttctttttaatcttcatcgaatataaaatagctgtttttctattaaaacagctgagttttaatagctcagagtttctgacagtgcaacaaactctcttttaaatatcttcatcgaatataaaataatagctgtttttctaggttctgcagttaaaaaaaatactaatgaacaagttaaaattacctttgaaagagccctccttgtgatgtgatatggatggatatagggaggagaagccttttctgttttcatcttctaattaaagtgataacagctcctttgttacctaggtgctgagtgatgrtggctttcatgtcttgtctgttgactacagaggtatgtgttaagaacggtgtacaaagatgtttcagtaaccagggggcctctgatgacccctcattttgaaggcagtgatactgtgtttgccttttcttgctgccaggatttggggactctacaggtaagcccacagaggagggactgactacggatgccatttgtgtytatgagtggaccaaggcaagragtggcatyactcccgtgtgtctctggggccactctctgggyacagggtaagtgagatctgcaaatgtgtccttaggcaggtccttgaggctttagtgtcctatcaaaggcarcagccagtagtggagggagcaccgagccagaagacagggactctttgctgatcattttcacacactagaagtggctgaagatcttgccatcttaccatgctatttgtaaaacaacagaaggtcccttcagctctacggttatctattacattgaagtccaagtctttctgagggttttaaaggaaaggatccttggccaggcggggtagctcacacctgtaattctagcactttgggaggctgaggtgggcagatcacttgaggccaggagttcgagactagcctggccaacatggccaaaccccatctttactaaaaataccaaaaattagctgggcttggtggtgcgtgcctgtaatcccagctactcaggaagctgaggcaggagaatcacttgagcccagggaggtagaggttgcagtgagccgagattgtaccactgcactccagcctgggtgacagagtgaggctctgtctccaaaaaaaaaaaaaaaaaagaaagaaagaaagaaaatgacccccttagtatagggcctgtggaacccttttaaatagcgtgcaaattttgtgtctatatgcatttttctaaccagagagcccagagcttttatcagatgctcataccagaagttgcattttgtactgttattgcttaacacatgtactaattttcattgctttacagagttgcaacaaatgctgcaaaagtgctagaagaaaaaggtaatataaaatgcttaagtggtataatttcccatcttcagatgggaaagtaaaaacagtcaagagactattgtgtacactttgaacatatagacaccaaaagcatcccaactttagatggtttctggcagtgcaacaggctttctttttgatctccctttaatataaaacaagagctgttttttcagattctgcagttaaaaataaatatgaaggaacaagttaaaatcaccttgaaagagtcctccttggccgatgtggtggctcacgcctgtaatcccagcactttgggaggctgaggtgggtggatcacgaggtcaggagttcgagaccagcctggccaagatggtgaaaccctgtctctactaaaaatacaaaaatttgccaggcacagtggtgggtgcctgtaatcccagctacttgggaggttgaggcaggagaattgcttgaacccaggaggtggaggttgcagtaagccgagattgccactgcattctagcctgggcgacagagcaagagtctgtctcaaaaaaaaaaaaaaaaaagagtcctcctagtgatatcatattaatttaaattacaggataaaaaaatactgtatcattaaatgatacacagaactggctttctgcagcccttcttagtaatatttatgtcagggtttctcaaagtgatctaactgttagtatcagaatcttcgaccctagctgatttgaagaattagaatctctgtgaacagggtcatttaaaaaaaattaaaattagaatttactccttatatagagatgctatataaatgcaaatattcattaccctaatgccatacaatttaaacatttacattacaattatctgcttttgtgtgtgtgtgttttgctcatctttgtatggctatttttgattaagggctacacrtggtttatggaaaatcatagaaatgatttgaggtttgaactgatattatcttcttccagatataatttactcttctcctgaaaggcagttatggtagggacagatcaccttaatctaattagagattgagctgatctgaagctggtcttcagtctttatgatggctggcctatttctagttcacattactcctagactrtagttctttgagatcacaaccaaaagcctgagaaatgtactagggtcctcttttttgtcagatcctgaactctaatttctgtcatttggattaggtcagaatgctgaaagttttgtctcgtttctgattctctcagccaccactattgctttcaactgagttgagggaaaaggcagctcaaactctctggacttctctcttttggtattggttctgtagtttctcactgaccactagcccccatatcctttcaaacatatatgtatacataccttaaccaaccacatcttttctaattgttcttagagtcagtgttgaccaaaacaacctagtcagcctctggcacattcttagcaacggactgcatggactgcagaaaaccgtcttcctgtagtactttgctttctttcttttttttttttttgtggcggagtcttgctctgtcgccaggctggagtgcagtggcgcaatctcggctcactgcaacctctgcctcccgggttcaagcgattctcctgcctcagcctcttgagtagctgggactacaggcgtgcaccaccatgcctggctgatttttgtatttttagtagagatggggtttcaccatgttggccaggatggtctccatctcctgacctcgtgatctgcctgccttggcctcccaaaatgctagtattacaggtgtgagccaccgtgcctggccttgctttcttgttgtccaagccatgatgacctggttgtgttcttagaagaaggtagtggttttcagttatcatcatgtgcacagaaacctcttggggaggggagggtggaagcgtgttaaaatgcacattctcagccctcaccctggagaatctgactcataaatatgaggtggggtccaggaatttgcattattaataaccttcacaaataattttgatgcacgtagctcatgtacaagatcttgaataccccttatctaggaaagatggtatttgaataggggagttactgatttmtttctttctttctttcatttcaaggatgcccagttgatgctattgtcttggaagctccatttaccaacatgtgggttgcaagtatcaattatcccttgttaaaggtgagactctgattcatctttacaagggatcaaagtaggctattttgatacagtgtaggctatttctacacatgtatgtttattaacagtcttccttttcttaagtagttttatatgtttttaagttattctaatctgagacagtttattaaccagttaccacaaaagggaacccatggctgtcggatttgatatttccttcactttcttctaaggatatctgttttataattttgtagtagatagacttgccttaagtttattatttatttttattttcttcttaaaagtgaaaacaaacgtttcatacatcatttttgagccctatgaatgtcatttgaatatctttcataactttatcgtaagaaagtttctagagaatttaagaaagctgccaaatacttttacacagtatgccagatgaagacaaactttctaagaaaataagtacaaaggccgggagtggtggctcccacctataatcccagcacttggggaggccgaggtggctggatcacaaggtcaagagatcgagaccatcctggccaacatggtgaaaccccgtctctactaaaaatacaaaaattagctgggtgtggtggcacgcacctgcagtcccagctactcaggaggctgaggcaggagagtcgcttgaacccgggaggcagaggttgcagtgagccgagatcacgccactacactccagcctggcgacagagtgagacttcgtctcaaagaaagaaaaaaaaatctattgtgtagactatcctaactttataatcttattctatacctaatgctcaattgtttagagttgtacgtacgtgtaaacgttagcaaatgagaggtggggagagagagagagcgaaagtcttagagggatacatggcctcaatttaataattattctacattgttgtttcatactgtaagacatcttggagtatgttactctaacaactttaggaatttttttgtacaataagccatcatagatagaattccatcatagacagaatttctgaaacttacttaactattttcagggaaaagtagctcaccactttctaggacagcgagttcacataatcacatactcttgaaaatggctttaatatctaagtttaactaaatataggaatcccctctacactgcaaaatactgaatgctgagtaatttcagatataataaatattttcaattggttctagaaactgaacattcattttaatataatataaccattaattgcatatctatcatattactctaagtcattactaataaattcattaaattgtaggtatgtaacataagtcaaatacaatctttttatttagtttgtttttaaaaatgtgttaatgttgaaatttagcgaaataaggaaaatacatgatttaatgagcaattataaactgaacacccatgtaactattacctacgtcaagaaatgagcatcacccacactctagaagtcttctgtatattacttcccaatccagtaagccttattttagatgtaatccttagtccttagatggaattcttagatgaattttacggtaatcatgtctatgcatttatttatagagttaccacctgtacatgcatctctgagcaatattgttttgtctgtgaactttatatgaaagtaaaattatatagaatatattttatttttttcacccaacattatatttgtgggattgtattcatgatgtgcatagtatagctgtaggttggttattttcattgccatatacgattccattgtatgtgcataccaaaatttattgatctattgtgttgtttattatatttgtattactttcagtttggggaaattaacaatattgttgttatgaatgttcttgaacctgtattctgtaaacatgtacaagaatttcaccggggtataccctaggagtagaattgtggggtaataaggtatccatatggccagctttaataattacagtgcaagttttcctaaatgactttaccactttactctctcaccaatcctgtatgagagctccagttgcttcaaatccttgccctcatattgatatgtcaatatggttgtaatttgcatttcccttataaccagtgaggttgggcaacttttaatatgtttattagccatttggatatcatcttttgtgaggtactggttcatgtcttttgcccatttttcaggtagattttatttctttttatttgttgaatttcttcatagatgctggatatgagtcattagaacattatttttattgtaaatatattgtattattttgttttgtcttttcactttcttaatgatatgtcatgacaaagagacgtttctttttttttgaggtagagtctggctctgtcgtccaggctggagtgcagtggcgtgatatcggctcactgcaagctccgcttcccaggttcacgccattctcctgcctcagcctcccgagtagctgggactacaggcgcccgccaccatgcctggctaatttttctgtgtttttagtagagacggggtttcaccgtgttaggcaggatgatctcaatctcctgacctcgtgatccgcccacctcggtctcccaaagtgccgggattacaggcgtgagccaccgcgcccagctgataaagagagatttctaaatttaatgtggaccaatttaccaatatttttctttatggtaacttttatgtcatttataataaaactctgcttacccaaagattatcaagatactcttctatgttgtcttctggaaactctattttaccttttacatgtaaagttataatccacaggtttagatttttgtatggaggcaggggtccacatgagtgtctaattggtctagagtcatttattaaatggaccttccccaccactatgcagtgctaatgtttgcatatatcagtgtctatacatatagagagaggtctggtggtaggttctcatttctctccattgtctatctgtcaatcttaatatactatggtcttttaattactatagctttataatatgtcttgatatctggttgtataagttcctcagctttgtcttcttattcaggattgtcttggctattcttaacgctttgcatttcggtatacattttgaaatacacttgtcatgttctacagaaaacttgctgggactttgggattgcattggatctatttgggggacttgagatcaatttgggggacttggtatctttctaacattgagtcttcaaattcatgagtattgtgttttatttattatttatttatttaattttacatttatttctcatttaggttttgtttagtttcagttttaggtcatattctcctagaagcaaagcctgagacagagatttggtgtgtttgatttattgaggaaatgttcttcaggaaaaaatccaaaagggaatgagggtagtagcactggaaagggggaagagcagaacaaggacgtgacctcaggcaaagtctagctttggcctgattcaggcggggtgctaagctttgaagcaaagggcctgttgtttctgccctccgctaaggtaggcagtggaggaggggcgggaggatggygtaacctcttaggagtgatggcttctgtcatctaagaataaggagaagcagccaacactcacagcagaagttaattaattttgtcagtcttttcaaagaaccagctttgactttatcttctgtgttatatggtttctatatttttaatttctggttttacctgtattattccctttctcatatgttctttggatttaagttgttatttaaaaatttctttagatagtacttaataccatctaataatttatttttactatttttttctaatttatgtactaaggcatacttcacctaaaccacacttcagccgcaaccaaattttgaagtgtgttctaattatcatttagttcaaaatattttataatattattgtgatttcctccttgactatatggattatttagaagtatgattcataacttctatgcatttgggcatttgattatgatttttattgatttttaccttaaatctctcaagatccaagaatatactgtgtatgattttagtcttttgaaatttgttgagactcactttgtgtaccaatgtatggtcaattttggcaaattttccatatgcttgaaaagaatgtgttctgctgtttttcatgcagtgttctatgtacgtcgattgaatcgggattattaaccatgcttaaatttgtcaggcctctgagcccaagccaagccatcgcatcccctgtgacttgcaggtatctgcccagatggcctgaagtaactgaagaatcacaaaagaagtgaatatgccctgccccaccttaactgatgacattccaccacaaaagaagtataaatggccggtccttgccttaagtgatgacactaccttgtgaaagtccttttcctggctcatcctggctcagaagctcccccactgagcaccttgtgacccccacccctgcccaccagagaacaaccccctttgactgtaattttccattaccttcccaaatcctataaaacagccccacccctatctcccttggctgactctcttttcggactcagcccacctgcacccaggtgaaataaacagccatgttgctcacacaaagcctgtttggtggtctcttcacacggacgcgcatgaaatttggtgccgtgactcggatcgggggacctcccttgggagatcaatcccccatcctcctgctctttgctccatgagaaaaatccacctatgaccttaggycctcagaccgaccagcccaagaaacatctcaccaatttcaaatccggtaagcggcctctttttactctcttctccaacctccctcactatccctcaacctctttctcctttcaatcttggcaccacacttcaatctctcccttctcttaatttcaattcctttcattttctggtagagacaaaggagacacgttttatccgtggacccaaaactccggcgctggccacagactgggaaggcagccttcccttggtgtttaatcattgcagggacacctctctgattattcactcacgtttcaagggtgtcagaccacgcagggacgcctgccttggtccttcacccttagcggcaagtcccgcttttctggggaaggggcaagtaccccaaccccttctctccttgtctctaccccttctctgctcttctgggggaggggcaagtacccctcaaccccttctccttcatccttagtggcaagtcccgctttcctggggcaggggcaagtacccctcaaccccttctccttcacccttagcggcaagtcccgctttcctagggggcaaaaaacccccaatcgcttatttctgcaccctgacctcttatctctgtgccctaatcccttatttccgtgccccaaccccttctctgcttttctggagggcaagaacccccccaccccttctccatgtctctactcttttctctgggcttgcctccttcactatgggcaagcttccaccttccattcctccttcttctcccttagcctgtgttctcaaaaacttaaaacctcttcaactcacacctgacctaaaatctaaatgacttattttcttctgcaatgccgcttgaccccaatacaaaccgacagtagttccaaatagccagaaaatggcactttgaatttttccatcctgcaagatctaaataattcttgttgtaaaataggcaaacggtctgaggtgcctgacgtccaggcattcttttacacatcagtcccttcctagtctctgtgcccagtgcaactcgtcccaaatcttccttctttccctcccgcctgtccccccagtcccaaccccaagcgtcgctgagtctttctaatcttccttttctacagacccgtctgacctctcccctcctcgccaggccgagctaggcctcaattcttcctcagcctctgctcctccaccctataatctttttatcgcctcccctcctcacacctggtcctgcttacagtttcgttccgtgactagccctcccccacctgcccagcaatttactcttaaaaaggtggctggagctaaaggcatagtcaaggttaatgctcctttttctttatcccaaatcagatagcatttaggctctttttcatcaaatataaaaatccagcccagttcatgacgtgtttggcagcaaccctgagacactttacagccctagaccctaaaaggtcaaaaggccatcttattctcaaaatacattttattagccaatctgctcccgacattaaataaaactccaaaaattagattccggccctcaaaccccacaacaggatttaattaacctcgccttcaaggtgtacaataatagaaaaaagttgcaattccttgcctccactgtgagacaaaccccagccacatctccagcacacaagaacttccaaacgcctgaaccgcagcagccaggcgttcctccagaacctcctcccacaggagcttgctacacgtgccggaaatctggccactgggccaaggaatgcccgcagcccgggattcctcctaagccgcgtcccatctctctgggaccccactgaaaatcggactgttcaactcacctggcagccactcccagagcccctggaactctggcccaaggctctctgactgactccttcccagatcttctcggcttagcggctgaagactgacactgcccgatcgcctcggaagccccctagaccatcacagacgccgagcttccggtaactctcacagtgcaaggtaggcccgtccccttcttaatcaatacggaggctactcactccccattaccttcttttcaagggcctgtttcccttgcctccataactgttgtgggtattgacggtcaggcttctaaacctcttaaaactccccaactctggtgccaacttagacaatactcttttaagcactcctttttagttatccccacctgcccagttcccgtattaggctgagacactttaactaaattatctgcttccctgactattcctggactacagctatatctcattgccgcccttcttcccaatccaaagcctcctttgcgtcctcctcttgtatcccccgaccttaacccacaagtataagatacctctactccctccttggtgaccgatcatgcaccccttaccatctcattaaaacctaatcacccttaccccactcaacgccaatatcccgtcctgcagcatgctttaaaaagattaaagcctgttatcactcacctgctacagcatggccttttaaagcctataaactctccttacaattcccccgttttacctgtcagccctgagaaacatcgcccattctccctccataccaccccccaaaaattttcaccgctccaacacttcaacactattttgttttatttttcttattaatataagaaggcaggaatgtcaggcctctgagcccaagccaagccatcgcatcccctgtgacttgcacatatacgcccagatggcctgaagtaactgaagaatcacaaaagaagtgaaaaggccctgccctgccttaactgatgacattccaccattgtgatttgttcctgccccaccttaactgagtgattaaccctgtgaatttccttctcctggctcagaagctgccccaccttaactgagtgattaaccctgcgaatttccttctcctggctcagaagctcccccactgagcaccttgtgacccccgcccctgcccaccagagagcaaccccctttgactgtaattttccattaccttcccaaatcctataaaacggccccacccctatctcccttggctgactctctttgcggactcagcccgcctgcacccaggtgaaataaacagccatgttgctcacacaaagcctgtttggtggtctcttcacacagacgcgcatgaaaaaattttgtctattgttactggttttttggactgcttgctttttcagttactcaaagaggattattaaagtacctcatcatgattgtggaatggtttatttctattttagtactgttaatttttgttttagtttttttgaggttatgttgttaggtacataagcctaataatattatgatttagtttagttttttttttttttttttgagatggagtttcactcttgtcacccagactggagtgcagtggcgtgatctcagctcatggcaacctctgcctcctgagttcaagctattctcctgccccaccctcccaagtagctgggattacaggcatgtgccaacacacctggttaattttttgcatttttagtagagacagggttttaccatgttgatcaggctagtcttaaactcttgacctcaggtgatccacctgcctcagcctcccaaactgctgggattacaggcatgagccaccattcccagcctatgatttagttttcatatcttccaggtggatttatcattttcatcataaaatgtccaccttttttgtgatcaatattgcttcttgacttaaagtcaactttgtccaatatttgtatatctttgttttgattagtgtttgcatggtataggtttttctatcacttgatctcaacaggacataaataggaggtataaagttaacagggatttctacgggtctctttggaatcagttttgttactcagaattgaaaggcagcatgatgttgtggaaaagagyatgggctgtggagccactcagacttgggttcaaatctgtccttggccacataccctttgtgaccttggtaaattgtttctccctaagttttcccatttttttaccaaggggttggcgaagaccactgcacagggttgttgtgaagactgaattaagtaagataatgtatgtaaagtacccagctgctagtaagcactagacaaatacttgttcctttccgtccctctttctgttacaaattaggctaaagtgttatgtatggcaggaaaaggcagggagaattcaaggcagggagaattactgaagagagaggctttgctcacaggtgtggccaatgaagacttcagagcctattggacctaagcttctttcttgaaggtgagggaaagcagttaggaaacagagcgaggaacaggtgaatgttaactcagacccctggcaggaatggggctgttctacgttataaactgcctgagagttaatagaggacttccacacaagtctttcgcactcgttattcttttaaatcctcacagcaactctctgagtttgtcatcattgcttccacttagagatgagagaaatggagacctataggtttgcctaattgtcacatatcttataagaagaagaaatgagactcaaacctacatcttctaattgcaggcagatagactggaggtgagcagggtttggaatgaaagattgtggccagatgtgcatgggcttgctgtctagttgttgttttcagtagatagtgtggcatgcccaaagcttcgtaacagcagatttaatataactggtattttaaggatgtttatctggtggtgttacagaagagagaggaaggtaggaagaccaattaggagagcccattgccatggtctaggctggaggggaaggtatgacctgtgagtctcaaagggcactcctggctggaagggaatgaggaataatgagagtagattgaccggggyttgctttcttcctactctttcagaatttgagatgaattgctgaaggacttctcttactgaattctcctcaggggagtcttaattccaggggtgagagtaccagaagacaaaagagaaaacaaaacaagaaatcttgcccttagcatggaagaggagggagaagaaagagaaggaaaggctgtgtcaggaagtccagagcacacctgaatgcagatcagttgctatgagaccaggccaaaaagttcaggccagacaaatcccacagaaccaaggagattccagctgggcacrgtggctggcgcctgtaatcccagcactttgggaggccgagacgggtggatcacctgaggtcaggagttcaagaccagcctggccaacatggcgagaccctgtctctactaaaaatacaaaaattagctgggcatggtggcaggtgcctgtaatcccagctactcgggaggttgaggcaggaaaatcacttgaacccgggaggcggaggtgcggtgaaccgagatcgtgccactgcactccagcctggccaacaagaatgacactccgtctcaaaaaaacaaaacaaaataaaaccaaaaaccaaggagattcctgggggaatagcaggcctaagccagaactatgaagcagcaatttgtatttagtggcactggcttacctattttatacccatttccttaccacattccctaaaatgacatcaattactttctaaaatcagaaaaattgtatttaagtttattctatttagaaagtctctattctattattacagttcatagtaggagactattaacaaatgacattatagccatggggcaagttttaatttctttttctttttaaaaaattgtgaagcagaagtttgtatttattgggtccaacctccctattctgtgcctatttccttctcttggccatgtcccatttactaccccctctacccctcctctctcaggcacaacacgaaaatgtataatactttgcttatttttcctctttgcaaatttattgcaaagatttgtaatcccagcactttgggaggctgaggcaggcggatcatttgaggtcagagttcgagaccagcctagccaacatggcgaaacaccatctctactaaaaatacaaaattacctgggcgtggtgatgcatgcctgtagtcccagctacttgggtggctgaggcaggagaattgcttgaacccaggaggcagacgttgcagtgagccaagattgcaccactgcactccagcctaggcaacagagtgagactctgtctaaaaaaaaaaaaaagaaaaaaaaaatttaaatctgggccaggcactgtggctcatgcctgtaatcccagccctttgggtggtcaaggccagaagatggctttgagcccaggagttcaagaccagtctaggaaacatggtgaaaccccttctgtacaaaaaaattagttgggtgtggtggcacacccctgtagtcccagctactatggaggctgaggagggaggactgcttgagcccaggagtttgagcgctgcagtgagccatgagcatgccactgcacccactcccagtctaggcaacagactgagaccctgtctcaaaataaacaaacaaataaataaaataagtaatatctgaaattcaatcatactaaatgaaaatgacagataataacaaagtgtacgccagggatatttgcacaatagactcattttgtctttagcaaatatttatgaagtgtctattatgtaccaggaacttttctagtttttgaggacaccacagggaataagaaagttgtggtccatttacctacgaagttcatattgttgatggagaaacagatagaagataaatacattaaaaaagaaatccaatagtgagaagttctgtgaaagcaccaaaataatgtgatggagaatgactgggtggtgggggcaaggtttggtagctggttatggaaaacagctccgaagaaatagcatctgagctgagacctgcctgagatgaagccagctgatgggaaaatatagagatctcaggctggggtaaaagtaaaggcaagcgccttgaggtgggatcaggcctgacatgttccagaagcagaaggcagcagagccaggaggtggacaggaaggtgcttagtgataggagatgaggctggagagggaggcaggaagccgccggattcttcagggccttggaggccaaggtgacatgttcaggtttaatccaattgcctttggagggtgttaagcgaaagagtgctacgatctgatttgcacgttaaaataatcattctggttttcctgtgggaactggattatggaagggtgaaggcagaatcggggagccacttggaattgcagcttagtataagcaagagatgaagggtggcttaggctaagtgatagtggggatggggagaaatgaatgggtttaggatatagttttggaggcaggattcaaagtttgtgagaaaggtgcaatattgctcaggatttttatcctttactccttatttccagataaaacggatatttctagggcatataaactaacttacatgttgactatgtgagtcaaaacattgtaaaagtggatttagctagcattctatttcttggattttgctattaaacaacaaatttagtatgtctagagtgagcattgttatatctggaatcctgtggtcattgttaaaaactaaaatgtcttttaaggcattggcatattaaatcatattcaaaagtttgtaatgttcaaattctctaaaatcaattttctatgtattgtatattttcatcagaatttttgactaatcagaatattctgtccaccaactaaaccagttatgttcacaatagaagcaattttaggttttgcataccactgcttctacatggagaagtaagagttagttgtgccatttttaggaagtgaaaacaaaatgttaacaatgatggtctatgatggcagaattatgtgtgctttgtttcttctacattcctttctttttttccaaattcccgacgtgcattacttyttaaatcgtagaagttttttgtgaagtttaccttacttagagaagcactactctctgtgttaccctggttcatagtgaaagactatataacaratggcatagctatggggcaaatattaatttttttttcttttttaaaaatagatttaccggaacattccaggatttttacgtacacttatggatgccctgagaaaagacaaaatartctttcctaatgatgaaaagtaagttaatgatgaaaagacatgcattattactgtatctaaaggattctaggggcaactatcatgtgacttactggatggtgacatgagacatcctgaatatcattcttattcttagaatattgttctgcgcttcttagatgggcactaagatttgggtaaagtatctatgaatttttagtatttgctattttcctcatgtctaattcaatgacttcaccaattcagtactctctctgaattcataaacgaagttgtatatctatagcctatcaagaccttttaaagggcttggtagtgttagcgtatgcctataatcctagcactttgggaggctgaagtgagaggatagcttgagcccagaagtttgaaaccagcccgggcaacacagggagacaccatctctaccaaaaaattttaaaattagccaggcgtgggggcacgtgcctgtcatcccaactacacgtgaggctgaagtaggaggatcacttgagcctgggaggttgaggttgcagtcaactgtgattgtgccactgcactccagcctgtgtkacagagtgacatcctgtaaaacaaacaaacaaacaaaaaaccagcctaacatttcttgaggcatctctgacttctaggcccttttccccatataatgaaaactcgtctaccatccaccttactaatgtgacagcaaatccaaygactagaatttatcaagttagcctgttacagttagagaatttaagaatgcttccaaatagacagttgtcaatatatttttctatgtcaacacacttgagaaaatccaacattctcaggggtgtcagtgagtcactgtggcagagatggatgggtatcagaattttggggggacagggaagcattgcttgagaaagtaactagagtgggagacaagacattcttcatgccatagcccttttgaattagcaaactagggggttgaccaggaagctaatcagacctgttaactgcacgtccatcctctacatttatggagaaaagtaaacaaattgctacaaagaggtctctgattctgtcatagtttttgttttattgaggttttgagttttgttttcttttttagtcttttaataaaatatttcagatgttacaaaataggtggagtaaagaagaatataaggttcttctaacactgtacaaaatcagtgtttcagtgttttttgttttttttttttagtatttccaaaaatcatgcagaagtaaattaattaaacagccagttaaattgcatgagtaaatgggagagagggaaacttgcatggagaaaaaaagctactwtgtgaaatttttaaatgtatgatattgttattccttggaaggaaggaaagaaatttcttgtaatttagacaggcctcatgttttgctaaagctttaacttagaagaggagaaatctcaatgtatcattctttaactgaatgcttttcttctacttgtccctagtgttaaattcctttcttctcctcttctcatcttacatggagaggatgacaggacagtgcctttggagtatgggaaaaaggtaaactaagggctcaatgctgactgaaatatactatactcatttcaccatttttttcattcagccaaactttgattagagccgaaaggagggtctctgacattataggagattctctacacccctaaatagcctctataggtttataaaatgggtatcagcatccttggctacttagctcaaaggagtgtttgtggcagagcctggctcctcatctggattgtgtggagctgcaagtgtagggtatcccaggctgctgtgggaacctccatgtcgtctctactgtagtggctctaaaatggaagacgcagactttttccttttaaacaaacttctactagagtgggtccataacaattccttggcattttgcagggaggttcaagcagggaaggatgaggttttatcagtattctatattagctgagcagcattcagatctttagctgtagagacaggcaactgggacatggagagttttctgtctctgacttaatggaacaaactccccaagttagctgtttctgtacacttttagggaaattggactagaaaaatctacagctttgaatggccatcctttgagtctctttctgtcscttgcagctctatgaaattgcacgcaatgcatacaggaacaaagagagggtcaagatggttatcyttsctcctggcttccaacacaacctgctttgtaaaagccccacactgttaataaccgtgaggtaagagttgctttgctaaatgtatgttgcccttcaaggcaattagggctgctctggcttacttaggccacaacatgaaaatgtataatattttgcttatttaggtagggaaagggtgtgagctgatctgggtcctttttctacagagatttcctgagcaagcagtggtcmtgagtctgggaggagtggaaatcttcaatgaagacttggyccaaacacyacctgtgatgtatattgttytaatgtaaaattgtactgggctggtcggatgagctgaggccattgacttctctacaaatcacttgccattttaacaacagaaagtacgaatgttaggcagtatggaatgttcttatttagcttatcataatctactttgtaaaacatgctgaaacctcactgtggagaaccagaatttggtaaaatctagatcctatctaaaaatatgtagttattaaacattctgtggatatttgtgaataaggtagttgctatggtccgaatatctgggcctgcccccccaaattatgctgaaacctaatcaccagtgtgatggtaataggaggtgggactgagctctgatgaatgagattagtgcccttataaattatgaycaaaagagctcttcactcctcctaccatttgaggatacagtgagaagccttcatctatgaaccmcaaagtagccctcatcagacactgaatcagccagtgccttgctcttggacttcccagcccccagaactgtgagaaataaatttctgttgtttataagctacccagtttatgccattttgttttagtggcccacagggactaagacattggtctttggtttggactcagatagcagtgtaagaaagttgcttctacatagttaagttttttgtattttagtttagttcatttaaatggcatttgaaagttctaagcagttttctaattttatgactagttttggggtaaatcctagcagtagcaaagcatcactagatttgctataaaataagttttggcactcatgtagcccttggaaattgacactttatttttaagctctattacatataatttccctccccattcccagagatactcaactattatagattattagctaacaaaacaaaaaccagtgaatgttgtaaaaatgttcaagttcagtaagaagctatgttttctagagacaattctagagttcaatttccattgactttgttagattcattggatagagaaatctttagatctgaaggttccacgttccagatgttttgggcatattctttaattgttcggtcactggagaatttccccgaggcagctatgtttttgagtaccattgtgttccaggcctttggattctgtaaacaacatatgcatatacagcccagagtcccagtgcgcagtgagctttataataaacatcagccaagcacatccaaacacatttcatgagggaaaatgacaggaataaattatagtaaattacaaatattcttgtttgtctgttgagaggtagaatagaatgcacttttctcatatttagagtataattctcttaggaatgaaaaaaaggtatttttcactctaagagaaaccatggatgtacattgcctagttggcaattcctgctatggttacaatgttttggcatgtaagccatatttcccatgctttcttatgaatgaagatgcttccctttaaactataggggaggaatccattgtctgctaaatgccatgtcaagagacttatcctatggctcatagagtttgaaaaacactactctaaaatgttagctataatgcaggcaaacaattcaatgagaggctttattgacctacttagcttttcttgttctttctgaagatacgcaccctagtaggcttacactgagtcccaaacactccactggggcttcaaaacagggtcaattgagtctttatccttaataaaaatatatcaaaatctcataatttttatataaaagaatatgataagaaggaatttattttatagcctcttaattttgtaaggaactctaaaagtgtattggaagtgaacagaacattattcaaaaatgttatcaatgcattataaatgcttacgagaaagactaaaactaccatcattccttaaggtacagcaaaacagcatctgaaatttgtttattcagactttggaagcttcctgtaataagaggaggataaaagctttctctcttcattttctttaactatttaaatggataatgaatagacttcccagtcatatgggtcatgtttactaagtctcaacaatacaatcattgttaagagtaaaaagctgcaattagcactaatgaacaagaaagaccgaatcaaatgctgggtttctagatgagcatcgtttggatttgggccataattttaacagaggagacattcacatttgtccttgcccttgttcatatttttctttcctgtgctgttttattgatctgtcttgaggtggccgttctcttccctgtgtctttgcattcttgcggcctgtatatggcttttctctccaatgtacaggaagcaggtagtgagcccctgagcttagctctagcactgccctgcttgtttgtagccattaacttgaacttattctggtctatatgccactgggggactggccattattctattagaagataagggctgtaaagcagcacaggcgttgaatgatcctttttaaaatcccagtgggacatttaggatgacagtaggaactacccttttatctgccttgggaaaggagtagaaagaaatgttagtaaaacccaccctggagtcttggcacagagctagccccctccagtatccattcctctagggtatctgaaattcactaaaagtctctcctatcagagatgatcaacctttttacatatttacaaaacacagctagagagttgtttgataaagcgtataactttgcatgcagaggcttattcacatggctctacccatcccttttttttcccctcagtatagtattgtcttccttattcttctttctttttttaaaaattcaattatgaacacctttctctttctacgaatttatattctattgatacagccccctccatgagaagtccagaagaggtacctattttgcaattttcagagaataggggtcagtccttatcttaaaaaaccatgttttagccttagaatcatcatggcaggtttctcaaatactgatgaccccacccattactgggaaagaatctctcagtgcgggggctggcatctgtactatgatgaagctaccttggtgattctgatgtgtacctctggttaagaatctcgatgttcaaacaggctccttgagggaggggagggagggagagacctcaactttgctcatgctgtgttctcagtgccagcacagtgcccggcataaaaaagacgcctaatgcccctctgaggctttatttccttagcttccaggacatgtctgctacagagtgggtgctcaaaaaatattgaattatttgtgacttttaaaaaacttggatattaaaaaatttacaactggctgggcatggtggctcacacctgtaatcccagcactttgggaggcagaggcgggtgaatcacctgaggtcaggagttctagaccagcctggccaacacggtgaaactccatctccactaaaaatacaaaaattagctaagtgtggtggcacgtgcctataatcccagctacttgggaggccgagaggtgaaggttgcagtgagtcaggatcacgccgctgcactcccgtctgagtgacagagcgagatctgtctcaaaaaaaaaaaaaaaaaaaattacaactcctgctgaaatgtcaaatctcaaccttggcctgaacttgggaaaagacaaggtttttttttttgttgtggttgtttgtttgtttttgttgttttttttttgattgcttaatggggatctgatattacatggggatctgatatttgcatttaattaaaaaacccacattttaatgaatcatagtaaactggttttctttataaatcttggcaatttactcaccatgtacagctgactcactttatcttgacacttgacataggcttcgtagtctgcaaagactttaaaccttttattttgtgagtggaagaggaaaaaaacagtcaaaatcttcattaatagatatatgctaaaattccatgtaaaatcatcttttgcttaatatcaggcatggctggtttaccaaattcatatttctgtttgtaagacttttaaccagccctcaaccttcttatggttctcacatgtgagaatgtcatcactgggatgcatttggaagttgggaatatcagtggaaggagaaaaagagaaccagatttgtgtgtgttattcttaaaccttactggcatcgctggtggagaatatctaactttttccccaagcctaaactacctgagcagatcacgctaatctatgctaatctacatgagtgggtttaagttggtttaagattggtttaagattttcttgttggttttagagttggttggtttaagattttcttgtccccctttcatgatccaaatagcaccatcttcttatgggaactcacctgtcatgataaaatagcatgttgatgatatctttgaagaggtcaggctgcttgggagaaaaaaagccattgtcaatttgatcaatgaccagcttcagctctggaagtgcctcatagtattcttttgcctcgtacctgtggggtaggggtgggtgggtgataaaaaaaggctctgttattgtgttgtgtgattaacaacacactagacactgcattcactgtgaaaaaatacattcagaaatactagcattcaaagacttcattatagatttcaccatgagtatatataacttttaactagatctgtaagtttttcttcctgtaaatttgattccttataaccaaagacactaagaacaatagataatgaaaactctagtcaaacatcaagagtctgatgtggtagaatacagcaaggtccatttcaaagcagactttatggctttaaatgaacattgtattaagtagatcagttgctttttggatccacagattctcaaaagttgttgctactgagtgaaactgacttccaagggtcaggaagtatattcaacatcctccaaatgttacttctttgggcagtactctttattttgtgcttgaactcaggttaataaacccatccagatatgaagtgaaaataaatgtttccaattacttctgtacacccgtatctattctctatcacattttagtgcatttctttgatatcttaaaggagcactagatcatgatttaaattataggcaacccttccaactagaaactggttcatcttttgatcaaagtaaaaatcatacatacggaggaaaaatagctctttgaggccagctctgcaatggccgataacaaatagcaactcctccatgtgtctgtacttttatttgctgggtttaataatattaatctgtggccaggaggctctcctgcctcatcgtgggagatgttctgctgccacctcttatgtgatccaatttcagtgggatatcggtgtgggcaggaagccctctgaggtcacataccttctaggggggaggggcagtcctgcctagcaaagagaagctattctcttaccctttcttgtccaaagcagccacatcatctatcctcatgccaaagatgaacaggttctcttccccagcttcttctgccatttccacattggccccatccatggtcccgatagttagggccccatttagcatgaacttcatattgcctgtccccgaggcttcggtgcctgcagtggaaatctgctctgacagatctgtggctggaatgactgcaagaaaggtaagttaaaattagtaattttgtctgtctagatctgcttgtattgtattgaagcatttattaagttgggctgttttgataattaaagtaatacatgcacattaagataaacattcaaatggtctagaaggcagatcacactctttccccttgactcaggcaaccacttttgtccattttatatgcttgtatttctttctcgagctataaactttgaagagtatctattgactgcgacaaacattgatactacatttctcttcttccttttattccttccaatttttgttacagttttatttttatttcttctactttataaaatatattgaaatttctctttttttctttctcttttttggtacagggtctctctctgtcacccaggctggagtgcagtggtgcgattacagctctctgcagccttgacctcctaggctcaagcaatcttcctgccccagcctcccaagtagctgcaattacaagcgagcaccaccatgtccagctaattttttaaaatttttgtatgtatggggtctccctatgctgcccaggctgaacttctctctcttgatccataacattcagagtgtccctccaggactcctctttggcaacctgaggagactggattgtctgcattccttctacttctcacctccttccttccacttttcctgcagggaaataagccacacgtaattgaggtgtgcctggggctagacatctagcctctgacctttcaggctgatttgcacgcaaattagagctgcctgaagcacttcctttgactacaaaggtcaggaccacttttctgctttactgtgagagcttatttgtggattagatgtatctt

SEQ ID NO: 97695 - DNA, 18176 bp, Homo sapiens
gtaagtttgtgattgataaaaagaagatgagtgttaattagcctccagtgaaaatatactgaaagcctgttttcatttgattccaatgtttcttccaaagaattctgtataaacatatgccaattccctatgatggtctagagttaggaatgagtgtttatggtgttgcttatagaacaactcaggtaatctccatttctggttttatattttctgtacaaactgcctgggttttatttttctaatcagcaaggtgcttcactgccttcttgagacgcctctcaaagctcttaaatggctcctgtgctatgtgtggtgttggcagtctaatttgcttctgttaaatgttgtagaacctttttcactaggaaataagattcatttctttcggcagtagatgtagattcatcttttaacgtttcttcaaatttgtttctgtcaggctttgtgttattttaaatggttttttaaaattttcttctatgttttcaattacctaaagacataggataatagttttttttaagttagaattttacctcataaaattttttgaggtttgatgtatgtctctgtcttatcaataatgaggcttaaaaaatactggatttgaatggctgccgttttttcaaagcaatatgaatttgatgagtttgttttatgccattaggtggcgccagaggtcagaacatgtctattttgaattggatcgttacaaatgagcatatttgatgcggaaatttctgggagaaaaaaaattgaggaaataaagttaaaaaattgacattcattgagccaaaagagatgtggagaaacatttttcacctttctgtttggcctgattaacatttaaattcttgccaaaattaaggtaacttttaaaaaacaccttttataggtggatccagcagtctggcaacgcccacagttaccacaacacagaaaactgatcgtgctataaaatggacgctaaactatgaaaacagtgtgacattgttctctgttcttccagagccagtaacatgcttgctcgtgctttctacttctagctgatcattcttttcccaacatatatttacaaatttaccaaattttacctagaattttaggaccaaatggttctcactctttatgctgcaaagacctggatgatgtttggtaactatagaaaaatagaaattacactcaggatcactgttactgctattgccactgatgattcctgcaaaaatataatcgaagttttccatcaaatgtataatatgctattaatacacattagatgataacagttgttccatgaatgattctatgaagctatgcatcttagacctcttgagctgtgaattagcactattttctatagttacttattctctggatcattttataatttccatattaatttcaaatatgctcgtgttattcttcagtgatttccacaattgtgcattttattctttggtttaagtactgaagcatataatgaaagtaattgctaagtagcagcttaaaaattcaattatccgattgtatttaacatctttaagagcatgatcataaagagctatttttgacaccccccccccacttttttaacatttagagttagtaagggttttatatctcttctgtccatattgttttcaaaggaatgaggtgtttaggtggctggaaaagcatttgtaggaagttagatttgaatatagacaaggtgggttattcacgttgagaatgttatttgaagaatgcctgtgaagccaggtgtgggttctactcagtgccatagatagactgagtcttctctcgtaggttaccattacatagtaattttgattctgaatttcacattaaattatttgagtttatacagacctaaattttaaaatctgtacatatattattttgatgtattaagatgaatattgctgatttaaattttatttatgcacatacttaaaggacagaaatgtctgggaaagtaattgttaaataatgatatgtaactttttaactttttaaataaataacaagatttttaatgtgtgtctccctcagggttgtttaaagttttttttctccctcaagtataaatagtggtaactatatgttttgtatcttctagcaccaactgctgtaaagcaatgctgcaaataatgcttgaatacaagtggctaagccaacaacagaataaatacttttatagtagttttataatcctgaaattcgaaagctttcccaattgcacttgcatctaaacaaaactgttgcagtttttactctatttattttgttccccatgtttatgaaagtcctgcacagtttcaaaggcatggtaaataatatatcaatgtttatgtagtctgttacagaaacagctatagataacattatccagtgaagagcaaaattcaagctttagaaaatattcatgcatgcaattttgacatatctaaaaataggtttttgtatatttatggtgggaggtggttgggaacttttaacaaaatggggtgttaatttttgtacagtctgtgggcatttacacatttttaatgtattaaaatttggtaattatgtgtacattaaattaataaaagttacttctagttatgatttgtgaattccctaagaccttggatttttttaagtaactttatatcagaaatgatactgcatctttatatttttaaaattgtattgctgctcaagaatggtaccctcttgtcaaaaaggcatacattcataattgtacattcagcattgtaaataatcttatgaaaccttttttgattgaagctattcaaaataaaaattttaatgaatgaaataacactttttttctgtgtctttattcatttgtttgctttttagtgacatgaatactgccctttgtggatttattttcctgcctaataatacttccccatttccttcttttttttttttaaaaaaaactggattttgaaggaaataagaacaacattctgcatatcatgccatgtgtgtgagcatcctggggaaaccccacagtcggatgcagtgtagagccaaatgttaaatgcgaggaggtctgagggcaatggtgaaatgaaatagaagagtagggacttataatctattaatagttgggagaatcaaaccaaaagctaataccatggagagagaaaatggttgtaaaaatcccagagaagacaggacctttgtgtgtgggtgggagttgtttccatggagctcagctccgggagacacggagcccctgctagggaatatgtggctggctgtggtgtgatgaattcggggggtgagggcctgcctgcctttagctcaagttcttaacagtcgctatggtttgtgcggcatgtgtgatcctgtccccacagcctgctggtgtgggcacagttctgcatgtctctccttccgctgtatcactgccaagggacagggagtcctaggggcttgagtgagactgtccgtggtccaagttggggtgtggttgctccctgctgtgcccggcccactgagtctccctcagaggaaaaaggcttatctcacccaggcacagacctgcttttgaatagccaagccccttaagccaggtaactgttttacagcagacttctgacctggtaatggatacagaatcttaagacttggaagcactggagctgtcaacttccttgctccaaatacttctcattacctcatcaacttgctcagtggatggactaagagtgttcccccactctgcaactgccatacctacttttcccttcctggacaatcaaagtgtcttcctaagggacaaaatgtagaggccattctgactggaggttttcctggggaaataggctaaagaagggccacaggaatttgagccatcggcatcttactctgtttcacagctcgccttcccagtctgtcatgttggctccctggcaatttcatgggcaagggggcggggaggctttcactcgatgtgcctatgcatgacggacttaccaggtcaccagtgtagcagttcagggctctggagttgcattccttgatcggaactgaaagacctcccgcgatacctggcagaggcagtggctcttccctgtggtccagggctgcgtgactttgaaggtaatttcagtcaacccagcctttactgggctctgactgcattaggctgcatcaaaggggattggatcccatgattctttatatcttctgacattaagcctttgtcagctataggtgttacaaatatctttagtttgtggtttatcttttccccttttttatggtgtcttgaaggatagaagtcttttttttttttttttttttttttattgatcattcttgggtgtttctcgcagagggggatttggcagggtcataggacaacagtggagggaaggtcagcagataaacaagtgaacaaaggtctctggttttcctaggcagaggaccctgcggccttccgcagtgtttgtgtccctgggtacttgagattagggagtggtgatgactcttaacgagcatgctgccttcaagcatctgtttaacaaagcacatcttgcaccgcccttaatccatttaaccctgagtggacacagcacatgtttcagagagcacagggttggggataaggtcacagatcaacaggatcccaaggcagaagaatttttcttagtacagaacaaaatgaaaagtctcccatgtctacttctatccacacagacccggcaaccatccgatttctcaattttttccccacccttcccgcctttctattccacaaaactgccattgtcatcatggcccatccccaatgagccgctaggcacacctcccagacggggtcgtggccgggcagaggggctcctcacttcccagtaggggcggccgggcagaagcgccccccacctcccggatggggcggctggccgggcagaggggtcctcacttcccagtaggggcggccgggcagaggcgcccctcacctcccggatggggcggccggccgggcggggggctgacccccccacctccctcccggacagggcggctggccggaagtcttaatgcagacagcattatcagtgtgttcaaaagacacgtagacacgttttgcctatagacaaatgggcaaaaggaaacccagctttctcaaatgaagcacaagtgggccttaattatgtgaaaaggtgttcaagttcatcattaaacagggaaaggaaaagttaaaatcatgctgagatatctttcatagaaatggcaaaaagcaggaagtgccacgtgtgggcagagaggaagcacaggaactctcacaaatggcaggtgtcatcgtagaccaacacaaccactttggagagcagtttgactttccccagttaaactgaacatgtgagcggccgggcgtggtggctcatgcctgtaatcccagcagtttgggaggccgaggcgggcggattgcctgagctcaggagttcaagaccagccagggcaacacggtaaaaccccgtctctactaaaatacaaaaaattagctgggcgtgatggtgtgtgcctgtaatcccagctacttgtgaggccgaggcaggagaattgcttgaaccagggagcaggaggttgcagtgagccgagatcgcaccactgcaccccagcctgggcgacagagtccccctcccccaccaaaaaaacaacaagtgagcatcctgcaacctagcaatgccattgttgaacaagttcaaagatgttcttagccttattagtcccaaaaggaagaaaaaaatggaggatttgagaatgttcttagctttattgctaagcggagaaagaaaaacaacacataccaaaaaaaaaaaaaaaaaaaaaaaaaaaaaaaaaaaacctgggtgggaaattagggccatgtggcatgaaaaggaagacccaggggaagtgtggcccatctaggggtgtggctactgcagtgatccagctgtatcactgaacttccctggcatcatagagttatattgtgccatttatggaaaaactctccccactgctcttggctttgacrgtaggaatcaggttatatatggtctctcggtttgaagatatttgtcattaaaaaccagaacaagggctctgagatagggtcctttcctgacctactctggtaaagtctttatcctcaggatgcaaggataccaccctcttcctgtggaaagtgtcgaatcacatgcagagctctaagtctttcagttactttggagtgcagaaccatttcaggtaaggccaaatattttaaacattagtataggaaattagagggctctttagtctgtgtgtgcatgagaagtaaaattgcacgagaagcaatttatgtaaaatttcgcttaggaaacattgttttggcaggttagtagtatggtgtgcatttcccagaaaattcagtgccgtgagtattacctttagttaagcatcttagaaatagtagctctttatggctaagtcagaaatactaccctcaaattctatgtgaccctagttatactgttgagcctttctgtgcctctgtgccttcatccttgaatcggggataatatacttacctcctaaggttattgtaaggattaaatgcatgtagtataaataaagagctgagaacaatgyatggcgtaaagtgataggtattattatatgcttttgttggctgttgattgaaggtgttcgctgttttgggggtgtcctttaatagagtaacttggtactgtggaaatagcatgattgtgagcaaaagaatcagatggtggtggctgcagactttgctgttcccttcttgactgttggttatagccaatgcagggtaagttataaagtcaagagcagagccgttttcacaatggacattgctttgtgatgtctgtgagcttgaatgtgagaatgattattttaattctctatgtaaggactttaaagtattggctattcggtagcttgaaaactctgtaatctcaatgctttaaactgagagtggaaaatcaataaagcaaaagcatgaggccacgcagtgtaraatgagtgtcttttcaccacgtagggaaatctgtagtcctaagaaaagagggagtgagaattctggcgaaargattgtgcctctgcacaaagtgcaggatcccagggttcagtacaggcgcgaacgctcctgtgtgttgaccacactcccacggttgctttttcagacatgctgagggggactctactgtgcgcggtgctcgggcttctgcgcgcccagcccttcccctgtccgccagcttgcaagtgtgtcttccgggacgccgcgcagtgctcggggggcgacgtggcgcgcatctccgcgctrggcctgcccaccaacctcacgcacatcctgctcttcggaatgggccgcggcgtcctgcagagccagagcttcagcggcatgaccgtcctgcagcgcctcatgatctccgacagccacatttccgccgttgccsccggcaccttcagtgacctgataaaactgaaaaccctgaggctgtcgcgcaacaaaatcacgcatcttccaggtgcgctgctggataagatggtgctcctggagcagttgtttttggaccacaatgcgctaaggggcattgaccaaaacatgtttcagaaactggttaacctgcaggagctcgctctgaaccagaatcagctcgatttccttcctgccagtctcttcacgaatctggagaacctgaagttgttggatttatcgggaaacaacctgacccacctgcccaaggggttgcttggagcacaggctaagctcgagagacttctgctccactcgaaccgccttgtgtctctggattcggggctgttgaacagcctgggcgccctgacggagctgcagttccaccgaaatcacatccgttccatcgcacccggggccttcgaccggctcccaaacctcagttctttgacgctttcgagaaaccaccttgcgtttctcccctctgcgctctttcttcattcgcacaatctgactctgttgactctgttcgagaacccgctggcagagctcccgggggtgctcttcggggagatggggggcctgcaggagctgtggctgaaccgcacccagctgcgcaccctgcccgccgccgccttccgcaacctgagccgcctgcggtacttaggggtgactctgagcccgcggctgagcgcgcttccgcagggcgccttccagggccttggcgagctccaggtgctcgccctgcactccaacggcctgaccgccctccccgacsgcttgctgcgcggcctcggcaagctgcgccaggtgtccctgcgccgcaacaggctgcgcgccctgccccgtgccctcttccgcaatctcagcagcctggagagcgtccagctcgaccacaaccagctggagaccctgcctggcgacgtgtttggggctctgccccggctgacggaggtcctgttggggcacaactcctggcgctgcgactgtggcctggggcccttcctggggtggctgcggcagcacctaggcctcgtgggcggggaagagcccccacggtgcgcaggccctggggcgcacgccggcctgccgctctgggccctgccggggggtgacgcggagtgcccgggcccccggggcccgcctccccgccccgctgcggacagctcctcggaagcccctgtccacccagccttggctcccaacagctcagaaccctgggtgtgggcccagccggtgaccacgggcaaaggtcaagatcatagtccgttctgggggttttattttctgcttttagctgttcaggccatgatcaccgtgatcatcgtgtttgctatgattaaaattggccaactctttcgaaaattaatcagagagagagcccttgggtaaaccaatgggaaaatcttctaattacttagaacctgaccagatgtggctcggaggggaatccagacccgctgctgtcttgctctccctcccctccccactcctcctctcttcttcctcttctctctcactgccacgccttcctttccctcctcctccccctctccgctctgtgctcttcattctcacrggcccgcaacccctcctctctgtgtcccccgcccgttcctggaaactgagcttgacgtttgtaaactgtggttgcctgccttccccagctcccacgcgggtgtgcgctgacactgccgggggcgctggactgtgttggacccatccgtgctccgctgtgcctggcttggcgtctggtggagagaggggcctcttcagtgtctactgagtaaggggacagctccaggccggggcctgtctcctgcacagagtaagccggtaaatgtttgtgaaatcaatgcgtggataaaggaacacatgccatccaagtgatgatggcttttcctggagggaaaggataggctgttgctctatctaattttttgtttttgtttttggacagtctagctctgtggcccaggctggcgtgcagtgggccgtctcagttcactgcagcctccgcctcccaggttcaagtgattctcatgcctcagcgttctgagtagctgggattagaggcgtgtgccactacacccggctaatttttgtactttttaaagtagagacggggctttgccatattggcctggctgatctcaaactcctggtcttgaactcctggccacaagtgatctgcccgccttggcctcccaaagtgctgggattacaggcgtaagccactacacctggccctcttcatcgaattttatttgagaagtagagctcttgccattttttcccttgctccatttttctcactttatgtctctctgacctatgggctacttgggagagcactggactccattcatgcatgagcattttcaggataagcgacttctgtgaggctgagagaggaagaaaacacggagccttccctccaggtgcccagtgtaggtccagcgtgtttcctgagcctcctgtgagtttccacttgctttacatccatgcaacatgtcattttgaaactggattgatttgcatttcctggaactctgccacctcatttcacaagcatttatggagcagttaacatgtgactggtattcatgaatataatgataagcttgattctagttcagctgctgtcacagtctcatttgttcttccaactgaaagccgtaaaacctttgttgctttaattgaatgtctgtgcttatgagaggcagtggttaaaacaggggctggcgagttgacaactgtgggttcaaatcccagctctaccacttactaactgcatgggactttgggtaagacacctgcttacattctctaagccttggtttcctgaaccttaaaacaggataacatagtacctgcttcgtagagtttttgtgagaattaaaggcaataaagcatataatgacttagcccagcggcctgcaggcaatacatgttaatgaatgttagctattattactaaaggatgagcaattattattggcatcatgatttctaaagaagagctttgagttggtatttttctctgtgtataagggtaagtccgaactttctcagactggaggttacattcacatcagtctgtcttcccctgcggatggcctcagccctgggtggccagactctgtgctcacaatccagagcaatggatcctccaacaccaccaggtggatgtggagcaggagagctggatcgtggcatttgtttctgggttctgcagctgtgggagttggtttctgggttctccattggtctacttgtctagtcccataccagactcacggtctccattattggagctttaataatttttggtatagggtcatctctccaccttgtttttcttctattcttggttctttgcaattctatgaatatttcagggtcagcatgtcaactccattgaaaaaccctgctgggattttaatagaacttacagctcacgcctgtaatctcagcactttgggaggctgaggtgggtggatcacaaggtcaggagtttgagaccagcctggccaagatggtaaaaccccgtctctactaaaaatacaaaaattagctgggtgcggtggcaggtgcctgtaatcccagctacttgggacactgaggcaggagaatcacttgaacccgggaggcggaggttgcagtgagccgagatcgtgccactgcactctagcctgggcgacagagcgagactccatctcaaaaaaaaaaaaaaaaaattgcagtaaatttaaaactaatttggggaagaatctgtattttttacaatacctagtgttcttgccagtaagcatggttcatcttcccatttatttacgtcattttaaatctttcagtgatgttttagaattttttttataaaaaccttcactataagaacagaaaaccaaacaccgcatgttctcactcataggtgggaattgaacaatgagaacacttggacacagggcggggaacgtcacacgcctggactgtcggggggtggggggctgggagagggatagtgttaggagaaatacctaatgtaaatgacgagttaatgggtgcagccaaccaacctggcacatgtattcatatgtaacaaacctgcacgttgtgcacatgtaccctagaacttaaagtatataaaaaaaagaaaccttgcactgattttgttagatttattcctaggtatccttcctcttttttgatttgtcattgctattgtagatggcatctttttaaaaagttatattttctaaagaaaaaaataaaaaaagttgtattttctaatttttattaccaatatataagaatgtaatttatttttacataattatcttatgtctagtaataattctgataatttgcttcttcctattaaaaccttacacccattattgatttatttttctgttttaaaatatcttcctgcactggctaaaacctccactataatgttgagcagaacagtgagcatccttagaactatcttggttgcaaagggtaggtctctaatgtttcatcaataaatgtgatgtttctagtctgagtttgctaagtatattttaaaataatcagtaaagttagattttatccatttttatcttaactattgagatgctcatatcatttttcttcttcaatgtgttaaaatggtgaataaatttatagattttggaaaagtaaattcattcttgcattcccgaagtaaaccaagccatgctatgtgtatttaaaatatattgctgaattcagcttgctgttttgtttagaacttttactatctgttcattagtgagatttgcttatacattgaaaataatatccttgactggttttggtatcaggttatacagcctcataaagtgggtggggacgttctctctggaatggttcgtaaaaactgggatcatcttttccttgaacgtgttgtagaatcccctggaaaaccttcgtggcctggttttattgtatgtgtgtattcggtatttattgttgcataaccagtaccccagatcttggtggtttaaaacaataaaatacattacgtcacagtttctgagggtcaagaatttgggagtagtttagttgagtggctgtggctcagggtctgtcatgaggttgccatcaaaatcttggctggggctctaatcatcatgactgcggctggaggatttgcttccgacatatcccgctcacgctgttggcagttccctggtggctcacggcaggcagccttgggtccttgccatatggaccccttgagtgtcctcatgacatggcagctggcttccccctttcgttcttcaaagaattgtggggtttttggcttttttttttataagatctaaaaaagaaaaaattaacattgatctatatgttgcttgagctagaaggcataggaaaacagacaacatatatccatgaaatttctcccaaatatgaggtaaaaagatgaaatctttagataagttgtaagtctgtacaaagaagctagatttactactctctaaaaggtgaagggacctgctatataaaacacagaaataatttaatgcttttcgtaagaatataacctgagctttgctgaagcttcatattccctgaggatgtctaaaatgccagtccaggccaggcatagtggctcacgcttgtaatcccagaactttgggaggccaaggcgggtggattgcttgaacccaggagtttgagaccagcctgcgcaacatagccatatccccagctctacaaaaaatacaaagttagctgggcatggtggtgcgctcctgtagtcccagctacttgggaggctgaggcaggaggattgtttgagttcgggatgttgaggctgcagtgagccgtgatcatgccactgcacaccaacctgggtgacagagtgagactccatctcttaataaattaaaaaataaaataagatttgatttaaaaacttttaatagtttaatttactgatattatacatttctgctcatatgttagattgaattgtattacattttttatgttcaaccatttttgacctaaaaaacaagtttcttgggaagccgaggcaggcggatcactcagaagttcaagaccagcctggccagcatagtgaaaccctgtctctactaaaaataaaaaaaatgagctgggcatggtggtgcacgcctgtagtcccagctactcgggaggctggggcaggagaattgcttgaacccaggaggtggaggttgcagtgagccgacaccacgccactgcactccagcctgggcgacagagcgagactgtgtctcaaaaacaacaacaacaacaaaaaacaagtttcatgtgatttaacttaaaagttctggcactatatgtagttcttccagtgattacatttgtaactttaaagttcacctttttcttgttccagcaactgcagacggtctctatgaatgccttgttctgtgcactgacatctatattcctatttgtcccatgctcatctatctcttccacctcccagtttcagtcaagactgatcacttttgtattctcttatagctaaaattttggtgactgtggaaaaacttgaaaatgaataaaaaagacttcatatgttttctttgtaaatattatttactatagtgccaaatagtccactgtcattacgtttcctttctagcacttccttcatttttctagcatttctagaaaccactctggccgcctatccggctgtttcctagaactgatcttcagctttccttggttgcttccacaatttcccaaattccatgtcttctttcttttctactccctcattttacaactacttaggaaaagggatccaaaggatatcccctttcctgagtccttgccagcaaatttctatattctttattctctcatacttgatggctagtttagctgggaagagaattctaaattcaaatgatcatcttgcaccaagggtgctggtgggaatttgttgtcattgttaacaggggacctctctttttcttggcagccatccttaggatcttctctatgtcctctgttctgattttgatttgatgtttgccatacattgttctttatttcattcacacaaaggggcatttgcagggtcctctggagactcatgtcttttaacttttgtgagattctgttatacttttttggataattcctttgtcctctcctttcatctgtttttgctttttctattcttcatctttttagtctcttttttctaccttctttttctaccttctgagagactcctcaactccatccaacacttaacgcaaaaatgttaatttctgcaattgtatttttaacttctgcaatcactgttaatttttaaaaatagactcattcttgtcttatggatgcagtttgtttttttttttaagaatactagagtttaagatttttgagttttcaaagttcccctttctaaactacatcttttttctctggtatttcattttgttgttgttgttgtttgcttgcttgcttctcttaaacccttggttgttggttcatatttttaaagtaaggcaataaaaataactgactttgggatctttgtgcacactggcagaggttatcaacttcattctagggtatgggggagcaagctgagtgttacactgggaacttctacaagccagaatgtttgcagagggttatttctctaggatcttgcaatttctttaattaactttttgtttgtttgttttcctaaggatgggaacagacacaaccgtgccttatactataatagcttttaaacaactccctagcttttattcccacagatcatgccttttctacatcataaccggtgtaatccatcttcacacctctctggggttccattgagtagacgggatctctctgctcacactggctgtggctttctcttcctcatctattactccttaactgctctgttctgtaaacttgctgaactctccagtccattgctgatcctctcccattccctgtgacattgtgggctaataccatttcaatttcttttactgccatctaagtgaggtctttggagggagaagagctaactgggtttcatcagtttgtttgtttttaactgaaagtccaactatttctgttctctgagtttccagctctagaagtttccttgacttctcttgggcagagttgggtcctccttgtcctggtttcctcctcactttgtctcctccctctcccccactgcatgttgtcattgacttcactttctgagaccatcacaaaagttgggctttggatctctggtgacatcggaagtgatggagtctgttttgggagaagtcaatctgggcttcccagcttttaaacaatcaccattgctacagggcgtgccaaaggcagggcgatgccaggactcactgcccagtagctgtgcacaccctcattagacacctggaatgttacaggatgattccatcaacatcgtaaagagacaaacattcattgagttcagtgggcgggtccagggtactggaggctgaggcctagaggaagaagacaatgagcaacatctgcccctgacgcccgcccgccttccacctccctgtcgatgcttccaggtgctccctggctttgatgaccccagcatggatctttccaagtccaggctctgggggttaggggaggctctgtgtttcagctgctgccacactcaatgaaacctttgtttttattagattttatttatttatttatttttttcagacacagtctccctctgtcgccaggctggagtgtagtggcgcgatctccactcactgcaacctccacctcccgggttcacgccattcttctgcctcagcctccggagtagctgggactacaggtgcctgccaccacacctgactaatgtttgtatttttagtagagatggggtttcaccatgatggccaggatggtctcgatctcttgacctcgtgatctgcccgcctcggcctcccaaagtgctgtgattacaggtgtgagccaccatgcctggccaatttttacttttattatttcgttttattttatttaatgagacagggtcttgctctgtggcccaggctggagtggagtggtgccatcttggctcactgcaacctccgcctcttgggttcaggtggttctcatacctcagcctcccgagtagctgggattacaggtatgtgccactacgcctggctaattttcgtatttttagtagagacggggttttgctatgttggccaggctggtctcaaactcctgatttcaggtgatctgcctggctcgaccaagtgctgggattataggcgtgagccaccacagccagctgtttttattttttgagacaaggctgtacctcccaggctggaatgcagtggtgtgatcacatctcattacagcctcaacctcctgggttgaagcactcctcccacctcagcctccggagtagctaggaatacaggcatgtaccactacatgcagctatttttttttattttttgtagagatggggtctccccatgttgctcaggctggtctcaaactcctgggctcaagaaatctgcccgccttggcctcccaaaatgctgagattacaggtgtgagccaccacacccggccatgaacctttattaaacacctaatatatacctggcatcacgaagtcagttttcttaaccttccaacccctgtgggaggtaggtattattatttcactttacagatgacaacactgaggtccacgacggggcactgacacatctgagctggcagacctgtcacatgagctcgtctcctgccatctggcctagagctactcacccctgccctcactgcccactgcttctcctggcatggactggatcagctgccaacccaggccctgctggccagggggatgcaagtgccaggaggacactcactttcgtggtcatagaccattgcgaacttacaggggttctagtcctctaagcctagtgagggctccctgagaattaagcattatttttggaggtcttggatgatgagatggagaaaagcagtgggaataaaaaggaatgtgggagaaaaatgagtggagagagaaacagatgggatagaaggaagtgagagaaaggagatagaaatgcaggtgcaagccatgactgacagtcactgcaggcccagcctggacacaacaggagccatccggagcccacaggaggcatccttgtgtgctgggaactgcagaattggtctcagctctgccactgactcagtttccccattcacaccagggtgttctgagggccaaagaaggcaatcgatgtaaaagtgcattgtaaactggaggtgcgcctgagtggagaggctttcctggcactggtacaccaggaaggcaggggtctgccccattggctacaccccggagcagaacccagaacactcctgcgcagcatgaaggacacccaggaatgaggaggctaacagagatgcagagagctagcaggggtgcaggaggccttccaggcaagccttccctcacaggccccacagcccagagctcccataccctccatctgacctccactgcagggcctacctgaggctggccagcaccccagcttgctctcaggacgaaggcaagagggttgcgcctcctcctcag

SEQ ID NO: 97696 - DNA, 22886 bp, Homo sapiens
ctcactgcctctcagggctgcatggaccacttcttcctgaaactctcatccatggacttacattttacctattgaagcctcatggagtaatgctaatctgaaaccacagccctcagatttagacagacttagttgagattccagttctgttactccctagctggatgatcttaggcatcttatctaccctccctggacctctgttccttcatctataaaatgggagcaatgatttatacacaaagagtggtggttgtgggcgtaagatttatgaaaacacccatcataggcattgacacatttaggatgtcaaatgtgggcattatttttattccctattccctgcattctcccctgaagctgcctgatactttttctggaagctgggaatggagatacctgaagctaaaacttctctggacaaaagcaggaatatacaatcctaaaagctgcacttaaacacaattttagacttcaaaagacagcaaaggagatttgaggcccagagatgggatagaacttgccaaagttcacacagcaggtataagtaggtagaacagcaggcaagcaaggagagggaggcaaatgggcgtgtgagtagaggtcagggctgaggtattgagctgaatccaaggacagacagctgagcaagaagaccttcagctgacattgccccatttcccatgcccagcagggcctggcatttgcctgtctttggaactgctccttctgggttcctgagtttgcagtagtttcccagaagtgctaggtaaatacctttgttgtttgctgaataaccagccccaaagattggacaagggtccccatacaaattttgcctcaagattggctccttctatagagatgatcagcccccctaggcacaaccccacccaggtgctctccacagggtcctctatcagggccttgctgggagctctgaaccccaccacatggagtggcttcggtgtgcatcatgtggctcagggcttagcacctttgaagacagtctattcctcccagccaccccgagaaaagcatggagtattttctgttcggtacctttcttcccaaaaaagatagccattccaatatgataagaagtcttactaacctttggaaggaaatgtcctgggctgatggtaactgcagttatggggaagctggagatgctggggtcagcatattatgctacttgatgattctttctttaggttatgttttctttgtttgtataattctgctttctctatccccacctgctgccccctgcccctcatcttcaggaaccagaaatgtgttctcatggacaaagtctgtcttctgtctggtttggtgtttgtttgtttgtttgtttgttttgagacaaagtctagctctcgtcccccaggctggagtgcaatggcatgatctcggctcactgcaacctctgcctcccaggttcaagcgattctcttgcctcagcctcccaaatagctgggattacaggtacctgccaccaagcctggctaatttttgtatttttagtagagacggggcttcaccatattggccaggctggtctcaaactcctgacctcaggtgatccaccagcctcagcctcccaaagtgctgggattacaggcgcgagccaccgcgcctggccctgcctggtttaagcttatgtgtcccaggctccctacctcccctcagtgttcatgtgtggacacctttgcctatccccagcaggaaatcctctagtttagacagccacctgaatgtaagggctttattaattgatttctcaagatgtccatttcaaggatattctaattttgtcatctggaactcagtaatgccacaattctgaatttcttagtttctataacccagattttaccatgctggaattctgtgatgctaagattccataactgtgaactccatgaatctagaatttcatgattttttaaaattgtgtttaatgaattttgttggtaatagtagtcagcactctcttggcctcagttttgtgtttgttttctagaagttgcaagtctcagctccaggctctcttctctgggcatgccggtgcagaggaaggtcatttccacctctcccgaggctcaggggttgggatagtacccagggaagcccagtcctagggcccaacactcagtctactccctctctactgaaaactcttacttgggcttcagtacctgagggtagcaggaaaagcagtctcctttgcagtccttccacccagcttcctgtcctccttgcactgccccatggtccagggagagaaagttttgtgggagactgccctggctgaatgggtaggtgtgggaagaagggttaagcactgggcagagagccagtggaggaaccaggggacattccctagggagccctgcagccttccccagaggtgaggaaggaacagaggccggaagtgggggtgtgggtgagggcactggtaagggtggggtgaccggtattgcattgtggggttggagctgggcttccggccattgacctattagtgacaagcgacctccagcctggcgccccaggggctgtctgttcgtgcccttacccactgactctgtgttcctgtgcctgagtcagactcccaggaaaatctcgggggcaggagttggggtctggggaacctatttctctagagcggagccacagaggcgaagagaggggccaggacactccaaggatcagatcagggcttggggcagaaccaagactgaagctccgggctcctgcctctagcccagagctgttctcttcacggtccaaagggtcccagaattataaagtaatactcccccaactagccaggtggtgaaactcagggctagaggaagagcccgtgctaggctgcctcccaggagcagcctggaccttcttccagtcctgcagcacatggctgaagctgccaaacccgattttccagtggctgcctgaggctggctggagcgggaagccctcctcctggcatgaaccctcaggccatcatcctcctccccctcacctcccgattcggtggcttggcctggcctgctcctcctgcacctgtgccaactgtcccagtgtgccaccacttccttctccacctgcctgccatctcccctgggctgctccccaggcactgtgaggtgtggtccagagctgtccatttctgagcctcggttttctcatctatagatgaggaatagtggcctgcctcccagggattgactacaggaagatttcaaagaaaagtgaggtggtagggggcaagcagtagctcacgtctgtaatcccaacattttgggaggctgaggcgggaggatcacttgagcccaagaactggagtgcagtggcatgatcttggctgcaacctccacttcccaggtttaagtaattctcgtgcctcagcctcctgagtagctgggagaacctgtttctacaaaaaaaatgttttaattatctaggcgtggtggcctgcacctgtagtaccagctacttgtgggactgaggtgggaggatagattgtgcccaggagactgaggctgcagtgagctaaggtcaggtcactgcactccagtatgagtgacagagagagaccctgtccctaaaaactaggcaggggaaagggctgagccaggtggctcatgcctgtaatccctgcactttggaagactgaggtagatggatcactttaggccaggagttcaagaccagcctagcccacatggcaaaaccccatctctactaaaaatacaaaaattagccaggcatggtggcacatgcctgtagtcccagctactagggaggctgaggcacgagaatcacttgactctgggagaagacggttgcagtgagacaagattgcgccactgcactctatcctgggcaacagagccaggcgctgtctcaaaaaaaaaagaaaagaaaaaagaaacaaacaaacaaagaaaaaggagatatgagtatcatgggccaccaattagttggatggtgtgttagtgccatgttgggagcacagcctagggtgtgagaaggaagcactgctctgtggaattctggagatatggttgttaggatgaagggtgcaaggtaagggctgtattccctctgatttcctcaggttatctcacctatgggagaaggaagaacagagagaggcagagaacatcatcgcaaacggagcccctgttacaagtactcagagacctcctcacgatttaatgaagagcttgtgtaatctgtgtaatgtgcctctcactgagctataattcctctgggaaagaactcccactgccttgctcactgctgtatctccagaatttagtaccatccctggcacatagcaggcactgttgactgacacagagttgcagattgaaaagcagaagcagaggcaccttaaggggtggagaccatctaggtcagctcagctaacccaggcccttccagcctgagagcctggtgttctcagccaccagggaactctggcagggtgggagagagtgggctgcacccgctcatccgggagccacctaaactgaggtggtgggtgccctctggctgctgctgcctctgggagcctagatggggaggagaattaggaacctgaagggggaggggcagtgaagaagccatcatcgcagatacagctaaaaatagctggaagagatgatgtcatctggttcccacagcttagcacccccatcatacacacactcgagcacaaacacacactctcacagacacagatacacacagacacaagtgtgggcatgagtgcatgcacacacacatactacacactcatataggggagggaggcttctgggtcccagggccgcaggggcagggaagtctggtgagtgtgtctgcatgcgtgtatgtctgtgtgtgcctgggtttgcatgagtgtgaaggcatgtgtctgcatctgggtgcttgtgtgcttgtgtctgggtgcatgcatgtttctgtctgtgttcatttagaggcatgcgtatgtgttgttacatatatcgtgtggggatctatgcatttgtgtctgcgtatatctgcttatagtatgtgcttgcatgcatgtgtgtggttgttgcagtatgtgtctatgagttcacttatatttacatgtctgcatgtgtttgtgaactgtgtcatgtatctttatatgtatggcccctcttgggcccttgagcatggcccaagcaccttctagctttgactgatgttcagcaacccccatcccataacctgaggagcccagcaccgtctgggcatggtgtgtcagtgaattctctgcctcaacccccctcagggtcccagtctctggcaagagttggggtagatagacataagcacaattcactttcccttcacaggcagcaaaggacattagccacacttcctgaaccccagggggccaggccaccaaaggtctcagggttcactcccttccctagccccttgggaaggtagcctggaaatgcagccagatctcggaccggtgcaacacgtattagcccatgcatgatgcaacatattcgagacagagtcctacaaaatgttcccagcgactaagacacaaccccacagaaacccggttacagccagtgacacatgagcacacactcagaaatccaaatggaaaatccccaggccagagagcttagcaccctccctactttctgggctcaaactcagtcttgccccacccctaagcaccccagctcagctgccagttctggaaaacactgacctcagagaatggttgaagggccgaaggtagtatgcctttctcagaatctcacccttctccatgttctcctcctttaggctgttccccatccccctcctgaccttcacttttcttaccagggctgatgtcctctccggcacacccataccctcacaaacgctccttgacactcacagtcagtcacagaggcacattaaatcacaaaggcacattcagccacatctactgatactcctattctcccggcctcagacacacacaccagcagctacacctacacgctgaccatcacaggcacacagaggcacatccacctcacatccacctcatacttgtgtactctcagggttcagtctttcatcctatccctctctgatctgtgcctcccaataccttccaagatgtttacagagacccttctccctgtgcagttaggagtgtaaggcaagagagcccctacttcatggggcagatcaagagctgagaccaaagatggtctatgttgctgaccttgtcctgtcctcctgctgtcttaaactatgatccctgctgcggtcactgaagcctttccctgtaagtattcagccataaccctcccctcacgccctgcatagtcagctggttaacacctctgtgtggaataaggcagtttgagcagaatgactgtatttgttgttcaccacccacacggcccctaggagatgcaggtccagggcaaaccaagcttctgggctagcttctgggcacttctagaggatcagaaaaatcccaggttgcctgagatgtctgagaactgaggagaggaaggagagggaagagtttgaggaaggaagcagttctggaagttccctgcctcttggattcagcccctccccaaaccctctgcttccagccaatccatcctccattaaggctgtcagcactttggggtgcctgccatcaggagtcccccatatatgtaggggtgctatttcacagagatcatcctttggcgtgcctaaacagaaccaggtagggaaatcttcactggctctggttttttttttttttcttgagacagagtctagctctgtcacccaggctggagtgcagtggcgcgatcttggctcactgcaacctctgcctcccgggttcaagcaattctcctgcctcagcctcccaagtagctgggactaaaggcgtgtgccaccacgcccggctaatttttttttgtatttttagtagagatggggtttcaccgtgttagccaggatggtctcgatctcctgaccttgtgatctgcccgccttggcctcccaaagtgccgggattacaggcatgagccaccrcacccagcctagtggctctgttttttaaaaccccaccctggctcacaggccccctggctaaccttgaggtgggaagatccacactatggtggtgtcagtgtgggtgttgttgatacccatggccctggtggcaggattgatggctgcactgctggcagttcgacctcggagaccctgttgatatcttctgcggctacacttgaacatcctgggaaatcggggcctgggccagcccatacctggcctgcggtagggggaacgcatgccctggggccgagggccacggacaagccgagatggccccatgggcacagggagcttctgcagtgtgcctggggggtgctgttggccagggtagctgaggcctctatgacatacaaagtctgcataagggcagggccctttattacaagtcgtgggccctggcccctcctcatgggtcaggctccttcacaatcttctttattgggtctggcctaaaagccagcccaagagccagacagcctcagtttggccccttgggaaaagaggccctagaggcggaactcacttcctcactttctcacttatccatatagtaacaatattaacaatgttttttgagcacttactacgtgccagacactgtgctgagcactttaccaacgttatctcatttaatctcagctactttacaaggatatgccatcattatacctatttatatacagtcaattctcattattcccagtaatgttctataaagtcgccacaaacactaaatactgaacaaagggtaaatgcaaggttaggttcctgaaaccctctggtcacaatatttttgtcaactgatctatacatataacctgattttatgtgtggagacaccttatttaatatatattgttggccaggcatggtggctcaagcctgtaatcccagcactttgggaggccgaggtgggcagatcacctgaggtcaggagttcaagactagcctggttaacatggcaaaaccccatctctactaaaaatacaaaaattagctgggtgtggtggtgggtgcctgtagtcccagctactcaggaggctgagacaggagaatagcttgaacccaggaggtggagattgcagtgagcccagattgcaccattgcactccagcctgggcaacaagagtgaaactctgtctcaaaaaaaaaaaaaatatatctatctatctatctatctatctatchaactatctatctatatttgagtcattgacattgaactcacrgccaacagcattataacttgtgcctgaatgaaacttatctaaagcacatatttcccctataaggcacatcacagccttcttgcacttagaaagactagagagcacttcagcactacaactggggaccattttagacagtaaaatcaccagcaaaaaacaccaaaaaatgtgagaatatgcgtcactaaatagaccaccaaaaagcacatttgtttactctatgaaaactgaaataagaagacagagagtcctcttgctcaacagacctcagctggaaatacgtgtgttggacggctgaaattttttgcctttctgctcatgtccatgaatgactgcaaaagtaccacaagtactggtttgggaattacaaataaatttcagtaagcaggcaaattcacaggtatggaatctgtgaataaggaggatccactgtataaggaaactggggctcagtgaggtgaagtcacacaattagaggcaggcaggaagcaaatccatgatgatcaagatccaaaacccagagcacttaactctcattattctgcactcattcactcaggaaatgttcactgacaacttcttatgtgccaagcaccagggccatagatgaatgtaatctggtcccaattcttcctgagaatgaaacagaaaggttccaggtgcggtggctcacgcctgtaatcccagcactttgggagcccgaggtgggtggatgacttgaggtcaggagctcgagagcagcctggtcaacatggtgaaaccctgtctctactaaaaatacaaaaattagctgggtgtggtggtgtgcacctataataccagctactcaggaggctgaggcaggagaatcgcttgaaactgggaggcggaggttgcagtgagccaagattgcgccactgcattccagcctgggcaacagagtgagattctgtcaaaaaaaaaaaaaaatagaccttctccttctccttccactcctcagtcccttcttcctttcccccttactctgctcctcaaatgcccccttcccaacttcatcctcctttctgtttgtggaggactctgtggcacccttagtaccaccctcacaaacctcatctttcccccatcccctcctccagcctctactcttgccatcctcagtcttaaaatatgaccttgcttccaccaacttctagcaactgtaactataaaccgacctgcccctgctcctcctcttcctcaggtcagaccaaggcctcttcccttgctctttatggaagccagccttgtctgcctctttagagattccatcagtgtagacagtctgcttggtggttaagatgtagactctggtgccagactaactgggattgaatcctggctctgccacttacaggctttgtgatcatggcaagtacctgaccctttggtgcttctatttccccatatttaaaaatggagatcagaaagtctatctcatgggatggttgtgaagaggaaaaaaagccttaatatatgcaagacatttaaaataagatcagtattattagtgtagtctgtaatactattagcccctctctcttctgtctcttcagctgcctcctttcactataaaaacaaaacaaacttagaaatccacttcctcagctaggcacagtggctgatgcctgtaatcccatcactttgggaggctgaggcagaggattacttgagcccagttcaagaccagcctggatagcatagcaagacctcatctgtttaaaaaaaaaaaatttgcttgagtgccggcaaatacctgtggtcccagctacttgggaggctgaggatcatttgagctcaggaggtcaaggctgcagtgagctgtgatgttgccactacactccaacctgggcaacagagcaagaccctgtctcagaaaaaaaaaaaaaaaaatcaacttcctccatctcatagccccactgcctgtgactctctcgactttgaccttcttgctctgtgctcattccctactgtcccttccttctagagcaggaagaaaatctcatttgaaaagcccagaactattctgttacacagaagaccaggaaagagaagtttaaaaccaagtctaagaaaagtccccagggtcacacagttcataagcgacagagccaggattccagcacctggtctgaatgacccagaagccaggacttttcccccgcacctctacatcaggcgtgctggagcaggaagcggtcaggcagccccactaggagtaacaaagatgggatcacagagccttggaactgggggtggctccttcatgagaccatggtgccacctactggcagaaagagaaggggtgtacacagagcgctaagagaagactgggaaggagaaaaagaaaaagatggggaaggagaggagatggaaagatgaagggaggggaaaaatggggaatgtgaggtttmatggagggaagaggattaggaactatttgctactcgcaggagagagcggaagctgccaaatctcagtcatttccttgaaagtgagtgagagacagagaaagagaaagagggagtgtgtgtgtgtgtgtgtgtgtgtttgtgtgtgtgtgtgagtgaaagagatacttaagtacgtacatcagatattattctgttgtttgttagttgctgggagtcagtccacaaagaatttagtgtgcgtgtgtgcgcacggacgcacacacacacatgcattcaggaacactagcacatgtttatgtatgtaactgggtgcttgctgtatgaacatatggatggcagcatgagcagatgcatgtgcatgtgagcatgagcacagagggtatgtatgagtgtatcagcagatgcagggtaagaagcacattacactgttgtggtggarggcacgcagacattctgggaarccacttgccccacccctgggctgctkcttcttgagatcaggaggggcgttgcccagggctggtgttgccaggtggaggcctgctgaggcagtggttgtggggatckgtctccaggcagcagggggcagcagggtcaaggagaggctaactggccacgggtggggccagcaggcgggcagaaggaggctttaaagcgcctaccctgcctgcaggtgagcagtggtgtgtgagagccaggcgtccctctgcctgcccactcagtggcaacacccgggagctgttttgtcctttgtggagcctcagcagttccctctttcagaactcactgccaagagccctgaacaggtaatgggatagggatacagattatcctgtgaagtgatatcgatctggaaacaggtctggggagctggaggggctctagtgagggttctgggagggtctggggttagtgtgggggggagcacaggatatacaggtgctaggaaagagcatggagtgacctgcagtgtgggagtcaggctgggtgtgcaggtggaggaacctggggtgttaggatctcagagtgtcaggtgctggtggaggtcctgggtagtatagaggggtaagggtgttaggatagaaactgggaaaaggtctgtgtcagaccaggtacaggagaagcttggtgagatatgggttcaggatcctggggtctggcatatctggctgaatatctgaagccagggccagcccaggtrggcccaggggaaacaaggccctaacttgcacatgtctacctcccaggagccaccrtgcagtgcttcagcttcattaagaccatgatgatcctcttcaatttgctcatctttgtaagtacggacattgtggactctttggggctccctataggagcaggtcacaagctgagtagagactaagctggggaatgggagactgctatgcccaggcttcgtcctgcatgtgtccccttatgagtgggatgcaaaggtctccccaaatgctgctgattcctagtcccagcagcagccaggctgccatacaggtgcgtgtgtgaaaaaggggatggagaagctaggggcaccccctctctcctacaaagctttagcctaggcttcaggcagggcagagtaagctaccaggaatgattctccaccctttataggcactgggggcccagaaaatagaagggctccacccaagtttacctaccacagaaggaaattcagtacagaggaaattcttctgtatgacggggagctgaaaggagggagggcctacctctcatcagagcaacagtccttattcattcgacaaacattcattgtctaggataccatgatgggtgctggggtggcaggtaagcaaagcctttctctgccctgaaggatctcagctccgataagccagataggcagataataacaacacagtgtgtttgggcttaggacggaggttatgggagcctgaactcagcctggttggagaatacttcctggaggaaatagctgaagctgggaaattgcacttggtgggggagttataaagcatgcataaagggccagaagtagtgaaacttgatatcgttcagaaaaccagaaacagattgcatagggcatgtttgagaagctgagccatgaggcgtaaatcctggagatggtggtggagatagggagaaacggacaaagtggacaaaggacaaagctctaggatgatggctgaggggtagaagaaggggcaagggagacagaggtcttggagatgacgcccatatctctggcatgagcaacccagatggcagggggtggggcctggtttgtgggaaggggtgtcccactagcagatgtgtacccagtggaggtgcagctcagattggagctggccatgggtatttgaaaatcatgtgcgcacaggtagccactgaagccatgggagtggatgagaacacttggaaagtgaactctgggaaacccaatttattagggataagcaaaaaaaaaaaaagccactgtgaaggagatggagaaggagcagtgggagggggagaggaaaacaaggagagtagtacactaaccacattagagtaggttagtgtaagtgaaagtgaggaagtgggccaggtgcagtagctcacaactgtaatcccagcactctgggaagctgaggcgggcagattagttgagctcaggagttcgagaccagcctggccaatatggtgaaaccccgtctctactaaaaatacaaaaattagctggatgtggtggcgcatgcctgtaatcccagctacttgggaggctgaggaaggacaatcacttgaacccaggaggcggaggttgcagtgagccaagatcacaccactgcactccagcctgggcgacagagtttatgtatgtattgattagtttagaagcgtgggtagactctctagttctgatgtggtctgtgccttgggcttccttcggctgcagggaacttgtgtttttgttgttgttgttgttgttgtttgtttctttgagacaggatcttgctttgtcaccaaagctggagtgcagtggcatgatcatggcttactgcagcgtcaacctcctgggctcaagggattcccctacctcactcagcctcctgagtatctaggactacaggagtgtgccaccatgctcagctaattaaaaaaaattttttttgtagaggcggtctcactatattgcccaggctggtctcgaactcctggacttaagtgattctcccacctctgcctcccaaagtgcggggattacaggcatgagccactgtgccagtcctgaactagtctttatccctgtatctggaggaagcaataggattccagggatttggacaggagaggctctgccctgagagggttaaaggcaaatccggtttgatttctggcctctgttacccagaccttgccaggctgggcaaagcaggatagggcagacctccagctccatgaaatttgaccctgcaggctagaagtccagctttctgtccttgggcaaacatgcctggaatccagccacaatctgccacctcacttccygttctagcctcagtttttatagctggcaagtgaggactagtcaccaaggtggtgtcaggctgattcatccactgaagccctgggccgggaggctttcctctaagatctgtgggaactgcgcagggccctcctcaatctaggcctcagaattccccctgaggtttggagttgagctagacagcctttaagagaagctctggctgtattcccactggtacctcactttcctcttgtgaggcaaggaggtcttgtctacatgaggggcgggcctgaagttggattctggaggggagccaaatggggcctcaggtgggtgaaccttctcaacctcctccctctccaaggttgccagcaggtggaacctcagcctcgcctccattactatggtgactattgagcctgttctgctaccacccccgtctccacctatcagaggacagagtgttctaggcacccatagcccagaaaggaaataggaggctgggccctcacctgcctgttttcaatcctagctatgtggcaggaccctggcagcagtgagggaaagtcttgcccctctgcccaccctgaggatatttctagaacccctgatctcctttatatctgcccaggtgtgcagcctggtcctagctatgcatatcccagctcccatttttctggctctagaggatgtttccctccttacaggatgaggttttagactccctagccaataaagagggaagtttctcggctcccatccttcttactcagctgtgtggtagtaagctacttgccagcactgtttaaggcctgcctgacctctctctccccagctgtgtggtgcagccctgttggcagtgggcatctgggtgtcaatcgatggggcatyctttctgaagatcttcgggccactgtcgtccagtgccatgcagtttgtcaacgtgggctacttcctcatcgcagccggcgttgtggtctttgctcttggtttcctgggctgctatggtgctaagackgagagcaagtgtgccctcrtgacggtgtgtgaaacccagctccacaggctgatgaccaagaktcccctcgccyttgacaccaggccctgggattcccaaaccctgctttggacccccctaggctcaggcttctgtctcacttttccggggggggggattagggcaaggagggcatgagggactgtctctccctaaaacccagacccctgttccccactcagttcttcttcatcctcctcctcatcttcattgctgaggttgcagctgctgtggtcgccttggtgtacaccacaatggtgagacactgggatggaggaagggaagaagattgggcaaaaccctgggagtgggctgtggcctgtgaatggccaccttctgtaccagcccctaaacactggcctgcctcacccaggctgagcacttcctgacgttgctggtagtgcctgccatcaagaaagattatggttcccaggaagacttcactcaagtgtggaacaccaccatgaaaggggtaaggttggctgggggaggttttagggtggagagaaagaagcaaggccccacctccaccctcatcttgtctccagctcaagtgctgtggcttcaccaactatacggattttgaggactcaccctacttcaaagagaacagtgcctttcccccattctgttgcaatgacaacgtcaccaacacagccaatgaaacctgcaccragcaaaaggctcacgaccaaaaagtagaggtgtgggctggcatgagtgggtggggactgttttcatggcctcagagtggcaaayggggatgggagtagggcagctgccaactataaatgctcttttctcttcctgaagggttgcttcaatcagcttttgtatgacatccgaactaatgcagtcaccgtgggtggtgtggcagctggaattgggggcctcgaggtaagcagatgaggaggctgggactgggacatgggcatgagaccagggctgctcaacccatctgaggcytctctggaggaaacagacttctaactgggcctsaggtagggtgtctgtgggacaggcttcaggatccctatcmtgttccctcatctctccctgttcctccctctccagctggctgccatrattgtgtccatgtatctgtactgcaatctacaataagtccacttctgcctctgccactactgctgccacatgggaactgtgaagaggcaccctggcaagcagcagtgattgggggaggggacaggayctaacaatgtcacttgggccagaatggacctgccctttctgctccagacttggggctagatagggaccactccttttaggcgatgcctgactttccttccattggtgggtggatgggtggggggcattccagagcctctaaggtagccagttctgwtgcccattcccccagtctattaaacycttgatatgccccctaggcctagtggtgatcccagtgctctactgggggatgagagaaaggcattttatagcctgggcataagtgaaatcagcagagcctctgggtggatgtgtagaaggcacttcaaaatgcataaacctgttacaatgttgccagttggactcttcatgtatccttggggagaggggcctaaactggccacggattcctgtggggctgccaactcagaaggccctggaaaggagggaagtagggtggggttgggggtcagaagtggttatttctccccttcatttgggttccaggccttggagggaaactaagagggatggctgagagggcatgaagaagtacagttgggttaggccagtctgcctccttataaaggggagaactttggactgaaactaccccctcctgggtaggggcactggactggaaagctatgaaaataacaagcttgtgacgaattcttaccagggcaatgggaaagggtcactccttaggttctgggaagcccttcaggagcccccttcctagggtccaggctgcctgcctttcccactcaggcaaaaccccagatctgtccctgcttctgggatctcagcaagcacttcattttttcgttgctgctggcctacctggtgttcttcagacctcacctctttttcttttcttttctttttttttttttttttttgggacagagtttcgctcttgttgcccaggctggagtgcaatggtgtgatctcggctcactgcggactctgcctccgggttcaagcagttctcctgcctcagcctcctgagtagctgggattacaggcacctgccaccatgcccggctaatttttgtgtttttttttttttttttttgagagagtctcgctgtcgcccaggctggagtgcagtggcgcgatctcggctcactgcaggctccgccccctggggttcacgccattctcctgcctcagcctcccgagtagctggcactacaggcgcccgccacctcgcccggctaattttttgaatttttagtagagacggggtttcactgtgttagccaggatggtcttgatctcctgacctcgtgatccactcacctcggcctcccaaagtgctgggattacaggcatgagccaccgtgcccggccacgcccggctaactttttatatttttagtagagacagggtttcaccatgttggccaggctggtctcgaactcctgacctcaggtgatccacatgcctcagcctcccaaagagctgggattacaggcgtgagccacctcacctgacctagacctcatctcttctttagccctaactatccctatgctccaggtaggaaactagggatcggaaaggccaagatacttgccccagtcccacaggcttctgtgaagagctcagcctagatttgggcccagaactccagcacctggtgtagtcctggctgacatggtactagttccacttgaaggggcagctggccagaatgtctgatatagacctgatcactgttgagccaggagtgagaggcctgagggaggctatggcaagagggtacagtgtctgctaccaagcaaagcccagcctaacaaaccagtccccctccttacttccctttgacccctgtaactctcttcctgagcttttccagggcagcccagaaccaccacccccttgctgagcccagaaaggaagagggacctggccagaaccaaacagtgccttagagctggtctgtgagggccagaccaggagcctgctagggtgcgggacagggggaggagctagcctgcctcaccccttcaccaccatactgtgcctctcacacttctcctctgccgtgtgcctgtgtggaggctgcatgggatttgtttgcccagggcgggcctctacctcatcatgggctaattgctgctcaacctggctgttgtgccacctcaggcactatatccagctccaacaaacactgaaggcgtcagggtggcgagatatgtccaagcgacataccacccatgctgtcaccgagttgggctccaagcacctgtgaaagaggcagggcagagagcaggcaggagggctggagttccagctggagttctgtacttgtacagaggcaggcagaccctttctgaagaggtgctccacactcatcctcctgacattaggcccttcacagatcccttaaatgttcttttccctgccgtaggctttctcattcactccctctggacaatcccatccattttctggtgcccctatgactaacttagatcttcctaacctctttgggttactggctatgtgagaatctgatgaagaccatgacccatttctccacaaaaatgcccagatagagaattctgaatagcaaagtgctctaagggccatagacacccttgctcctacatctccatctgcaccctagcccgtctcttgaatgatgcctgcccagtcctgtcccatccacttccttcccacccctactatgcacacctgctctctcatttcctcttccaactccccagtatccctttttgttctctcctgctctgtctctggggacaggtgcccggcccaggcaagataagcaggaacccggctggtggttaaacggtggggaagaggtagggtggctgctccaagcctcaagtagggcggggctaaagtcaagctgtcctagggtagagttggggaaaaaccttggagtttgagactcaggcatcccctggtggccaaatggccccaaatggaagataaactctgtggaggacagtaaggaaaactcaccatccaacacaagtattctctccaccacttccctccagcacccccctgacacacaaaatcacaatcacaagacatccccagagggcttctccttttttaatcaatgaccaacttatccagctttggaaatctggacaaagagaaggctgagaggaggcctggtccagtgtctaagggtctctgagtgagtctgtgtcagcatgtgggccccagctgggcctgtccatgggttgggcacagcagtttcctgagtaagagccagccccaccctcagggcagcattccagcccaaaaagaaatccaggccctccaggttcggcctgttttcaaggccctcaggacagtcaataaataggttagattctgagccaggcctggaaagtgagggtattcaaagggcaggatgagctgctagggatcgtaatgattcccaggtactctcctgcccttctccaacaaggaagtaaataaatagacttttaactcaggaacggggtgttggagcaggggaaccctccccttggagttagtaattaagtctcatgttaaaaacaaggtagccccagcccctaccagcatctacaaaatcctacaggatggagggaagggctagccagcctgggggtacacagtacccagccccgcagggtcctggaggaggtctcatgtctgttctggggctcctggggctccctcctcctttgggggtggctccaggaaaattggggtgactgagggtggcttcttcactctgggaaaataatacaagaatgtatagagaagaagccattagctatatccctggatctcactaggcctcctgtttcccagggcagaaaagggtcactcacgagtagggggaagccgggacccccaccaccaggaagtggttcttcttccgaaacaatctccacaggccccgatggttgccacgcacatccaggtcccagatatggaggcactagtgagggtgggatggagacagagacatgggtcagagagctgtagggaggggtcactgacgaccctttggcccagcccccacccctcctcagaaaccacctcaatttgtaagagatagcatcttttagaatatgaatttggacaaggaggttggaagaggtgttctaagagtataaagaggaggttctgaggttgaagattccagagcaaaggctccctggatcttggggcagtatgtgtgtgagggggaggggttctccagggtgggcatggtattggagcaccttggcaagctgggtccaggtggtgaagtcatcatctttctccattcgaataaaggccacgtaggtgtggccctctgtgtctggcaggaaagagtcttcacaagggttcttgctgtggtccagaacctcagcctcactgcagtagagggtgggagaatatagccaagacagggcccacttcatgggtgtgtcccacaggaccctgtacttggttgaatgctctgctgttgccaccttgaagttctttttttttttttttttttgagatggagtcttgctctgtcgcccaggctggagtctcctgcctcagcctcccaagtagctgggactacaggcgcctgccaccacgcccggctaattttttgtatttttagtagagacagggtttcaccgtgttagccaggatggtctcgatctcctgacctcatgatccacccacctcggcctcccaaagtgctgggattacaggcgtgagccaccgcgcccggcctgaagttcctaatgtttgagatgagggccctgattttcattttgcacaggaccctgtaaattatggggccaagatccccagtatttgactctttgctccctgctacaccccaattgtcctaggccatacctgagcagcctgtgaacttccacttcataagcttctttcttcagactgaagaggagggagaaatgggtcaggggagtgggcaggccctcaggtcccatgggtagcactgagcagggcaaggggtcacatgggaatctgtagccgcagggctggagtaaacacacaggcccagcattggaagggactttcagggactggcctccaaatctcctagatatccaccccttgccctgctgccagccccaacctgtccacattcctgagctggacacctggaaccgtgttgaacttgtgcttcttgaagtaggcctcctggagtgggtatgagagtgaaaatcagcacctcacattgtctggcccacacccacttgctgaccagccagacatctataagacacacaaatgaagtcctagacctgtaaagagccctctaatttcccaccgtcttctccatcctctttgcagcatcctcagcaagctcttactagctttaatttggcctccaccattgctggagagctcatgctgtcacggcagctcacactactgcaccacagacccatgaactagcagtccctgcctcttgtagttctccctgggcctgctgttctagagccacagatgtcagaaacaggccctgcaggaggtggtgggcaaagggacgggctgggctgggaaggaaaaaactactttgactctggtactgagagtgacctgagggaagcgcctgcccctctctgggagaggaatggggctcgcgtattagtcagcctctgagggacctctggcttctaggaggttccaagctggacgctattcattcctttgggctgggctggctcaaggcctcccttgctgtaactggggaatggtcctctgaatgcagccaggtgggttggcggtacctaaggacttccctgttctcctcaggctgaagcataggctccagcacttgccaaaacaggaaagggcagagattgcagggctggaccagtacttagaggcagaaatactctccccagacacccacagtctagtgctaaaaatagtaaaaataaaaacaataccagctgacccttatatatgtttataattcaaagcactttacatatattgactcatttaaacctcaaaatatcgtaacccagtgaggtagtagtattttatcctctttttttttgagatggagtctcgctctgtcacctaggctggagtgcagtggcgtgatcttggctcacagcaagcttcgcctcctgggttcacgccattctcctgcctcagcctcccaagtagctgggactacaggcgcccatcaccaggcccggctaattttttgtatttttagtagagatggggtttcaccatgttagccaggatggtctcgatctcctgaccttgtgatccacccgcatcggcctcccaaagtgctgggattacaggcgtgagccaccgcgcccagccctttatcctcatttttcagataaagaaa

SEQ ID NO: 97697 - DNA, 104600 bp, Homo sapiens
aatacaaaaattagccaggtgtggttgcacacgcctgtaatcccagctacttgggaggctgaggcaggagaattacgtgaacctgggaggtggaggttgcagtgagccgagattactccctccagtctaggtgacagagcaagactccgtcacaaaaaaaaataaaaaataaaataaaataaattttaaaaaataacctaattagattaagaagcatccgcacagtcaaagaaatcatcatcagagtaaacagacaacccacaaaacgggagaaaatatttgcaaaccatgtatctgacaaaggactaatatccagaatctacaaggaactcaaacaaatcaacaagaaaaaaaatcccattaaaaagtgggcaaatgacagacatttctctaaagaagataaacaaatggccaaacatgaaaaaatattcattagggaaatgcaaattaaagccacaatgagataccaccttaccccagctacaatggttattactaaaaagtctaaaagcaatagataatgcatggatgtgatgaaaagggaacacttatacactgctggtgggaatgtaaattagtacaacctctgtggaaaacactatggagatttctcaaagaactacaagtagatctaccgtttgatccagcaatcccactactatctacccaaaggaaaagaagtcactgtatcgaaaagacaactgcacatttattgcagcacaattcacagctgcaaagatatggaaccaacctaagtgtctgtcagtcaataagtggataacgaaaatgtggtacatatacaccatggcatactactcagccataaaagtgaatgaaatgatgtcttttgcagcaacttggatggaactgcaggccactatcctccagtgaagtaactcaggggtggaaaaccaaataccacctgttctcacttataagtgggagctaagctatgggtacgaaaaggcatacagagtagagtaatataatggacactggagacccagaagggggaggccgggtgtggggtgagggataaaaaactacatattgggtacaacgtacactactcgggtaacagatgcagtaaaatctccaacttcatcactgcacaattcatccatgtaaccaaacatcactaaaggtactgaaacaactgtttacgctaataatagcataattgtattaggtgcatgtatgcatataaacaaaaacaaaacagaaagctgtctcacacacaaaagatggaacctgttatattaggaaaatatctagctctattactctctaaaggaaaaaacatgattagggataaaaacggtcactatgaggtcacttgatgaggaacacactaattttaaactcacatgcacacaatgcctaaattcacataaaaaaatgagcagcttttcagagaaatactgttacactgattacttcttaattttactattctccacctatcatattccttttgtgtatatggccaaataacatcattgaaaaactccaccctattccaccaagtcaacattaattttcttatgtagaaagtttaacaaacaaaacaggcttcaaaaattcagattttttaaaaggtggcctcattgtaagtaggtgaaattatggagacatcatatagatcacatatttcctcactagctgagtgtcttgtttagatggcaatgttaaaaaaaaaaaaaagtcaaaaaaatgtgttacgagtgctggttctggagcaaagctgcctgagtgtaacctacttaacagttgtgtggcttaaaatgttagtctctgtcttaggatgagggtgaaggataaaacaatagtgcctacctcactgggatgctgtgagcaattaaatgagataatccacaccaagtgtgctaaaaatgcatgacacatagtaagtgctaaaaaaaatatttaactctttgtgacttattggttaagggaactgcaaaaacattctttaatcctaaatgatattcttctaaaatgaaatttaaattattttaaaatgtaaaaatttaatactgaccaattaaatatataaatcatatttattttaactgaggaattcacttaataggcctttgcttgacagcctacatgccaccacctaaagaacagatagataaagatcagttttacccttgaaaacctgtttcttatggaggagacaaatctgtaaaatagacacctgcatttcacaaattaggaattatttcaatgaatggaaagctcttaaatatgcatgaccaattttaaaaaaatcacattttagtaaaatgaacataatcattatgtaacacaatgtttttaatgattctgaaacccctttaagataccatactgccccagaatcattctaaaaaatcatcaatgatatgcagacatacgtatatgttaaaactatgtcctcgggccaggcgtggtggcacacacctgtaaacccagcactttgggaggccgaggcgggtggatcatgaggtcaggagatcaagaccatcctggctaacacagtgaaaccccgtctctactaaaaatacaaaaaattagccgggcgtggtagcaggtgcctatagtgccagctactcgggaggctgaggcaggagaatggcgtgaaccaggaggcagagcttgcagtgagtcgagatcgggccactgcgctccagcctgggcgacagagcgagactccgtctcaaacaaacaaacaaaaaaaaccactatgtcctcaataagggaacaaaacaaatatacttcaaaacagattttactatgttttaaagaaatcaaagtaagtgttcatatggcccaacagtcctactcctagaaatctaccctgaagatatacctctaatgatacaaaaatacatatataaagttattcattgcatcattatatgtaattgccaaacatcacaaacaacctaaacgcccatacctaggaaagtggctgaacaaattatgtaccatctatacaacggagtactatagctgtttaaaaaaaaaaaaaaagaaggcagaaaaactgatacagagggatcgcaagggcataatattaactgaaaaaattaaagtgcaatggacaatgtctttcttcatgtaagaaataaatgcatgtaagaaaattggccgggcacagtggctcacgcctgtaattccagcactttgggaggctgagggaggtagatcacttgaggtcaggcgttctagaccaacctgaccaagatgcaaaaccctgtctctaccaaaacatacaaaaaaaaaaaaattacctgcgcatggtggcacgtacctgtagtcccagctgctcaggaggttgaggcatgagaatcacctgaacgcaggaggcagaggttgcagtgagccgagattgcaccactgcacttgagcctgggcaaaagtaaccctgtctcaaaaaaaaaaagaaaaaagaaaagaaaaaaaggaaaaagaaaatatacatgtatttgctatgagtatagaatatagaaaagttaaaccagaagctaaaaatattggttctttatagtaggtaggtggggatttgtgcaaaagagacatagaaaggctaaacaagaaactagagcttacttactatgggcaggtgggaaagtgagagaaagcagctgggaacgggaatggggtggtaggaatgaggtacgaacaacacttctccatgtatatccttttacaaagctcacactctgaaaaccacgtttcacatactgaaaaaataaaccattaaaatcaaccaggctgtggagagaacgctcaaacagtaaaaaatggaccaagagtacaaatcagtccacagatcagagagggtgggaaagaaaagaacgtcagtaactttgaaaaactgtttcttgactgatatatgaggcaaaacccaaaaagaattgcagaacagtgcaatgtagttaatgtgtttctcctagggtatgaattagctcttctgaaactacatgtatattacactgacacaacaacaaaaaaacagtaagtaaatacactgcagacaagaggcaggttacccatattggaaaaaataacaaataaggaaaaccagaaattaatcctgtggtgttaaattagaatcagaagtatcagtacaaaactcatgagtttttaataagcagacacataaatgtatattcattaatacacatacatatatttcccagctgtatctcctgaaaggcccaagaggcaatgacaccctattggcaattagtatacttaaatgaacaaatgttggtttctaaataccattttccaattaaaggaaccagggttccttgaagtggttgtttccagggctgggagaggaaaaatagatggtcctgtagtattttgtggtgccagtaagaaagtgttcaaaaaaatatgggaacttgttaaagaacctaggagttaactcaaaggagttcctaatgggcaaatgcagaagaatttgagcaacaaaacaatgatagtaagtaatgaattttaacccatataataaaatatccaggtgtccacagatataaataatcaaataaacttggagagagaggtatggaggcaaagcttgttattataaaagaatttcaagaaataaatgtgcaaaagagcaaaacagaaaatcacctttaggcaaacaccacagcggtaactgttacagacaagatccactaatgaatgcaaaacttagcataagttggaggagaaaagaattttcatgtctcatgtatctctcccaagatattaactacaaagggaaacagtaattttgcagtggagatacctggcagacaccaccttaaccaagtgattaagactgatacaccaaaataaggaacttgaaatgacacactagaatgcacctcttgatatgatgcattttctgtggtattctcttcaaaattgcaaaacctcaaggcatctgagtacatcaaataaatccaaactgaggaacatcctcaaaatatcccaccagtactcttcaaaagtatcagttatgaaagacaaactgaggaactgtctgagattggaggaaagactaaggagcagtaagtaacaaataaatgcaagatagggtcatagacaagatgtgaggaacagaagaacactagttctttttctaatggaaaatttggtggaaaagttggtgaaattcaagtaagatctgtaatttaggtctaacgctattgcaccaacataaatttcctgatttggataattatattacggttctatattacaatattgagggaggctgaatgaaatgagggtatatgggaactcttggtactatttagtgcaattttctgaaagactaaagttattatatttcaaaatagaaagtttaaaagagaatctcttggtctgctgttctgttttataatggtttaaaacagaacaggtaagacagcttcattttgtcccaaactttaatataaaaaagctataattttaaattacaatttaatactctgttataagactgaagctatgaaatggggcaacactatttcatggtctccagagcagaacacgcaaaaatgtgttatcaaacactttatctgcttctactaccatcttgttctatgagggaaaacctatctgaaagatgtaacatagacaggctcaaaatcaagtctgtgaacatgaaaaattatttaatgacacgcatcttgaaattacaaatctgttaagaacaccacaatagtcctacagtaaagtttgtttctgagaaaaaaatctagcacagaaagcctcatgtgaatagcaattcctaacgggagcatctttgtgtgtgtaatttctgctttggttttggtgagggttggggcatggactgaaagatttacctacaaaatatatgcatagttgatctaaatttactaaagaacaaatctacatttttaggtgatctttcaaaatcagtcctcggtttgaattatccattaactagtggggatgcaagctcgcccccttgtcattaaaatacatattcataaaactttaaagttgcactgctctagttacgaatagcttctacttttctaggacataatttcactttgtttaagaagaattcattaaagaagctataaataacctttaaatatttagccatgaatagagagggtggactggcattgatggcttattttagtactaatgcagaatgctttttaaaagctacattttagcatgcatcaagctaatgattaacttgtaatgttattttcaatgttagaataaatttattttgaggaattgtggtaaaagtaaatgtgttatttcagttagtaggaaagtagccttaaagaatgaaaatgttgggaagatgaaactgtaaggaatttttatttaaaatgtttaagcatctagacctttccttgtttcccaaaacataatcccagtgaaactgcaaaaactaagggagaagtatctgaggaactgaaagaattccagatctgttgtgtgatacatgtagcatacatatgaatcaaggacatatctgtactcaattttgaatcataaagttcacaacatttttgagaccaagtttcataaagtttttacttggaaaaaaaagttttacaaaatatctttccaaagaaattttcccatagagtacaattaattcatgtagctttcttccttaaagattacagtatgacattcagaggggcgaggtttcttgaatagccaactagccgcaaaacctacaagagaagtagatttttttaaagtgcctttaaaatgtgaaagcaagtaatgtaattgttgaatctatttgaaattttaaaattttctttaaaatggtccatatggtatgcacaatatcacagctggcacaaaactgcctgtatttagtttgaaacacaaaaacaatgcatatgaacagtattctttgaaaagtaattcaaaatgctgccactgcatcataaaggcaaacttagataagagtgttgacagtattcagagaattcacaaaacaagctgatattaaagtattcagacagttaccttgatttttttcaaataccackggtaagggtaaaagaacttgttgccaaagtaactcaggataccttatttcaaactacatgtaacctattttgctatagatactctaaacaaatgaacaactaggttttaggatgtaaattcccatttcctagacagggcctagtctttctgttgcaatctggcagctttaaactttgaaaccctctttccagtttcttcagatgcttccaacagaacttcctttcgttctggaatagtgggtagtgcgggatgagcaatggctgggggtggtgttaaggaaggtgatacaaattctttttctataacagttccagaaaaagcctagaaaacaaaagtcaggttatggtaataaaatgcaaataagacacccacaaaatcttcccattcactcatttggcaattcttttcattaaaagtaaattcacgagatttttggctagacaacactactacaccaaaatactaattgttcagagaaaccaacaccattaagttttaatttcaccaccaaacagaagtaatttttacagtatacatgcaagaaaacaaaatgtaaaatgtaaattttatctgggaaaaaaaagaaatggataaataaaaggtcttcaaactttcatacattccattcatgtccagcccatgctgtgaaaaataatgtattaaaataaaaatgctattagggtgtcaaactctgacttttgtacatcagttgatgaatgagctatcctatgatggccttgctgcctgctagccaatagcttagtttcaccagtactgacatttctaactgatatctctttggtggtgtttatgcaattatttaaatrttttactgcatattgcctcaattttaaaagatcagtggaagttgaaaaataaaagtgctgatactagtaggaataagtacaggtttcaaaattttaatataattaactcaatgacagaaatcagaagttccacaaaaaaagaaatgactcaatttcacctggatgtttgctgcatttaatctggtcaactatatgttcaactggaacagaattaaagaatgtgcataaattgctggaaatatctgtacatgtcgttttatacaaaaataggtaagacacaaggagttaattttttttttttttttaagattgctggtatttagaacctccatccttccctctacaaatgaaaatttgacaggtgaactttaatgtacattttgttctcctctgtctaccaagtgctcaaaattagttaaaacaacgtaacacctaaataatttaaaaagccaccttcttctaccttgccccrccactgaaacaaaaacaaagaaagccatctctctcctacattatttttggagttcaactggtaaaagcagcttaaagcttactttcctaaaaactccactttatcacgatgagcatagagccttcttctccttcttctatttaaaatgcctttgaaaaagaggtattttagcatttaaaaagatactgaaaaggatatcttccaaagtacttaccayaatcatgaactatttctttgatgttaaaaaatgtatagcaactactattaaacatttccatacaaaatgcaaagctactaagggtgaaataaaaaataggttccacactctagctgtaccatgatacactaagtccttacaaaaaactaattttcaaacatttatcagcaattacctgataacatccattacctgttttctaacagtatggaagactatcaaataaggtaagatactttccaggtcacctaagatcattatactaagaagaggggaagaaaacattctagtcatatgtactgtccctaaatgctaccaatctccatccccaattaccatttaatacactgagtataataccatttagtaaaagcaatggaatttttagataaggttatatatatgcatgtatcttattgtatatacaaatgtgtacactggtttgatccaggcatgggttccccaatcttcctaaatactttttaaattgaaaacttcaaatacgcaccaaaacacaagaatgaagaaatcaatagccttatatttcacagacatccttatttggggatttcctaacctcccctgcaccaccaccaaaaactgtaagaagtgtggtgggtgaaagtgtattgagtgtgcactattttttctatggacagggtctacagctttcatcagattataaaacaattccataatcccccaagagttaagtttcactggtacaaggtaaaatattagactttaggtaattatctgctatgcatgcattatttttctttaacttagccaaggtatttaaaagagaataatgtaatctgctccttacactatcagaaaatgacctactggtaatttatttaaaataaactgcgaaataatttcctagctacaaatgtaatacataatgccaagtaagacattttaaatttcccattttgctgaaatagaacgttaagacaagtaatgtgtttatcaaaaaataaactatttgattatcacaatatttgtactgtttgtgactattaattttttattaattagtaccaagaaagtataaaacctagaattaatttaatcttatgacttttcagattaaatagctaaaactggtcaaagatactatatgaaataaagaattaaaagatacacacacacacctcaggtgttactgataagggcaaaagtttcttttgattttcttgtggttcctcttccaaaatgctctcactggtgtcactgcaagtggcttcttcgcagctgatactcctcaaaactccccgccyatcatcaaattcagcagcactgctttcactagtgtcgctacacacactattctctctacttcgagacttcargatggatttgcgagggacatattctccattcacaacatcaacaaaggctctgtgatattcaaaacacatatgcattcactatacgtaactcataaaactgagaacaactttttgaaaatttccttgaatctattctagaaattaatctgaaaatttttattacaatcttatatctaaaatagtcacaatcacaataattttatagcctcaaatggtatcttcatactattttgaaagctatttctctggcctaataataaaacacagcatgttatttatttattttattatactttaagttctagggtacatgtgcacaacgtgcaggtttgttacatatgtatacatgtgccatgttggtgtgctgcacccattaactcatcatttacattaggtgtatctcctaatgctatccttcccccctccccccaccccatgacagaccccggtgtgtggtgttccccaccctgtgtccaagtgttctcattgttcaattcccacctatgagtgagaacaaaaacacagcatgttatttttaagcatgtcctaggtggcaatagcatggtttgccaaaattctacataaagttttagacccacgtatacatttagcaattttcactgatttataaataagggtcataaaaacagtaggtattttcaagtgatagttttctcaacaaacaattccaaaaaaaaggaaaaaaaaaaaaaacctgcaacagtataatttctactctgaaaaggtaaactgcatgccaagcatgttacggctgtggtagaaacgtagggacctagcccactggaaacaaaaatgctttctgaagatacaagattttctgactagaccatttggaaatgtttcaaaagcactggtgaagaggagaaagtgaaaaaaaaaaaaaatcctccattcccactgctctggactgggaagctacagccggtcagcctatcagatcctaagttaactcctcagaacacttcacttttcagtgagggtcttctgtgttacagtcaactttctccagtaaaggttcagtggcagaaagagaggcaagcccagcagactgccctgcagctgtgagcgcctcccacctgtaaatgtctgcaggcgtcctgatggtcggcagctcctgggcagagtggccactgccagtgctgttctttcgtttacgtttggcttcttctttcttttcactgaattttaaagtggtattctttccagtatttattcggacctaaaatttcagagcaagaaattaagaatcttttgacaaattaaatcaaagtgaaaccaaaacaaataaastctataactaaaaaaataatagtaagagaggcagctgaaattttctgatgctgaaatgatgtgcattatcagatggaattttttaaaaagtccttatctcatagatctatgacatctaaagaaaatcttctttattaacaaatcctagtcttcagtgtctttattattgtagagaaagcaaaatacatttgaactaaatgctagatttcttataaacttcccatcaccccattcctttgatataagtgtttggcttgaattatgtatttcaaaagaaagagtataaacaaaaattcagtaagaatacaacctttaagtcataaaagtactattaaataatgcctatttagaatttttaaaacatctctaatttttagaaattgaaggagtaaaaaaataaaaaccaagccygttcagggttcacatggggttaacatgttatttttctatccctagtcagcacttagagcatactttccacaataatgaccactattacctgtaacgttcctgcaaataatatttgttctttctgttttatctaaatgaaaacaggaaaaaagtaaaagcctggcaaaagattaaaaagcgacctttttttctggctaatcatctcagtcaacttttcccgaagaatcaggggaagaccccttcagtctgacatattagaatataaaaacacaaacaattatttcacttcatataggagcaggaataactttaggaagctaagaaatatcaaatatgttttaaacatatttcactaaataataatcacacacacttaagaatgataccacagacccttaactgatacaggcaatcgggatattgtgtagaaagggcactcagaggcgaaagagttcctgttttgttaccaaccagatctatgtcttctaggccttaaatttccctgagaaagacgaattagacgaattcccagtgtccccttagagcagtacatggagcagagagagggcaaagatggacttaaggcagcctatccttccttcaatcagagccaagctgctttgatctattttaaatactgggattctacagtaagtatggagggaacaaaaggcttttcatactagagaaaagctttaaaactctgtattagaaaatctccagtcacccccagctctaaaatgccaaaattctaagtcatgattatccacagatgtttatatttactttgtcagaaaagaaactaatttttacttcctcctacattttccctttgtgcctatgaagtattcattttatgtccatagaaaacaacctggcataattaaaaatttaactaatgcagtcactttcaacatcctaagcacaccaaaatgtccacaatataattaactccaggattcttaagaaaactctctgaatgaaggacaggtgaagttacagtagttgccactcaaatctgatccccttccagaccccaaacaatgcattgtttcagagaacaatggaccaataccagctaactaaattttttttccctttttcttcttaaattggtcagaacaagaggcaaaagatgattttcctgtctggcactatccacaatgataatgattgttaatattgctcttctaaaaaatatcataatgcttaatgttcaaattatatgcaaaattagtaaagttaaaagtatacaaaccctcttaggctcaacagtatgtgaaaaatatattgttggtatagaattatctccaacccctaaagcctcatggtcgttatcaccatcatcgtcgtcaatgttgtcgtcgtcgtcgtcrtcatcatcatcatcatcatcatcactgtggtaagaactggaaccattcactgaacagttcaactgactattcacttgaccactgaatggttctgaacttgcaacatccttatgacaaggagtatgagagtctgttacttgatgcatcgcattcacatttgtgttacgatcttccttttcctcttcagaagatgtcgtatcttctccatttgcaatcacagtatcaggcttactagcaaggaagaaaattaacaagatcaaacaaacatactagaattttacattatttaaatttccagttagtttccatgggtaaatactaagatcttgaataaagtatttttaaaactagaattctaagttcaaaaacaaaaaaatgttttgaaataaattaacaaaaaacagttcctatgctgcttctatatattgaggttattcagacataagtagaatatagaagataatttttttatctttgcaagaaagatattggccatatgcaatataaatatagtatcaataataataaagttgtaagaaattcagagaacatttatctctaaagaccagaaattgaaaccacataatacacacttattttctactcctatactcagaatattttacaatgagcatgtattattgtaatttttaaaaataaaggatttatacatatgcacacgaatatatctatatgcatgagtgaacatttatcatacttgattctataaaagatgtgaggaccttacaaaaataacaaaattgaaaatgcaacagaactgaaataacatcatacaaaaaatagaaagagaatcatgaccaagaaaaatcacaagatccaaaactggttttaaaaaatgaatagtattagttaatcaaaaagacctaagaatttataggtgaaacactaggaaaaagaaacttttatgcttcctgccctatttttcacagaaactaattattgcatatggtacatcatttaagcaaaataatatagaacttctcgagtagcagatttcatttagcattttaacaattctaagtgtgtgctaatgtgtatttcaaacagcaatttcgtaaagtttctcatacatatagctatctgaccagattacaaattacctgctccaaagtttataaaaggaaagcaagaataaacattttactgtatcaaatttaaattcaaagtgtatttttgtttttcacaacacattcaaagatagagcactatcytgggtgtggcataaaaatacttcatttaaaatttaacattatatatattaaatccatgattattaaaagtcaactatctggtataattaattatataaaataggccataataaaaaatgaagatgttgatcttaagtatttaagtacatgtacatgcatgggaatatgcacaaacacacaatcctataagaaaatattccagagaattaatgttcatcttgaggtgaaaggattattgataatatattatgcttccctgcattttcttcaatgaacacatattattttattaatgaagaaaaagattaatgaggaaatgtgtatagaaacaaattatcttggaaagataatttgtcatcaagtacctatcaagttcacccagcaattcttcctgtctctctagttcttcaagtcgagcccacagttctttatcagctagcaaatccttggatttcacaycatttgcaatatctgcttcaaaaatatctgaagtttttggtttggaatgcggtttatgagcaattcggtgttttgctatttagaaaaaggaaaagacgtggctgttaatagccaacataaaaaaggcacaaacccagacttaatgagactttcttttggggcaagggaaatattgaaacagaggggtcacaatttttaagccaaacagaactccaaggatgaatgtctcttacagccttgctactcaaagtgtggtccatggatcaacagcactggcgtccttggggaacacttcagaagtgtaagctctaaggacaccctagacccactgaatcagaatctgtatttcaacaagagccccagagaacctgcatacacattcaaggttgtgagaagagcttcaaaaatgcataagaaatggccacaatgcaccctggttataaggcgaaatgcaacacataaatgataaatttccatttaccatccttactcaaggaaatctagttactacagtaacrtgcaaaagccttgtgacaggatactttaaactccagggcactgccaargaatgagtaccctacaaggaaacaacggcggctcatctctgtaaagttctattatcattttacatatgaacatctctactttttaaactgcttcatttgtaatcttcatgtraggaaaaaagatgggtcaaatctgaactcagaggtatctgcttttcattttaaaaaatagattattttttaataaagcaaattaaggctttatttgctttattaaagcaaagtaatgggaaagtaatgggaagaagtctaagatgcgtcctgttatgagatatggcactaccagatgacctcgagtccatcatatattcaaatttgctgcattgttgcatacatctgaaaatatcaaattatgtttcacagccttattctctgtaactattattgataagacagtagttaacaatttttatttcagacctgtagcgctcataatttgtcactggtcaccacaaacaaaaatcttgtctttctgttcaactttaatatacatatcctttatttcaccttctaaagccacttcctgttacttgtgatgtggcttctttcaaccagtaagttatcttaagagttcatcaccaaaatatgagtgctgaaagtcaaaacgaatgctcagtacatttgtttaagacactgtacagtcttctacagtagcaaataataagccatctgtaatactttttacaatttcactaccgttaacactttacaactgacgaaggaaccattggctttacagaagtaaacccaaacacataagccagccttggcaaaagaaatctactgggtggagatgggaacaacctgcgcagggaaagccactgcaggcaccataagaggaatggctgaaatacacccacattcattcattcttccaaaaacagcttacaaagctgcagttttaaaagaagaaaaactagcaaaagatatcttaggacttcaccatggtcagagaacaaattaggagcagatccatgtctagaatatacatcttctgagttttagaggtttggagcactggagaactttgggagaaaaaagccatgtaatcccaccactaaaacagaccagtcaggaatcacatttttaaccaaaagttatttatccattaatgtttcacataaaaaaaaatcaatgagtagaaaaatgttggcatcctatgaatttaaaagtgtattctaaatcccaaatatctcacagaaagcccactgaaaatcaacaaaaatcaaaatatctaaacagctacacataaaacaatcttactgcttacctttaaattcgaagtcacatttaatttcttctcgtatgtcaacaatatcacctgcagcctggtttttaaacaaaaaaaaagcgtattaacaacacaaatctccagcatactaaaattatccaaagagcaactattcaacctaagatgtctgaaagcattttaaacttcarttaatttgttccttggctgtaagatagcttcatatttctttgaaaatattttctaaaaatatagaagactaaaaacaaatactcacatcgctcattttctgcaaatcttctgtgaattcaactctggattcaaaatttttcatcactttttttaagtcatctattgtttttcttacatctgaaacaatgaacacaaccattatgtaaagcatggcatatatacgacctgtaggaatattttaactgtagtcytatcacactacaagtatgatttaacagtaatgcttttcaaaaatcttacactattttccttttaaatggacttttaataagttatactgtgtatttttgtgctatatatatagcacattactttgttcgtaataaaatgtctaacatattttctctctattacagagtacagaactagattgtagatgctgcctggtgctaccaggtttctataggataaatatctagttggatcatcacataaaatgcagtatttcayaacagttttgttgcacaggtaatttttgtccagctggataatgcatagataacatagattaagacaagttattctgttcctgaacagaaaatattcctaaattagatgactgaaaatacaacacattttttacggtatataatcaaccatttccaagttaaactgcataacaacacaacacacagcctttcaacatctcctaaataccaccctctattaacctatttgaggaaaaattttaatttgagaatagacacaaacatttctctacccaatactggacaaatgcaacaagtaattcatgtttctgtaatcagagtagaaatctctgctaagcagtaaatggcaccatctaaaaaatacatggggtttctaactataattatatgctgaacaataycctacttttctccaaatacagaatttttatggccaagcgctgataaagaataatagacagtgatatgatacctcctcccccagatgctctgtgatttcctactgttttacaacaggcactcaatcagtaagcagatcagaagaggatggaggagaaaagtacatagttctttctctaccaatgatgaatgcaggtctggcaaaggtctaagcagttaaaatawcttttaaaagaatgaaaataaggaagggagttaaaagtgaaatatcaccacatatgaagggcttctcgagagtggcacatgttctccgatacggctctcatgctatgcaatgctattttaaataaaacacaatcacttatgctctagccatgaatgggttacaaaaaaaagactgcattaacaaaatgaaaattacggtgtaaacagttcataaaatctcacagccctgatgtcgctctagatcattaaatttctgcaacaattagaccttttctcacggcagcaaattggaccggttgccatggcaaatctgagcccttaagtcatatatctttgattgcagaaaggtcagactcagacagcctaataactcaaggagctgtttgacagatttcatccgagcatggtcacataacagcataaaactatgtcggcagttgttaaaagcagggggtcagggaaaaggttaaggttatggaatgtttttgcttcagtaaactcagtcagataatgtgtctaaccagctttagatctaaagaacattattttaggtaggaggtcaaatcaataacttttttcaagaagactggaaaatattaaaaatggcaggtaggtaagctaagtacatttttaaaagtctatccacatataaatactgtgcaactaagctaaaggtatcagtgaaagccttgggttgtcaatgtgtaaagaattgattgttcactgatgttataggagttactttcaatcaactattgttgactttaaaaaaaattcatcataactcacgcatgtaagaaaaagttgtgtgaatattccatttaagaaacaaagtgttttggaaatagggtaattatgaaaaactgaaatacgattgcacagttccatttttaaattcaagaaagctttctgaatcatacattaatataaaccactatcacaaggttaagaaatcagatctcaaaagcatatactttatatcagaatctcagaaataccacaaactgataagcaccaacaccgtcacatacacattatatatgcagatatatatctctattaaattatcataagtcctatgtcctagagcaacaaaaaattagatagctatacaraaaatttaagacaagacaaaagaaagctgggcaaccgcaaggcaaacgaacctggtgctcacaataacataaaatacagcagaatggtaagcacctatttcgattttgtacaaagtaaataacaagtctaaattcgtatctacaggttgtttcaaaagaacaacagttaaaaaagcagaatgagaatttaattccatttctttctataactctgagatttaacattagaaaccatgctattacatttttcactaaagcttttgtactctattctccaaaaatttattttaagaggtgaaatatacatgtcactaaaaatggatcatttaaacagactcaatcaattttaacgctccaaacatggctaagttgaaatctaattaagcaaaatttcaaaccacactgaaattatarcaaataacactactgagagaaaaagaaatatactttgtgatatagacaatatctgtattcattttaatctcaaacattttagttaccaattattatagaaaaaagaaaacaaattcaatgggatcaaagaaatagctgtgaaaatgtacaaaagacagttctccacagatacttccccccaccccaaaaaataaaaactaaaattgaagaaaaaaattagtaatttgaaggacagaagattgttttcaaacacaggttattttaactaaaaatcagaagttaaattttctaggatttcagaagtatagaatgaggtatagtttttatttatttagctgacaaaaccaggctgcaggttaaatgtgcagcaagcataagctaatattttaaagtcttcactaattcagaatctttgtccagaactggctgaaatcctttgagttagctatgaaaaaggagacttaaagcaaattaacagtgcaaattccaaagacatgtttaaaccaaaaaagaaaatttaaaacctcataagaacttaagcagtcattttcacctaaagataaacgatatgcctactcactaagtaagaccaaatatttagaaacatttagttaacagtttgtagaattgtatatatttgaaaggaacagaaatgcagatgtaataaaaattatttgcaaaacactaataaaagttatgaacatcattcgtgaaaggagtcttttttacttagccatatattcatatgtactgaatagtatgaagcctgtaaatatgcaattctctactgaatcctttgtgaccactctattctcaacctcgtttcttttgtgtgctggaatttttaaatattctttcgacagcttcaacaggacgtgccccctggtggaaatactcacaaacctctggacaggatgtactccttcttaaaccagtacaaaggtttggacttctgctttaaaatagcacattgaatacatgtacttagtatttgcctttcccctataccttaggtaaagtaacaactaagaaatttttaaaggcataaacccataaagacaaatacatttgaagagaaaatagacaagaaatgtcaaccaaattttggaaactgcacaactgataatggactttgcacaacagaaaaaaatggaacctaactgtggctgggaaaagctactacaagtcgatctgggatatcggacctggaaaaggcaattcacttgagagtatttccaaaagaagagtgaactttaaccaaagatctagataaaagtttgaaaagaacaggtccccaaaccctaatctcacaagaaaggtttctcctttcttgcttaaacaaaagattcacagcttagagtggtttgtagagatggtagggaatagggaagtggaaagagaayagaaaatgtcttagtgaaaccaggaggattaattccaagtgaacatactgaaccttgaaacgcccagcctggttctcagaacactagatgaagaagatcagaagactcttttgtagaatctgctgatacttaaagattgctcaawttaaaaaaaataaataaatcagcttgctaccttaaatccctacaaaaaatacctatcagtcaacaaaccttgcctatgcacacagagcttcctgacagtactcaacgcaagtataaatggttagccaaggatcaccagacatttgaagaaattcttgaacattaatgctagagaccaaaaaaagagagcaagagagaaaagagggagaagaaaaaagaaacatggaggaaatgtttaaagatgaaaactttaaaagaaaaaacaaatactccttaaaaaaagaccctccatccatgaaacaagaacaggatgctgtaacaaagaaacagccaaagaacaaaaaaaaagtgcttccagaaatgaaactatgtacaggaaaattttaaagtcaatacatgatttaaaagagtatgcagaagaaatcacttcaaaaattacaacaaggacaaacaaataggcaacaagaaaaggaaattttcaaattactaatataaatttcccacggctggaggacttaagcctccactcaaaaaaggcctactaagcactagcaaacaaattttaaaggatccatagcacggcttcaaggtgtaccactgttgtattccagatcatggggaataaggaccaaaaaggaatctcaaagctttaaaaacaaaaaaacaagttatatacaaagaaaacgaaaatagcatcaagattttcaatagcaacacttaaagacaggaggtaacagaataatgtatccaaaattctgagggcaacagttacttaagacctagaattctaaacagtctacttaacaataagaagcaggagtataaggaatataagagttattcagatacataaaaattcaaagaagtacctccgagcaggttcccaaaagttacttaaagcaatattccaacaaactaaatagaacctgaaaaaagggtgctttgggaaacagaaaacaggaaataaataaaaggcaaaaacagggtaagaagacaccaggaagacggctctcctttgatcaggagagaagccagtccaaattgaagcaagacaatgaaagactccagcagtaaaatttttaacaacaaaaaaagtatctgactgaattaatgacagacacatagaaaactatgcaacaaaaaaagcagttaaattcaactaaaagcctgtacaagaacaaaatggaattayataatatctaagcatgaatactgattcaacaaaaattgtgatacaacaatagcaaaaagattagagaagcagagacagggaggacatgtaaaaatgctacatggtcctcttaaattatagacaggtagttaataatacataaaattaaaaaaaaaaagaagtaaacaaaaacaggatatgccaaccactggaaaatatgaataaaaagagcagagtaaaaatagccaaaaacagaaagtaattacatctgaggaatgggaactgtgagccaaaagggataagtgaatgctgctcttttttttaaataacrtcttaagatggtttgtggttatttaaagctatatacatctatcataaactaaaatcataaatttgtattttgaaatgccttattggagatactcaagagcatacacattgcttgataaggtacgaatctacaaatccaagaagctcaacgaaatccaagtaggataaacccagacccacaccaagacacactataatcaaactgttgaacaacaacaaagagagaatcttgaaagcatcaagagaaaaacmactcatcacaaacaagaaatcttcaacaagattatcagatttctcagcagaaaccctgaagcacagaaggttatgggatgacatatatttaaaaagtgctgagagagaaacaaaatacttcatccaagaattctatgtttagcaaaacaacagtcttttaaaaatkaggggaaatttaagatattcccagataaacaagagttgagggcattcctcaccactagacctgcaatccaagaaatgctaaaggaagttcttcgggtagaaatgaaaagacagtaactcaaagctatatgaaaacacagatctctgataaaggtaaacacataggcaaaaataagtattactgtcattttggtttgtaactccacttttttcttttctatgtgataaagaaaaatgaatacacatcactggacatctatattaatggagacacaatatataaagatataatttgtgacacaaataatataaagaggtgaaggagctgaacaggaataaagcctctgtatgtgattgaagttaagttggtataaattcaaaatacattttataaccttaggatgttctatgtaatcgccatggtaaccacaaagaaaatacctatattttaaaaagaagtgaaaaggagatcaaaaccattcaccataaaaaaaaatcaaacacaaaggaaggcagtaatatagaaatgagtcaaaaaaaagctataaaacatgcagaaaataacaaaacagcgaaagtctttcccccatcagtaattactatacatgtaaacagattaaacttcccaatcaaaaagcataaattggcagaatcaattgttttaaaaaaaggatccaactatatactgtctataagagactcacttgtagatctaagggcacaaataggttgaaagtgaaggaatgaaaaagatattccataccaatagtaaccaaaaaagaaatgaagtagctatagtagtatcagacaaaatagactttaaattaaaaaagtcacaagagacaaaggatatttcacactgataaaaggttcaatctatcaagatacaacaattataaatacatacatacctaacagagctcaaatgtacaaagcaaaaatgtacagaacagaagggagaaattatttcaccataatagctggaggagacatgaatatccccttttcaataaaggacagaacagccagaaggaaataaagaacatgaacaccactaaagaccaattagacctaatagacatatatagaaacctccacccaacaacaggaaaaatacacaccttctaagggaaacatggaacagtcaccaggataggtcatatgagrggccacaaaataagtctcgaaaaatttaacaagattgaaatcatataaagtatcttttctaactggaatgctcaataacattaaaaatcattaatagaaggaaaattggaaaaagtcataaatatatgaaaattttacaaaataatctgtcaatgggtcaaagaagaaatcataggcataattaaaaaatatggctgggcacagtggctcccagcactttaggaggccgaggcaggcagattgcttgaggccaggaattcaagactagcctggacaacatggtgaaaccccgactctactaaaaatacaaaaattagccaggcatggtagccctcacctgtagtcccaactactagggaggctgaggcagaagaatcccttcaacgcgggagatggaagttacagtgagccgatattgcaccactgcactccagccagggcaacagagtgagtgagactctgtctcaaaagaaaagagaaaataccctgagaccaacaaaaatgaaaactcaacgaaaatttatgggatgcagcaaagcaatgctaagaaagatatttatagctgtaaatacctacatcaaaaaaaaagaaatacttcaaatcagtaacttcactgtacactttaagaaactggaaaaaaaagaaagagtaaactgaacccaaagctaacagaagaaaggaataacaaagattagagaatgataaacaaaacagaatttttataaaatgctgaaaaattaatgcaaccaaaagttggttttttacaagatcaacaaaattgacaaatctttattagactgtctaagaaaaaaagagaagattcaaatcactaaaatcacaaacaaaagtggaacaataaaaactattacagaaattaatgggattatacagaaatagtacaaacaactgactgccaacaagtttgataatttagataaaatagacaaattcctagaaaaacacaaactaccaaaactgaaatctgaatagacttgtaacaagtagcatattgaatcagtaatcaaaaacctcccaacaaagaaaggaccaagaagagatgctttcacagatgaattctaccaaacattcaaagaattaacaccaatcctctcaaactcttctaaacaatgaaaagggagggaacacattctgtgagccagccagataaaaatatgaaaactacaggctaatttctcttatgaatatacatataaaaatcctcaacaaaatgctggcaaactaaatacggtagcacattaaaagaatgatacatcatgaccaagaatgatctctgccacaccctggaatgcaaggatgggttcaacatataaaaatcaatgtaatatactacattagcagaatgaagaggaaaaaacatggtaatctcgattgaatccaaaaaagcctttgacaaaatccaacaacctttcatgattaaaaaaaaaaactcaataaattagaaacagaagggaacttccataacataataaaggccatatatgaaaaccccacactgacatcacactctatgatgaaagactgcgagtctctcccctaagattgggaataagacaaggatgctcactatgaacatgtctattcaacaacatactagaagttctagctagagcaattaagcaagaaaaacaaataaaaagcctccaaattggaaagaagtcaagttctctctactaccaacatatgatacaatcttatatgtaatatgyagaaaaccctaaagaatacacacacacacacacacacaaaacaccctygtaaagctaataaaaaaaattcagcaaagttgcaggatgcaaaatcaacacmcaaaaatcaactgcatttctatgcactaacaatgagcaatctaaaaaggaaatttgtaagcaattcatttaaactagaaccaaaaggactaaactcttaagaaggtgcaagacttgcacactaaaaactataaagtgttgctaaaacaaataagacacaaataaatagatatcctatgttcacggagtgaatatatttaataattaggatgtcaatactacccatggcaaccaacagactcagtgcaactcccagtaaaatccagtaattttttttttgcaaaaacagaaaagcccattctaaaattcacatggagtctcaagggttccccaataaccaaaacaatatttaaaaagaaaaactaagttgtaagtctcatctttctgttttcaaaacttactataaagctaccctcatcaaaataatgtggtaccaacataaatacagacttacggaccaaaaaatagaatacaaagctcagacataagacctcataaatgtatgaccaaatgatttttgacaagagtgtaaaaaccattcaaaaaggtaaggacagtgttttcagcaaatcgtgttgagaaaactggaaccacatgcaaaagaataaagttggacccttaccttacaagcatatataaaatggatacagcaacctaaatgaaagctaaatctaggaaactcaaaaaaaaaaacacagggaagctgcttcatgacatttggcaacaatttcttagatatgacatgaaaagcataggcaaaaacaaaaaaacactaactggacagtgaaaattaaaaatttttgtgcatcaaacaacattatcaagaaagtaaaagggcactctacctggcagctatttttttttttaagtaagacaaaataaaagaagaaagtaaaagggcaaccaacagaccaggagaaaatatttgcaaattacacttctgataagggactaatatccagaatatataaagaactacaactgaacaagaaaaacaaacaacccaaataaaaaatgggcaaaagacttgaatagacatttctccaaagatgatatacatgtggccaataaacacatgaaaagatgctcaacataattaatcactgaagaaatacaaatcaaaaccctgctgatacwtcacttcaaatccacttcaaactatattccttgatgatatgccacttcaaaatatatttattttatatataaaaaatatagtaacaagtgttgacaagaatgtgggaaaactggattccttgtattttggtgttgagaatataaaatggtacagctgctgtgaaagacagaatggaggttccttaaaaaatacaacatagggccgggcgtggtggctcacacctgtaatcccagcactttgggagactgaggcagatgcatcacctgaggtcaggagttcaagatcagcctggccaacatggtgaaaccctgtctctactaaaaatacaaaaaattagtcgggcatggtggtgcacacctgtagtcccagctactcaggaggctgaggcaggaaggctcttgaacctgggaggcggaggctgcagtgagccaagattgcaccactgcactcccagcctgggcaacagagtgagaccctgcctcaaaaaaaaaaaaaaaaatccacagaatttccatatgatccagcaattccactttcagatatacaccccaaataatttaaagcagggaactaaataaatatttgtatacctatattcatagcagcactattcacaatagcgaacagaataattcacattattcacaaaataaaatattgttcatccttaaaaaaaaggaaattctgacacgtgctacaacacagatgaacctagaaaacattatgctatgtgaaataatccagacacaaaaggacaaatgctgtaggattccacttatgtaaggtatctagaatagccaaattcatatggaaagtagaatagtggttaccaggggatggggggaggaaggaaaaaatggggagttatcacctaactggtacagttttaatytgagaagatgaaaaatatctggagatggatggtggttatagctgaccaaccatgtgaatgargggaagggaagggaggggaggggaggaaaaggaggaaaagacagtaagttagctagttagcagtgccagggggcctacaataaggtatcagtttcaaaacaagtttgcaaacacattgggttggcaaaggtgtagtcagtctgttaaagccagcactgtcaaagttaaaaatctacttcacttcatgccagcaattgtatcttaagtcatttatactacagatacacacaagtacaaatgatmcacacacacacacacacacatacacacagaggttattcactgcagcattgattttaacagcaaaaaaaaaggaagacgatctaaaggcctatcagtaaaggactggctaaatagagtacaatataatactatatagccatgaaaagaataagacagcaagctgccaaaacaaaaaaataaaagtgtgcctacaatttgagtggaggtgtatagggtggggtaggaatgcataagtctatggctgtaaatgcacagaatatccctggaataatgagtaagatactgataacagcgatgcctccagggaggtaaactggatgttaaagaacaagaaaaggaagcatagttgttttttaataaatatcctttagattttgtatcatgtccatatataacctactaaaaaaataatttttaaaaaagcccatcttgtgaatgacctgatgcacctcatacaatctttcttctcctatcacttaaaaaaaaaagctgtattcggtgctaacgtcttatcacccactttcttctgaaatctgcctaaaaatgtattcctaaatcaagattttctttagaatgctctgtaagataacagacattacattttaaaagtttctcaaaatcaagtaagtttgggaaccacaacattaaacaagactaaagggatatttttcattacagggcttctaagtaacgtgcctatgtgcattttactctctggtagagggaaagyagtgtgcagtgatctacaaacttacttgattatgtcaacaacattgcctctaggtcaccactcatccaatgcttcccctcaaccttcacattcaatcagttgccaagtcctatcaggctcagaaattcttcctgcttctgatctcttctctaagcctatagccattacccctagttcatgctcttatcccttcatgtccactcttccatttaataaaaataactttattgtaaaaatgaagactaagtatgcatttttaagacaaaagtaaaaataagataaaataaatgtgtcagatacaattctgaacaaaagacacacggtaaaataattctccccatattatctttgaaaggaaaatctattaagatcatcctataagtaaaactgtttaacattaatcactggactaatgactagaaatgtggccaaatgcctgttgtcacagccaaaaattctaagacatggtgcctagatactagaatttcaagtcattctatataccggtgttcaaaagtagattacagagacatgcagaaacaaaattaccaaaaacttgtctatactgtagaaacctctgattaaatcctggtcttttcacttagtctcattgaagatgtactcctttctaagccaaaaattgctctctaacstaaaaaagaattcagcaaatctcaaagcaagtatttagagtaaaacttttaagttcacgtgaaatacattaatccctaatttgtaacattaaaaatactttaagaagttcctatttcagcaacaacagagtaataagatactaaaaatattaaataatctaaaagaggacaagaaagggtaacaagaggaacaaaaacgggggaatgccaaacctgaatccaaacatattacattaaatgtaaatggtctaagtacatcaattaaaagactgaaattatcagaatcaattaaaaaggaaagatccatgctgcctataagaaactcactttaggccaggcacagtggctcacgcctgtaaacctagcactttgggaggccaaggtaggcagatcacttgaggtcaagggttcgagatcagcctagccaacatggtgaaaccccatctctataaaaaatacaaagattagctgggcatggtggcactcgcctgtaatccccactactcgggaggctgaggcgggagaaccacttgaacttgggaggtggaggttgcagtgagtcaagatcaggccactgcactccagcctgggcaatagagcaagactctgtctcaaaagaacaaaaaaaagaaacccactttaaatatgatatagttagcataaaagtaaaagaaatggaaaaatatacgccatgcaaatattaaacaaaaaaagctcaatgtatcaaatccagtaatacatgaaagaatacaccatgatcaaatgcggttcatccagggaagaaaaatcaatcaatataatccaccacattaacagatacagaagaaaaactacaagatcatatcaatagatgcagaaaatacaytggacaaaattcaacatattttcatttaaaaaatccgcaaattagaaccaggtagaaagttccctaaacttatagggagtattaatttttttaaaaaacctacagctaacacacacttaacaataaaatgccaaatttttccccagaagatcagtttcaagacaaagacacctacctactcttaccactcctattcaatattatactgcaagtcctagccaaggaagtaaggcaagaaaaagaaatgaagtgtatacaccttggaaaggaataaaaaaaaataggagctatttacaaaaggcatgattgtctacatagaaaatcccatggaatctaccccaaaaaagttcagagaacaaatgtggtcagcatgaatggaggatacaatgttaattcttttttaaaaagagttatttctatatactagaacacttgaaaaacaagattttaaaatgccatcatttacaacagctccacaaaaggtgaaacacttagatataaacctaacaaaacgcatatgacctgtatgctcaaaaactacaaaactgattaaagaagtcctaaatacagagatacactgtatttacaggctgtaagtatttacacactggaagatttaatagttaagaggtcaattctccccaaattaatgtgttgatttagtgcgattccaatcaaaatcccactaggagtttttgtaaacataagcgagtggtttctaaaatgtatatggaaaggcaaaggaggtagaacagccaaaacaatttggaaagaataaacttagagcacccgtactaccaactttaaggaacactgtaaggaacactataatgctacagtaatcaaaacagagtggcatcagcaaagagacagacacatagataaagaaacagaacagatggtccaaaaacacaattacacaaaatggctcattcatttgttttttaacaatttaagttataattcacataacatacaattcacccatttaaaatgtacaatttgatggttttcgtatattcaaagggttgtgcaaccattaccaaaatctgtatttttgtattttcattgcccctaaaaatctccatactctttagcagtcactctccattctctctcacaccttcctggccctaagcagccactactctcctttcttttataaatttaccttttctgaatatttcatgtaaatggaatcatacaatatatggtcttttgtgactggtttctttaatttattctaatgttttcaaggtacacatctttttattgccaaacaacattccactgyatggatgtacgacacttattcacctgttattagttgatagacatttaggttgtttccatgtttcggctactataagcagtgctgctcttaatattcatgtacaagtatttgtggacatacatttttatttcccttgggtagaatactatctaggtgtggaactgctagatcacagtaaaacacaatgtttaacttgctgaaaaattccaaactgttctccaaagtggcttccccagtttacagtcccaccagcaatgaatgagggttccaattttttcacatcctcaccaacaagtgttactgtcttttttattataaccatcctagtgtggtatctaagatggtcttgttgccaattcattttgacaaaggtgcaaagtcatttcaatggagacagaacagtattttcaacatagtattggagcaactggacatccatatgcaagaaaaatgaaccgtgacctaaaccccacacctcaaacaaaaattaacttaaaatcaatcacagatctaattgtaaaatatcaaagtataaaactttcagaagaaaacacagaagaaaatcttcaacaactaaggttaggtaaagcgttcttagatatgacaccacacatatgatccattaaaaaaagctaaaagctgaacttcataattaaaaacttgctctggaaagacactgttaagagaatgaaaagacaagatgcaaagtgggagaaaatatttgcacatcacctatttaacataaatccagaatatattaaaaaaaaaaaactctcaaaacgacagtaagaaaatatacaatgcagcggggtgcggtggctcatacctgtaatctcagcactttgggaggccaaggtgggtggaccacaaggcggacagatcatgaggtcaggagttcaagaccagcctgaccaacatggtgaaaccctgtctctactaaaaatacaaaaattagccgggcgtggtggtacrcacctgtaatctcagctactcaggaggctgagcaggagaatcacttgaacccgggaggcggaggttgcgatgaactgacatcgcrccactgcactccagcctgggcgacagagtgagactccatctcaaaaaaaaagaaagaaaatatataacccaggccaggtgcratggcacacgcctgtaatcgcagcactttcagaggctgaggcgggtggatcacctgaggtcaggagttcaagaccagcctgaccaacatggtgaaaccccatctctactaaaagtacaaaaaaattagccgggcatggtggcgcatgtctgtaatcccagctactcaggaggctgaggcaggagaattgctcgaacctcggaggctaaggttgcagtgagccaagatcgccccactgcactccagcctaggcgacagagtgagactccatctcaaaaaataaaaaaaaaaaagcatatataacccaatattttaaaatgggcaaaagagttcaacaggtaaaagaggacacaaagataaaataagtgcatgaatcaatgctcaacatcattaggcaatgatgcaaactaaaatcactatacacctattcaaatggctacacttcttaaactgacaatattgagggctggtagagacgcaaagataccactatcacacactgctgaaagagatgtaaatcatacagccactttggaaaacrgcttggtagtctcttaaaaattgaacatacatttatcatatgatctaacaatctcacttgtaggtatttaccaacagcaataaaaatgtatgttcgcacaaaaacctgtacacaaaggcttacagcagctctgttcctaaccgccaaaaaatggaagcacccaaatgtccctcaaaaggtgaatggaaaaactgctgtacgtgcatttaatagatatgcatgtaacggaacactcctcagcaataaaagaaatgaactttgaatacacagaaccacctggatgaggcgttacagcaagtgaagaagctaatctcaaaagacacagacgtgaagtcgtcaatccttcagcagtaggcagccgtagggtgtgaccaccaaggggcagtgtgagggaggttttgataggagctgagtcctgagagcagtatcttgtatcctattccgtgtcctgactgtggtgctggctaaacaaatcatgacccgtgttgtaactcagaccttccccaattaccccaatcaaccatgacatagatgactatgtgtttaactggttatatttcctctgccttaagaaaaataaagtaccttttcttaataaatgtgaagtacaacaatatacctaagtattttcttcaggtataaattataaaaccatgtgaataaaagagctttacgtaattttttttttttttttgagacaaaatttcgctttgttgcccaggctggagtgcagtggcacaatctcagctcactgcaacctccacctcctgggttcaagtgattctcctgtctcagcctcccaagtagctgggactacaggcacacaccaccacgcccggctaatttttgtatttttagtagagacgaggttttaccacgttggtcgggctggtctcggactcctgacctcaggtgatccacctgccttgtcctcccaaagtgctgggattacaggcatgagcccctgcgcccggcccagaatttattgtaacaggaaataygtactttgaaaattattttagataaatattgatcccaaaagtcatctatgtttggtcactttccaaaaccatatttaactactagaaagtgatttacaaaaacatgtttctctactctagagctctattctattgtagtataagtattcccattaatattttaagttataactaattataaagatttttttcactgaaatatgaaaatcaatgtgaacaaacttcaacaggctatggattcatttcataacatcagagctacttcagtatataaagagaggcttcgtcttcagtaaggtctttaagaaaaaagtatgcccattctctttcgctaatrtacatgacaaaaataatgcagcaaagccaaaagatttatcattgccagaaattacatacaggcctaacaataagattctgattagtgtcacaaaagatcaaaatatatatcaattataaacttataggagttgatttgcaattagagtctccaaatatagttcccagaatttcactgagtaaatgagttctctagtactcattcatgtataagtgaaatcaagttcagctttagaaaactcagctgttttctgtttagtatgaccttatttataaaaaaggatcttcccatcatttattttcaaatacacatttaactaaaaggttaaaaagcaggtagggcggatattatactctcaatctaaatacgtattacagaaataacaacagattataaactgaacctaattttaaaatataactaagctagaacccaagctagctcatccaactgcaaaatgtgtagtgtgtgttgtgtgtgtgtatgtaggcttctatacacctacagataatagcacggataaacaaaactcaagagctgccctaataaagggatgcagagaactcaaacaactgaaaaaggataagggtgctgttttaggtagcaccttttcacacctggtctcctctatcaaatgaaaatatggttttttwtccaaaccaaaaagcatttttaagaattgtctacttatgtaaacaggtatttctcttagttcactaaggagaaaacacattatttctgtgtactaaagtattaagtgcaaaaataagtctataatagcaactaaaaaaaaattataaggtataaaatgactccaatttttatgtcttcccaacttctaactacaaaatcacataatgactttgaaactttgtaacttctgaaaacatgccaatgtaggtgacatttccaacccggatgctccattctccagctcattctcaaatgttggttctactcaaactacctacaattcaacagaatcacaaacagcctggattcatagatcacggaaggtacttttggtaagaaacagcccttcagcttggcaatctgtgaatggatacatatacaacaaagaaacatcatttaaaatgggtacctacgttctttccggtgctcaactaaacctacagcctgctttgctgagcactttgcaaaccagttgtcccccagtaaaacagtgacttcattagtatggacaagttttcctggcatgaaggcaaaagggccaaatggtacctattgtttaaaaaaaaagaaaaaagggaaaaaacataaaacactgaaaagtacattttataaaacacttcgcattaaaagccttacataactgaatttttttatttatacattgggaaaaataaaatgccrgcttcacagaaattcaacactatattaaaattttactaggaaaatctaaagaaaattgctttatgttcataaatcaatgttaaaacaggaaaataaatccacaccatatttacatatagctcttaaagaaagtagtactgtctcggcatgtttatacttttcattcacttgcaaatctaagtgaaagcaactagtagtgaaacattgtcaatgcaaaatacttttgataaagaaaactaaaaattattttcaataaagtagacacttttgcaaagcaggaattagtaaacaaatagctttaatggatctatctagctatatatacaaaatacttggactagtataaaagaacaaagtcttcataagaaagaacattcatgcaatgaaaggctctaatccagggctcatgaacagatcactatgtcgatgtgaagatcattaaaacaaaaattagcagcacgtttttatataaaaatcaatgtcctaaggtttaattctgtgaattacaaaacattatggcctattcctgctctggctaacaagaaacgacttagtrccatatttctgtcataattacattttttatatagtaagtttccatttgaaatatgtccaattttgtgctaatatttatgtcatttgtgtcaccatatatattctgaaaaaaaaaggtaaataccaacaattactacaattactgtgttcttataaagtaaaacaaaacaaatcttccttgctacatagttaccttggacacagtccatcagcctgacattctgtgaaccgacacatagttaatatgtttacaagaaacaactattactttaaaagaaacacaccaaacataccattatattataagacaatttatcaggcaaggtgctgagtctttctcgaagggcattatagtcattatctaccttcttcctgttgacagaaaacaccaaatacacacattattaacgatttttcttttttttttttttttttttttttttttttgagacagagtgtcgctccgtcgcccaggctaaagtgcagtggcgtgatctcggctcactgcaccctccacctcccgggttcaagcaattctcctgcctcagcctcctgagtagctgggattacaagtgtgcgccaccatgcaaggctagtttttgtattttcagtagagaggaggtttcaccatgttggtcaggctggtcttgaactcctgacctcatgatcctcccacttcagcctcctgaagtgctagagttacaggcgtgagccactgcacctggcctcactcaaaagctttattaaatctcttctttcagtcgkgtgtggtggctcacgcctgtaatcccagcaatttgggaggcccagtaggccaggtatcataaaacaagctaatcaaaaacataattttagcaaattcwagattaatgtggttttatttttagttttaaaatcctgtttttatacagtttagcaatggcattattctaccatamatttattgaagaattaagactcttcagggactctggcatttagaagcagaatactcaaattttgagaattactgttttttaagatacaagactatctggaccaaataaaatgtgaaaattaagggagacagtaaaagagggcctgatatttggagagaagaagggactcaagatgaaaaaagaagagatttatttattttaagacagagtctctctctgttgcccaggctggagtgcagtggcacaatctcagctcactgcaacctccacctcctgggttcaagtgattcccctgccttagcctcctgagtagctgagactacagacgcatgacaccacgcccagctaatttttgtatcttccatagagattaggtttcttcgccacgttggccaggctggtctcgaactcctggcttcaagcgatccccccaccgcagcctcccaaagtgctgggattacaggcatgagccaccacacccggccgaaagaagagatttaataaagcttttgagtgaatagatactggctgtgaagttgaaatcatgaacatgaaatttgatcagatgctttagtcctcatcagaaaaccttaggctgaaaaatgcatcatcagctcttcaattattcataataatgtgattaaggtaagagagaatcaactgggggtagaakaaattaagtagagataatacaaaaggcgtttcaatttggcctaggagtctgtttcttgttacatcaaacagagctaccaaataagtaatttcaaacaaccaaaaggtatatgtaactctgtaggggcagagatgatcgtatttccatgctatgggccttactcagctcttaacacctgctggaaatgaacagcccttctttttgagtaataccaggcagcagcctatgccaagatgcccgtcaaactttctctggagactgggtttccaaagggttccctgctaagatacaggctgcaagcaaaactacagcactgaattttttttaagcagaaggatgttgtcagtttttaaaaataacagaaacaaaaattcaccaactcagcaagtaatttaaaagaacatgtagacattgtcaaattgaaatcaggataaactgcaatgtaggtaacaactctccagataatataaatgacaaacatcacagaattggtttcagcttactgcttagttccctgaagcaacagtagcataattaataaaaaaaaattagctcagtcttaagatcttaaggaatttcacatatatattattttacataacctataataaatgtcacttatcagtatttttctcttacagaagacaaagtagaaggaagatggaaaaaccacatagcaagaagccagatctcctctatcaagatgaggtaagcaatgagtttaacctagctaggtcttctgacctgcattccttcatgaaagctttctcattttctagtgtgcaactgctttataactttccccaaaaaaaatccttttctataaataaatacgaaacatgttttattcttttgtttaaggcaaaaatcctcctcctggaaaatttttatatggataaaatggcaaaaaaacttcatgcacaaggctatgtaccagaaagaacatggctttgaagtcagaccagagagtgaatcccaagctctacatgcaatttacacaaattcaccttagtcttagtaacttcaatggcaaaattggactaatacttatctcacaggttcaacagaattaaatataaaaggtctaacacactgcccagcatggagcaactactattttggttccaaaactcaaaactcatttttttcatgaagcatcaaaaaacatcaattccaaaactttcaagaaagactattacctacaagatttcactaaccaatttgatacaaatagtataacttgctgaaagacagtacagctgaatgtaaccattcaggggctttggaaacaggactggtgtgagcaatcaatgggagaatgtctccataggactgactggtacagtgcctagasagtcaacactcactattaataacataacactaacagcttatttatgtttcagataagtaattctgcaaatgctcaaggactaaatacaccagcctagatatctaaatatttctatgaatattaagaagctagtattaaagtcaccattcaataagtcttattttggtaacaatgcttaggagaaaaaaaaacaacttcctcacaaaaaacatctattttgtacattaaaagaacagtacgttcaaaaacaggcaataccagagatcaatgtcaatatttcaagtcaaatataatcagttttcaacttattaataattctctctggaataaaaatgcrgacatactggagagcagtttaagattagagttgctatttataaattttgaattattttctaaaaatacaaaagtagaagatcacttaaaatgcagcccatgtagaaatcctttatgaagggaggccaggaggagtcaagcaatgtctctggaagaaactacagcttgaggaaccctctctctctaaaggctacattcgtggaaatgttcagggctyagtcaaacagtgatctccaaatagtatctctattatttcaggcttaaataatcctgttaaagatcacaaagcctatgcaacagaaaatgcaaaagttatgctaagaactaatgcattactgaggttaagtctggggtctttatttataacaaaatttgaacagatttttttttctattttaataattagaaacgtaattaatttttggacacaggagtcattacagtaatcaaaaatggtaattgcttaaaataatttttcttcaaatggaaaacaaaacccagatagagttaagaaacacctctccagcctacttacttagaatagctagacctgcttctttggcttcaacataatggatccttatagatcaggttccgccttcaactcttaattttaaatttttttccaatatcctcatgcaacattccttatacaaaacaagaactaaaagcataggtataaggcatgtaagaaactttaaccacttccttctgaatcttgctaatcatgtgcaatatgccttttgagagtaccttttgttttaaggaaattaaaaaaaaaaaataggcagcagcgatgaagaccattaacacaaccacaagttagcccttacccttaaaggattaagatcaagacagaacctatgggaaacagctcatttgcataaaattgtagaaagtaagagagaaatcaagttaaatgagggatatgctcaagtatttaggggtgaaatacacagatgtccacaacttaatttgaaattcatcagaaaaaaatggattaacggattagggtacagacagataggtgatcaagattcactcttccatatgtttgaaatttgtcataatagaatatttttaaagggacgaggaaatatgaaagggatcaacatttttaatcctcttaaaagtgactgacaaaaataaaaatctctattaaaaaaaaaaagtctacatcctttgaggccagtgataaagactccaacctttaaataataaaaaagggagataaaatttaaatcaggttgaaacaataagactttgctaattttactttaaagtaagaagttaaaatagacagcaaatactaacattgaactttttttttttttttttttttggagatggagtctcactctttcacccagcctggagtgcygtggcgtgatctcggctcactgcaacctccacctcccaggttcaagcgattctcctgcctcagcctcctgagtagctgagattataggcacgcgccaccgcacccggctaatttttgtatttttagtagagayggggtttcaccatgttggtcaggctggtctcgaaccctgaccttgtgatctacccgcttcggcctcccagagtgctgggattacaggtgtgagccaccatgcctggcccagtttttttttttttttttttttttttttaagaaaaaaaatcttctatcactctyttttcctctacctaacatcctaaacagacaagcaraaaatactgtgagatgcctaackgggaaagaggaaaaaaatttctatatamgtgttaacatctgagttaacctgggacagagttaaatttttattttttaatttaaraaacgataaaaacggaagattctggaatatatacaatatataaccttctttaraaataatttttagtccatcatacccaccctacaacttcccattaagcatccaaaaaagacttgtttcaattgaatccaccatttactgagcagctcctctacaacaagcctatggcatatgctgcagggatcatcactcacacatagcatgcctttctgattgtttgttgattgttttgcaatgcatctttgtcaaagatccactagcttgaaggatgcctggcttttcacctctaaaatcaagaaaatagaggaatattaagtttgggcatggattctatatagataaagagatgtcctccagttactaaagcaagaaataatgatttttttcaaagtatccttttaaacaatctaaacaaattgataaaagttacattttatttaaaaattcttgaaaaagggatctatactgttatgctttatgcaatttggtgggaaaaggaacactcctcatggaaaatttaaatgtacttgaattaaatcaatagcattacactttttttctaaatggtcatggcaaaatattcagtaatttcaattgatataagtaactgaaatgtaccacaaaattcaggcagaatggtggtatattccttttttataactctattataccaaggaatttatgtcatcagaagatgctgatgaaataatctatgttctttatattttatgagtccatcagaaaactttactattagacatagataccaagattaacccrcatataaaaacataatttttcaagtcaatgaaacaaaattatctaaagagagatgcagctaacattctactagatttcttcaatttaacttttcaacaatgagaaaacagtgcaatggatatatatatatagtaagcctggacagaaaaatctgttctactgttctctctacaacaaccatacacatgtgtttgaagacttgtcagttatcacaggtgcctgtttcttcactcattactaatcttttgctctaagaaaatgagatgtgaattcaaagcaaaaaacctttaaaattatgtaaaaacacattcatctamgtttgaaagaaatatcctaaagtgcctagttaatttttactgatgagtttatatgtaatttttgttctttttattttccaaattttctataactaatataaattcctattacaaatcaaaggaaaggaccttttagaaaaggtgtgatgagtttatagctgacttaagctttgaaagtttgtgcaaatttctacttaaatcttaccgtaattcataggttttgctactttacactttctatattttctttckaaagcatattttagaaaaaagtaattttgtgggttttcttaattacagtagcaattaaaaaacccttttaggtcactgatccctatgagaaactagaaaaactctaggctcttccctgagaaaagaactcatattttacatatagtttcagcagaggcccaatcatagatacctccgggttaaagtttctcaagaggttttacaacagtgaaaaatggcaatcctggttttgaacctaccaaatatttaaaaacctcaaaattatcaactgacttaaaaataaaagaaaaatgtgaaaaccctcaccaatttgatcatgagttcaatatgaattagtaaaaagtaaattataggcatgcctccatttttcacagcctacatttctctcaggtcttacactgatacccaccccaatctgtctttggtatagtggaatctggacttatatttctcaaaataagaacaagcactcaggattatcaccaagtgatgcacttctcagacaagcactgtggttgttgcaatattcacatcttcatcctcaaacaggactctgtgcttaagagttttattggatgttactcttcataaaaaaaaatggaaaatgaaaaaaaagtacaaagaagtacagttttcaaacctaatacagttgagacaaagataaaaaatcatgaggtgtgcccaaagcagtaagccctaagccctttgcctcagtcagatactggacttgagctggtcatgggaaactgaaccaaaccatattgacactggaaacacgtcgtcatcaaggactattctaggtgatgaaatgtgattagggattttttttaataatagtttaaaactcttcaggggaaaaaaactctcctataacatgtaagttttcctttcattttcagaagtgcgttaaactagctggttgcttccaaaaacatgatataaaagcttgaggactcctacaagtaataaattctaattacaagttaaaaatcatttaactctttaaaaagagaagraaaagaaaaawgcatttacagtttgaccttagtcacataaatacacatacagaattaagargctagagggaataaaagggaatgttttaaaaacagggagagaattagcttctctttacaattatgagtaaatttatctttattcctttcttatttcaacttttccataactaagcatgcattcattttatattcagaataaacatttaaaaacctaactcagatttaaaaaaaattctttaaacattcaacttgaatctttttttttgcctcttaatttgctttgaaacattacacacgagttccaaactcacttaatcactagcgcatgtactaactcacaccattttttaaaactgtgcagaaacttaatgacaagatttgacatatatgattcttcccccttatccctaagactttcataaacaactacagaaactccaacaacaaaaacatgcaaaatttccagaaagtttggcagttgctctctgctccactcaagaggagggaaaaaaaaaaaaaaaaagaaaaaataacataaagaaaaagcccaaacagaaggccctctacaaaacagtgactgaaaactttgtagtcagtaaaatacagactctgaaaaacacagtttacaaatctacctaacactgtagaaaaaagtcattggcttttacaagttttaaaggtatgcagatcaatatttcacatattatacataataaaataaattttatatagcatgtgaaggcaactcaagaaaacagtttcaggtattcatatgaaatatactgtaaaccatggcattgttacaatgatatagttcagtgcttctgtgcacaaggaatgcctcaaaaacatgagacatatagacagatatacaatgtgtgcataaagcaggtatctccatcccgactgataggaaagagtagctccaacaggaaaaaaaaaaaagagagagagaaaatcaaatcttcacctgagatttttagctatacaggtatgctttcttggttatttcctactatatactttaactataaattctaatggaagctagttactcttttcctctgaacaattatttttgtccagtttcctttgaaaaataaaaaaatgttgagtatttgctttagactctctcaaaactcacatgccaaagtgttttagaacttttatgtctaaatttaaagtattctttccaaaattaaacacctgaacaaagtatcttcttctatatttaagtctgtttcatgtaatttcaaagatacctttaccaaaaatccttttaaaataaaggaagcaaggcaataaattttttacaactcacatgcatacgatttacgattgtaagtaatgcctaacataaagatgaactgccaggcatcacatgtactatttcatttcattctcaccagtcaacataaaggacggagacttcctttttgtgtgtgtaggacctattcaataaagtcattgcagtgcattaaaaatgaccattaattctttttcacgcctcctctcaacaggtgggtgttatcttcccaccttgtgaatctgcgctggcccttcctttgaccaacataacgtggccttgcagcttccattcttgctgctgagatgcccatagaaagtaagctggacaaaagagcacatggaggcagaggctcaaccaacagcactaaccaccagacttgagggtgaggtcattctggacaacaaagctgacccagccaccaactggctgcaaccaaagcagtgagcccacacaagactagcagaagaaccacacaggtgagcccagcttaatatgcacacccactgaatcatgtgcaagtaaatggtggttgtttcaagccactaagttttgcagtaattttactaaggagcagtaaaataacagatatatcatcttagcaaggatatattttgagttcagagctatactctcagtsatgtagcaattatttatttaaaaaaaaatagttccaggtctcatttagtaatcctaaaagttaaatgtctgacatacagcaaaatgtatggaatgaggtaaagaggaactgttagttaatgatacagggtaggtatagtattaaatgaacaggtacaatctgatttcatttttgtccaaaaggatgggagccgtatataaacatgtagatgaatacacacacacaacacacacacatacatacacaaacacttacattatgcaaaccatttctgaaaagatttatgagaaattggtaaaaaactgctgtttccagaaaacagaactgaggggccgggtgcggtggctcacacctgtaatcctagcactttaggaggcggaggagggtgcattgcctgagctcaggagttcgagaccagcctgggcaacacggtgaaaccccgtctttactaaaatactaaaaaaattagctgggcatggcggcacgcgcctgtaatctcagctacttcggaggctgagtcaggagaatagcttgaacccgcgaggcagaagttgcagtgagccgaaaccatgccattgcactctagcctggatgacagagtgagactccatctcaaaaaaaaaaaaaaaaaaaaagtaaacagaactgagaattaggggacaaagttaggaggaacctatacatcatttacatcctttcatacctcctaaattttgaaacatgtaaatgtattgtctcaktaaatattttttatttaaatcttaaaaagttaatatatagtctttcttgtctcttaaagatatatactgaaatatttccagatggaatgatacggcttagattcatttcaaaactggagatgggataggcaaaatagtttttattaaaaagtcaaaaaagaacagatgttggcaggactgcaaagaaaaggaatgcttttacactgttagtgggaatgtccagccactgtggacagcagtttggagatttctsaaagaactaaactgaacaaccattcaacccagcaatccattactgaatacagaccacccaaaaaaaaaaagcattctgccaaaaagatacatgcacctgtatgttcactaccacaatgatcacaatagcaaagccatggaatcaatccaagtgcccatcaacagtgaactggataacaaaaatgtgatacatatatactatggactactacacacccataaaaaagaagaaatatttgcagtaacatggatgcagcaggaggccactatcctaagcgaactaatgcagaaacagaaaaccaaatactgtatattctcacttataagtgggagctaaccactggggacacatggacataaagatgggaacaaataaacactggggaatacaagagyggtgagaaagggcaggggcaagggctgaataactgcctactgggtactatgctatctgggtgatgggttcaattgtacctcaaatctcagcatcatgcaatgcacctttgcracaaacctctacatgtacctcccaaatctaaaataaaagttaaaaaaaaattggaggtaggagtagatggcaagataagatgttgaaatgaacagtttagagaaaatcatgagttgatgattatcaaagccgactgatgagtacatgaggattcactatactactctatcacctttcatttgaaattcttcataccaaaaagtgatttaaaaatattaatgtaaagctgtaacagtaattcacagaaacccaactctctctccatcatgacaaaaaaacagaatgaacactaaatattcacgaatatttacaaagcactggcttttttttttatttgtctgacaattaaaattttcaaaagaggtatatgggttcctattaatacttattgagtgccgggcagggtgttctacagacatgatctcatttgatcttcactacaaccctgtgagttaagtagtatcatcatcactttacaagaaaaaactgagactctgagcataattgttcaaggtcaaaacgctagtaaatgacaggattcaaatataggtctgtgactccaaatgccatgctctttaaggaagaattaaaaagaaaattacaaataatccacaaacaaaataatcagccactagtggaccaaacagtgggaagtatcctcatactttaaggaggtaacagtgtgtggatttcataataccttatttcctgagttagttaaaaaggattataaagaaaaaaagtttgattcaaaaacattttttaaatcctcactaaactgaaaaccattattattagctctaaaataatgtacaaattctcatccaataggcttgaatctttcctttttatctgttattaactaaacaaatattataaatttcttcgttcaccaaagttctaggatttaaattaattttctcaaagatttttttgggtagatcctgtggtcccagaccattttcactcctatttttctataaatatttttactccctgtcctacatttttttttaaacaaaaaccaatttagattatttctgagcctagaatacatatacttgttccttaaagaatcccttaaaaattatacaaacaagcataaacatcaccagcataagaatgcatttttcaaaccatatattttgttcttctttactatactggtgmgtactcataaagaataggggcttaacagaaattatattttagactaggctaataccaagggttaagtaggaattaaagcaacatgcttttaaaastagtgtgtgagacaccctaagaacggctccagcctctgaactcctgtagttgcttcatatctccgcaaatagcacaaaattatcgtgatttccctgttatatgtctggctatgaattcttctatggcagggtctttcaattccaaacagcagcacaatactggcatatggtagaaactcaactattgtttgaggaattaagagaatgcaaaaatatcacaagaattccacgactctcccaaacagcaatttccttgctttcagggaaatggtgacactttggtttcaattttttgatataatgaattgattaatttactggccattcagatttgagcaatataccatgtatagatcttcattaaaagcaaagagaaaagtctgtttcctgaaccaaaccagaaatgattcagaggaaaatgcaaattttaactggaaaaaaataattttttaaatgtataaagtactatattacttcaagatatgtgtaggcaaatatgctaagcttctacagtttagagggttttacaaaactgaaaagtgaaattgagggtcacatgaacctgccatgaagtaaatgtcacatttctgtcactgctcactagacttgtgcactactagagtatttgtaaactaaaatgttatatagaaaataaccacatatttggtcatttactcaaacatttatcaagtgcctattttgtgccaaacatagcagtaggggctgtgaataaaaggatgaaaacgtgcccttatccttaaagaactctaataagaatcttataaaacaaaccagaagcaagttaccattcacccatttatgtaaactagcatctatttccagtgaatacctttctaatttcctgaacttcttaccaaaaccaatagacagaagtccacgttaataaacttcctctggaaattatttgtaaaatgggccactctgactaaatgtgcaggggaaaaaattctttggccaacgacttgtatttcaagttttaacctgaactgaatgtataatgaaaggcgaatggtccattatggaaatgctaacacacttacaccaccagtggaagcaactacaacgatgcatttattgaaaattaatgaagtcctgaatttttacttataaagtggatattattagttttagattattttctgcaagccaatagtcaaaatttaataagatgatgtgtacagattgcaccaattttcactcttatccactgcctgcagcctatgtgcatttaaaccaaaaaacatttgatatacactaactataaattatttccttggagatctctcaggcatgaagaaaaagcctcttaaaataaatttaaaatattatatgcttgatggtgtataaccgaaggtttaatctcaccactaaaggggcagttaccatgatttttgcaataaccctgcagacaataatcaagacagctcctgttgttctctcagtaaaaccttcgtaagcacagcatggatatattgtaatttgatatctgtaagatcaacagctatacttcatgacaactcataatataagattttattcaccattaaatcgagcattttcctcagaagccaaaggaaagtgtgttatttaccaaacatggtcctattaactatagattagcacattaaaatagatatgctctctcttaaaaaaaaaaaaagtacagtcaataaaacaagctctgaaaagtagaaaattagatttttttttcaaactttgggaaaacatttctgtgccctatttccatcattattttaaagtaactgattcccattatttttctactaaaatgtaagaaatatccccaaaatagagctaagtcacattcaaaaatgtctcagtctccaattcataatgatattaatattattcttagaaaagaaaaggcacttagaataaatacaagtggtaacacaaygtcaggaaatcagaaatgtgtaattcagaaaagggtcaaagacaatataaattagtattaaaggcattcaaaatggagactactagaagaattcaattactagtcatacatacacacacacgcaaacagtaaacacattatttgaacacaagtaggttaccccatcagtatttcagaagtgtaataaaaccatctttcactcaccaatgctggattctctcttggcagttagtgaccacctgtcatgaaaacagataactactcatgaaaaaacagagctatgcacagagctacaaaaatcagtgtatctgaaaactagaacattggctttacagatttaatagcatctcagtatacatttttatttgtcaaatgcacagagatgtgaacgttagtttttaagcagcacactttatcataaccctctaatgcaggctgataactgcagaacaaattacagctttctgattcatactttggtacaaaacccgcttcataactattaggtgacatatgatataagataactagtattttgtacaatctacagacctgttttcaatattrcatattttgtagaatacataaatgttataaataacaagaaaccaatgtaacatccacgtttcgtcagttaaaaaaaatgackgtagtgacaatattttattttgtcagtatatctccaaacattttcacctgtaatttttattctgacgcattaaaaaatgaattcagtgatatttttctactacattttcaagaagaaatacttgggataaggagatgctctgaacagctcatttgttccccagtgaattatgatcaagactgtaagcacttcacagccagtttaaactatgtttataatactaaaacaatgaatttaagtacaaaagttatttgttttccttggagatatgtcagtagattctcaaaatgctcagaaaataagaagactagacaataaagaaaaatgcaatttaaaaaaataacmctatttttgaatgacaatttaagaattaacactgttttcaaggattgctaattatctacttttwaattacctattaataaaaattttaaacagcagtctagaataccatataccmttttagagacagagaaactaggggatgaaagccmaaatgcttaagactaggccatgagaaaaaragagcagcattatytggtttgcaaaacgctgctytagttcactgctytaaawaccaatattgtctcttgtatatgstcaatgtttcaccatcccgtcccagcaaaaaaaaaaaaaaaaaaaaaaaaaaaatacacacgattttttttagacctgtcactaaattcctctattgtaacattwaattcctgaaataaatgtcctyttttgggacattttaaatactaaracaraaattctgtaccaaaatacatgctataatcagaaacccaaccatactacacattaactcagcataaaaagtccattttagaatgaagatctctcagtaagtatcaatcacatagcaacacttaataacagtggcaatatataatagagtactgactttacatctggaagagccaagctaaaactacatcaatccatttcactgtttctgatttggcagtaattacaaaatagacaaatagaattaaatgtaaattgaaaaaggaaaaaaatgctcatgaaatccttttcataaagttcctatttaacaaccccattaaaagatgagacccaagaacagtcaggatgttttccaatcccaatgcatgtgtttccaagcatgaagagagccaaaagcacagaaagcaaagccctgcaaaccataagagcagaatgttcattaacctctacatgataatcctttcgtagctgcatattaactagttacacattcataatcatttacattatttaaaggaccttcgaggaaatcttctaagctatatccattagtgacggtgttaaaggttatagaagatagtctacctaatgtttccaggaagcctttttaattagtaaatatgcaaatttggcacatatgctttttatgtttaagaaacaagtcactggtagaatggcatgtgttcttgccatcactccccatagtctaccctccacttcgttccggccattcttgccctgttccttttacttcccttaaacagtctccctaggaagatagacgaacaacaaaatccatttcacaatgtacaagagaaattttcactaccaaaatgctgccttacattttaaagtctttattagttacatatagtgtgtagaatatcagagacttcaaataagcactatccaaatgtaaactaaagaagtgacatttgggaaatcagaaataaggggaaagatgaaagaggtagatataaaaatatatagactagccttctgatggcatgtctaggttatctttgtttatatgatttatggtccacctacttgcagaaaagatttaagcccaagcagttctattatatttagagggttttttttttagttgtcttctatttcacagcaagttattcaaaagaaaaaattagtaaattttggtcagacgcggtggctcacgcctgtaatcccagcactttgggaggctgaggtgggtggatcacgaggtcaggagatcgagaccatcctggctaacacagtgaaaccccatctctactaaaaatacaaaaaaatrgccgggcatggtggcaggtgcctgtagtcctggctactcgggaggctgaggtaggagaatggcatgaacctgggaggcagagcttgcagtgagccgagatcgcgccactgcactccagcctggacaacagaaggagactccatctcaaaaaaaaaaaaaaaaaaraaagaaaaaattagtaaatttctacaacttaraaattttagaaggtgttataaaaacaaatatttttcccttaagttaaattattctaaataatcttatttctcctgaaaggggactcagattaattactttaagtattaaattttaaaagtaaccataaggcagcgagccttgttctacaagcaacacttgaaaaacacagcaaaagaaacaaaaacatttcattactttgttgtcctccacaaaagtaagaccacaatggaagaacaaaactagtttytgtttattttttaaacctgccaaaacatgcaaatagtgcccctaaagaaaaaaaacttattgtattattttcatttttcttaaaaatagttactaggcttcaactttaaaatacctgaactagtaaattctttaacataatgacctcgtttacactcaagaattyataataaagtatgtacctacatagaagtacagcagtaagtccacagtaaagaaaaagaactatgagctgatttaccactatttaggagtctttaccaacaacccagtggctacaaagtcatatggtatccattctttgcaacacaaaactgtctttaacctatgagcaataacaacasgagtatatgccaacactgcatgtgacaaaacgaactgcaaagagttcaatggaggcggtttaaatctttatttggagaggaaacctgtattcagagatgaagtaacttacttaatattacacaactgtccaggaactggtaagagatgagaccagttttaaaaccaagtctttctatcagggattctatctaatcctaaagtgcacagtccctatactggcctgcttccaaccatcatgcggcttactggataacagcagaaaaacactggttacagctgcagtcttaaaacactgactgctattgctgtttctcctccactagttagttcctcagtcccacactcacaaataagaccttgccaatcatgtcagtaaaagcaaattctgtaagcttaagttcaccaattcactaacattataatccttatttcttccaatgcctcctacagctcctgaccctttcagatgaaacaagtataaacacattycccaagcatcatttactagtatatctgtgtatgtttaggtgaaggtagaagggtaatgtgctagccctacaattactatcacacctcatcatatttttaagacacttataaattaatagggttagacacctagaaggacaatgatggacagcccatccaaaaatatttttctgttcattagtgtccacctaacatacacatacattttgttaccaagggttaaaataacatttggtaacttttaagctccacacattatatggaagacaggaataataatttcttagctgttgttcctcagaagctgctttttaaaaattattttataaaggagagcagtaacatgcagtaagatctccagtacttaaaattttyatttgtgctatttatattggtgacagaccacaagagggcataaacctatgagtttctaaggcaagttaaatacaatgccacactaaaactagactggaacagaaagcctaaaaggtcaagagtacttcttcatctttgatacttttctcaaaaatgcttcacttctaaaacttgtctcaccatactgcaattttaaattcttcctgtatgggttaatgcataatataacagtttgggaactgtgctaatcagagctgtctaaatttatatagtttgcttctcctgctagactgtggcttcaagacagatcttactattttggttttaaagctgctgagtcaaaaagaaaatagtatcagtgggagctgaagccaatggatactggacatacatgttatgtgacagttacttaaaagctgaaaataatttcttaaaagatagatttgtcaagtagatgtataaatatcattaccaaagtatacaaatagtgtactttcaacaaaatttacaaaaattacaaatcttttaagtaaacccctttgcaaataagggaggaattgactacaggttcctaacagaaaaaaatgcaataagcactgggataaactgtaataaactgagtgttgctgtataaaaaccaccatagcctgagcagagtggctcacrcctgtaatcttagcactttgaggcccaggccagtagatcacatgatgccaggagttcagaccagcctagccaacatggtgaaaccccgtctctaccaaaaatacaaaaattagccaggtgtggtggtgcatgcctgtaattccagctactcaggtagcytgaattgcttgaaccaaggaggtggaggttgcagtgagccgagatcacaccactgcactccagcctgggagacagacagagaccctgtccccaaaaataaataaataaataaataaatcaaccaccataaaagtaaagaaaaccatttcaattttaaacaaattatgttccaaatatgctgcaaagcaaaactgctaatgaaagctaagtccaattatatggagccacttctgaaaacacttacatgttcttatttaaaatgttagctaagatggaatcaaaagtctccttaatctttacctttatgtttkagccagattcctcctacacaggcttctaagcattttttcctgtatgccaatctagtctcgttttacacaaatatcggactatgtctaacgtgctctggcactatacatctccctcccttgttggctttacctacaaactgggctctttttttctttcagtaatcattactcactatcttaagtattctattacagttttctcctattggaaatattttaagagtggtgacacatacattcagtaatacttctaagaatgaagacgtttacatgtttggagggttttgggggtgacttgaactagagatccaggaactctaactgttctggctgaaagctccatgaggtagggccatgtagtaaacataacatttgcaatgaaacatatgaatattcaaaatgtaataaatgcctcacccatataagttccagttttgtcaacaatgaatatgccataaacttaagaataactgtgttttcagtgcttttcaggcttccgaactgcagataagaaattgtgacctacatttctgaatctgaaatactgcctgaattccaccttgcatgcccactgttttatcagagattatcaatcatttcttctccattcacatgccttcctcgtagaaaccctgcccttctcccataaagaatgggtaaagaatcccatttctccgtctgtagccacaataaagggagaggatagatacctgctgctaactggaccaacctcatttactttggacatcagagcctgaggtgattacagattctggtcctaaaagaaagaccactataggatctgcacaagctaaccaaccatctaaagcagctggtacaggaaacaacataaatgtacaagaaaacaaaacacagagasccaaaaaactcctacccttgactccctcctgacttcttacagtaaattatttcataatttcctaagcatctgtatgatttgcaactaagaaaactttagagtagcaaacttgccacacaggttaggaggasaatgtgcctgtgaaaggctcaaaggaaacaaacagtccactgaagagtaaatacaagtagaagaaaaaaaaaaaaaaacaggaaaatatactcccaggtaacaaaaaagtcaaattaaagcaatcttatttagcattaattaaagaagtacatttttattttaaacaccactggccgggtgtggtggctcacacctgtaatcccagcactttgggaggccgagacaggtggatcacctaagatcaggagtttgagatcagcctggccaagatggtgaagccctmtctctacgaaaaatacaaaaaattggccaggcrttgtggcaggcgcctgtaatcccagctactcaggaggctgaggcaggaaaatcaaacccggaaagcagaggttgcagtgagccaaggtcacgccattgcactccagcctgggcaacgagagcaaaactccgtctcaaaaaaaaaaaaaaaaamaaaacaaaaaacaaaaacaaaagaaaccaccactgtcagtgagactgtagtaaaaatctcaaatcacactaaatcactgcaagtagctatgtaaattcaaaactcagtctagacttgcgtaatacctccaagtaggacaaaaaaagcttgtaactctcagaaagtagaagagacagacagataaatacaaaaattatctctttaaaggcacccaagagctgccaaagcagtgaggacaagagggaccaaggattcagagaggggagaactgtggagaagtgagctgatcatctgaagccacttttttctcagacaacaggaggcacaggcaagaggctgagaattatgttgggccctgaggagacagccatggctagcagaaagaaacaagcagaacttgcgcagtctgacaaggctatatggtagtaaaatgagagcacaagagaggtcttaagcatacaactgctttccctcccatggtatctgtcaaattctgagctgcgaaggccaaaaagataaactaaaactctgaaaagcagagctcaggatcaaacaaaaattagttcagaagcctccaaggaaatatggtgtagtgagcaaaatcaagcttccagatgaaagcctgaagaaaccagaagcagcagatggcttactaaaacaacaacctggccttcactccacccagcacctgcccggagtaaggtgaccagctcccactgcatctgcttcagtagaagaaaggacgcgccttttccagaggaagttatcaccttcaggaatatctacaatctttaaagacacaatcccaggatttagtcaaaaataactaggatgccaagaaacaggatcatatgaccaaaagtcaaaagaaaaaatatataaaacagaaccaaacacacatgcaatctagatactggtgttaacaaacataatgattaatatgttcaaggaaatagaggaaaagataaaaggaatatattttaaaaatagcaattttcactagagaactgaaatctacaggaagaaacmaatgaaaattgtacaactgaagaaccaaaaattaaaataaatggcattaaaagaagattaaacagcagaaatcaggatttttgaacttgacaggtcaaaagaaaacaccaaattaaagcccagagattcaaaaataaaacatggaaaatacagaaaagaccaataagagacatgtgaaacacagtgtaagtgcaagatccagaaagggaagagagaatgcagcagaagcaatattgaaaagatcttgaattctggattttctaaaactgatatcaaagtatcagccgatagactgaagaaactccaagaatcccaagcaagagaagcacaaagaaaatttcaaggcacaacatagttaacagtgatgaaaaccaaagaaaaagggaaaactttatgtgcagctgggggtaggcggaggaggcacaggggagattcacagccttcaaaggagtgacaagacttagagctagagctaacttcaacatcaatgacagaaagtgaaagataacagagtatcttgaaatgctggaaaaaataactgaaaatctatagtgacatacacagcaaatagatcctccaacatgaaggaaaaaataacattttcaacagaaacagaattctgcaccagcagactttcattaaaagaaatacggtttattaaactagacatgttgttaataaaatgtcttatcaaaaaaattattaaactagatattgttattaaataagtgtgatcggttaaaaaaaagacagcaacaacaacaaaaaggactcttcagagtaatataaatgcagaaagaattgaagagtaaaggtacaggataaaaaaaaaaaaagatgggtaaagataaatcaatattgaccacacagaacaattaaatacagtgttgtggtgtttaaaatacgtagaattaaaatgcatgggagcaatcatgcaagaggtgggctggataaatgaatgaatgctatgatctctagagacaccagagacttacttagtgaaaaggaattgtaaaaaaaaaaaaaaaaaaagatactataaatacatattatatttagtactaaaccataagtacagtataaaagtagtaaaaaataatgtatcacaaacaagttaataggaggaaataacaatacaaaatgtttgatccaaaggaaggaaaaaaaaaaagcagagaaaaaagaacataaaagtacatcaattagaactataatggggaaccatttgacactccagtaatgaggatggtccttacagaaaacaraaacagccaatgcaaatgccaaaagttgcccagtatgtggactggaacccttgygaatttgtccgggaatgtaaaatggtacagtcaccggagaaagcagtgtggcagttccttaaaaattaaacacagaattaccatatgatccagaaattccacctctgagcatacccagaagaatcgaaagcagccgggcgcagtggcacacgcctgtaatcccagcactttgggaggccgaggtgggtggatcacccgaggtcaggagttsgagaccagcctgaccaacatggtgaaaccccaactctactaaacacaaaaaattagccaggggtggtggtgcatgcctgtaatctcagctacttgggaggctgaggcaggagaatcacttgaacccaggagatagaggttgcagtgagccgagattgtgccattgcactccagcctgggcaacaagagtgaaactccatctcaaaacaaacaamaaaaaaaaaaaaaacaaaaaaaaaagaatcaaaagcagatacttaaaccaaacacccatgttcacagcagcattactcaaaatcaccataaggtagaggcaacccaagtatccatggatgctaaaataaacaaaaacgtataatacactgcataatacattctataatacaatggaatattattcagccttaaaaaggaagaaattctgatatgtgccacaacgtggacgaaccttgagacattatggtaagtgaaataacccaatcacaaaaggacaaatactctatgattccacttaaaggtacttagagtaatcaaattcatagagacaaaaagtataatagaatgctggcagccagatcaggaaggggaagaatagagagttattgtttaatgaacagagtttcagttttgcaagatttaaaaaaaaaaaaaaaaaaaggcctggagatggatggtaattacggttgatcaacaacgtgaatatacccaatgccactgaactgtatacttaaaaatgattaaaatgggctggtcatggtagctcatgcctatttcccagcactttgagaggccaaggcaggacgaccgcttgaggccaggagttcgagaccaccctgggcaacatagtgagtccctgtctatacaaaaaaaaaaatttttttttttaattagctaggcccaatggcatgcacctgtagtcccagctactcaggagactcaggcaggatcacttgagctcaggagttcaaggttgcagtgagctatgaccataccactrcactccagcctgggtgacaaagcaagacacagtctcttaaaataaaattattaaaatggtaaattttgttatatttactacaattttttgaataaaaaataaatacaatgtacgtctaatagaaaggtgataaaattaaatatatcaggaatcctactacatataatggcttaaaatactctaaataaaaggaaaagatatctagactgaatattaaaaccacaacaatatgctgtttataagacacacttcgaacccaaaagactgaagttaaraagattttttttaaagatagacaaaacaaacaaatttagctggtgtgaccatactaatactaatatccaacaaaggagacttgaaggcaagtagcattactagagataaaaatatctcagaatggtgaaaaggtcaactgaccaggaagttwttacaattttaaatttgtatacaatgaataacatagctgtaaaatatataaagcaaaggttaaaaaaagagagaaaaataaatctataaycctagtgactattttaatacatatctcaataaatgatagaattagcagacaaaaaaattaacaaggacataaaatactggaacaacatattcaagcagcctgaactaacagacacatactgaacccaaaaactgcaggattaacatttttttccaagtaaattatgaaaaatttaccaagaaaaagaaaacattaggtcaaaaggcaagacttaaatttcaattatgcagaatgtgtactctgaccacactagagaaacagaaaaataagtagaaaataatgtttgaaaaggaatgtatttccaatttatgggtcaatgagcaaatcacaatagaaattagaaactatttttaaatgactgataaggaaaatgacatacaaaatgtgtgcagtacctaaggcaatgattaagagaaaaatttaaagctcaaaatgcatatcttataataaggaaaggttaatattagtaacctcaaccatcatctctaagggctagaaaaattacaggcaaaggaaaatcttaaacaggaaaaaagagagaagaaatcagtaaagtagaaagcagacttagaaaagaggaaaaaaatcaaaggcaaaaatataaaatataaaattgataaacccttaagaagagaaatcaagggaggaaaaaacccacaaattaaaaattacagtaattaaaaagaggacatcaccaccaaatctactgataataaaaagataacaggatattatgataactcggagggacaacaagcttgaaaacttagaaaggacaattccttgaaaatcacattttctaaaatgatataactagaaacagaaaatctggatagtctttgaactttcaaagaaattgaggtcgtatcttaaaatctccatacaaaatgtccaagaaaaatattgggcccagacggctttgttgatgaactcttccaaacatttaagttagaaacagtacgagccaggcacagtggctgactagcctgtagtccatcattttgggaagccaaggcagatggatagcttgatcccagaagttcaagaccagcctgggcaacatagtgagactctgtctctacaaaaaatacagaaaaattagccaggcatggtggcgcattcctatagccccagctactcggggagactgaggcgagaggatcayctgagcctgggagttccaggatgcaatgagccaggattggccactgcactccagcctggatgagagcgagattctgtttcaaaaaaacaaaaacaaaacacacacacaaaaaccaataacaacagtgtataaacttttataggatatacaaaaatgggagttgtttcatgagaccagcctaattctgaagccaaatccttacgtcgacattacaagaaaagaaaatcataggtttaaggtagtgttaatgttttttgttgtttttttttttgagacggagtctcacttgcccaggctggagtgcagtggcgtgatctcaactcactgcaacctccacctcccgggttcaagcaattctcatgcctcaaccttccgagtagctgggattacaggcccccgccaccacacccagcttatttttgtattttttgtagagatggggtttcaccatgttggccaggctgatctcaaacccctgacctcacgtgatccgcccacctcagcttcccaaagtgctgggattacaggtgtgagccgcagcaccctggtagagttaatcaaaaaaaaagaaaaaagaaaagaaaagaaagaattacagaattttgcctcatgtaacagaacaaaataccttaataaaatattatcaaatttaatctagcaatatacaacaaggtaaacacatcctctacaaatgggtttgctgcaggaatgcaatggcatttgaatatttttaaagaatcaaagtaatttaccatattgttatctcaagaaacatagaaaatacatttgataaaattcagcatccattaatgataaaattagcaacaggagaaaatgtccttattttcataacgagtagctacaaaaagccaactacgaacatctgtatggtgaaatacttaaaactgccctcctggtatgtaaagcccaatgtcctaacttttattttacattatattaaaggttctagcccatacaatagggcaaaaaacaaaacaaaacaaacaaccataaaaaaaaacttaagaactggaatgaataaaactgtcagtatttacaaacaacatgcctgtatgtaactacacagatactatcagaatgtacaggcaagtaattagaattcaaataaatttaggccaggcatggtggctcacacttgttgtggtcccagcactttgggaagcagaggcgggtggatcacttgaggcctggagttggagactagtctggccaacacagcaaactcatctctattttttaacaacaacaaaaaattttagaacaaagtcaatatgtaaaaatcaagtatgttaccagcaaaaaaaaaaaaaaaaatgaatagcaagtaaattacaaaaggcaacaaaaaatagtatctagaaataaatctaacacatgaagatttatatacttttaaaagctaatactaaaaagttatagaagtaaataaattgatataccatgttcatagattttaaaacttaatattgtaaacatcttaattctcctcaaaccgatctttagatccagtgcmctccaagcaaaaccccagtaatgttattttttgagtattggaaaggtgatcctaaaatatatacaaaaaagcaaagggtcagaatagtaaagacaatcttgaagaacaaagtgctagaggaattttactactagatatcaagacctattataaagctaaaatagtaagagtgtgatactggtgcaattacaggcaaataatccaatggaacagaatagagaaacagagctacacacaaataatcacataatttatgaaacagacaacatactccataaggattactctggctgctaaaagaaagcttaaccccctccagaatccctagaattttttgttacaatatctggcatccagttcaaaattacaaggtacaaggcaatctataaaaacaaaagcggctataaagaaaccaaggggaaggaataaaagcagaccttcatttgattgacatattgcatttataaaatataatagactttatgattaatacattcatgaaaacagaagaaaagttgcagatgtcaacagaaacttggaatccattttaaaatttcaaaacataaattgtatttcttttacggttttcctgctgataaatccaaaagaattataagcaggaaaatgacaaaatgacatcatccaatttgcattcttaaaaagactactctgggccacttttttttgctgcgtttactgtgagaatgaagaccattctcagcaatcagactgttgacattccagaaaatgtcaacgttactctgaagggacgcacagttatcataaagggccccagaggaaccctgcggaaggacttcaatcacatcaacgtagaactcagactccttggaaagaaaaaaaagaggctccgggttgacaaatggtsgggtaacagaaaggaactggctaccgttcggactatttgyagtcatgtacagaacatgatcaagggtgttacactgggcttccattacaagatgaggtctgtgtatgctcacttcccccatcaacgtcgttatccagaatgggtctcttgttgaaatccgaaatttcttgggtgaaaaatacatccgcagggttcagatgagaccaggtgttgcctgttcagtacctcaagcccagaaagatgaattaatccttgaaggaaatgacactgagcttgtttcaaattcagcagctttgattcagcaacccacaacagttaaaaacaaggatatcaggaaatttttggatggtatctatgtctctgaaaaaggaactgttcagcaggttgatgaatcagatctaagagttatccagctacagaaagaagatgccagatgactcctaagacatacttgtgatatttcaatgatgcaataaaagacctattgatttggaccttcttaaaaaaaaaaaaaaaaaaaagactactctgggccaggcgccgtggctcatgcctgtaaaattttgggaggccgaagacaggtggatcacctgaggtcaggagtttgagaccagactgaccaacatggcgctcatctctactaaaaatacaaaaattagctgggtgtggtggcgggcacctgtaatcccagcaacatgggaggctgaggcaggagaatcgcttgaacccaggatgtggaggttgcaatgagccaagaccactccattgcactccagcctgggcaacaagagcgaaactccatctcaaaaaataaaaaaaaaaaaagactactctgggaaatagacagaagaggaacaaagtggaactaccaaggccagccaggaattactgcctcttttgtaagaaatgataactgggccaggcacggtggctcacgcctgtaatcccagcactttggggggccaaggagggcacatcacctgaggtcaggagtttgagacctgcctggtcaacatggtgaaatcctgtctcaactaaaaatataaaaattagctgggcacggtggtgggtgcctgttaatcccagctacttgggaggctgaggcaggagaatcacttgaacccaggaagaaagaaaaaaaaaaagaaaagaaaaaaatggtaactgggaaaatggcaatgaagatcacaggaaacagccaattcaaggaattcctagttttcagatataatattcttctatttctcttaygtatttttatttcacattataaattaaattaaacataatagttcattgagagggtggttataaatatggataaagctaaacaaatttaccctttgactcagtaatccaactctaggactttacccaaagttacttcacaaatgagaaacaacatatgcataaagtgatttactgaggcattatctatactatcaagagactaaaaaacaccaaatgcccatcaataagatatcagctgaatatctgatgacacagacataaagcactatgcaaccacaaaatatgataaggaggccgggcacggtggctcacgcctgtaatctcagcactttgggaggccgaggcaggcggatcacgaggtcaggagatcgagaccatcctggctaacacagtgaaaccccgtctctactaaaaaattaaaaaaaaaaaaaaaattagcttggctgaggcaggagaatagcatgaacccgggaggcggagccgagaatgcaccgctgcactccagcctgagcaacagagcgagactccatctccaaaaaaataaaaaaaaaatgatgaggaatatctctatgaaccagagtaattcccaggtttatcatttaatgagatgaacaaaaggcaaaatawgctgccttttgtataagaaagcagtatggaggggagataaagtgaacacatgtatttttgaagaagaaacagaggaaggacaggtcaaaagtgaatgtaaatggttatctaggccggctgtggtggttcacacctgtaatcctagcactttgggaggctgaggcgggcagatcacctgaggtcaggagtttgaaaccaccctggcgaacatggtcaaactccatttctactaaaaatattttttaaattagccgggcatggtggtgggcgcctgtaattccagttacttgggaggctgaggcaggagaattgcttgaacctgggatgtggaggttgcagtgagccgagattgcgccactgcactccagcctgggcaacaagagtgaaactctgtctcaaaaaaaaaaaaaaaaaaaagtttatctgtaggggtaagtaagagcaggaatgggaatgaatcagaattacctcagtagggataacttttgatttagttgtgattttgaaccatgcaaatgttttcatgtattcataaaatgcaattaagtgaaaaagataaaaaacaaatactaagattcaatataaataaaaatccaaggtataactgcacagaaaaaaagtaattcaagtgacttttgggatcagtaccctaactgtacaccccaaaagcattaattacacaaaagccaatgaaactgcaaagacattttgaactttacttcaggtttgccattggcagtggtattaatgcagtaattctgaagctattttgtatayattgtaggatagagcaaatgaataaatgcagatgttgagaaccaaggttttcactatgaaagaaggggagtttcaaatatagactggggaaaatttaagaagaaccttgtggtaatggatttgaattcaaagtatcagggtatacagtcagggtccattgaacccagttttatttttttagtttctttcttgagtagttctaactatttgcaaggattaatatttcatgccttttatcttctcttagaggccttccaaggaatcaaaagaaaattttcctattaagaaaaaaaaaactcattttattctgcaattaccatatgaatacagtggctttgtaagtctaagatacactacaggatcctagtgattatgtttttcctgcatcttgccatttcatcatcaccttagtaattattttatgatcaactattcctaactacgctctaaaaaaaaaaaactaataagaaaatgagaaaatggaagaattatggaatcactcagaaggataatgcaatcaacagcaaaatatcatccttccattgtctactgcattgcctaggatattgcatcatctttcaagacagtataaatgataacagacaccatctttgtactctgcttttcgctttcaataaacacagttgagaattcagattgtttttactttctgcctataatggaaagaggaaaaaagtgatggaaagatacttcacaattattaaatgaatcagattatgaatataaagagctagtagcactcttgaccaatgaagtccaataaattttttttttgatgaagggaatcttcatcagcacagaccaatacaacagtcaatagccaaatgtgactaatgagcacttgagatgtggccattgtaaccaaaaaactgaatttttattttacttaattttaattaatttgaattttgaatttaagtataatagccacatgtggttaatggctaccacattggttagcgcagaaagacactcgtgatggtgaaatgagagcataaattaaatctcagattatgagccttcagatgaaaatatcctagatgaattttctcaaaatcaacaatcaatgaatatacagaaattaactcaaaacggatcaatgacctaaatataagcgctaaaatcatgaaatccctagaaggaaacataggtataaatcttcaagaccttggatctggcaatggattcttagatatgacaccaaaaaacacaagcaacaaaatgtatagtcataaatgacttggggtttgggggagggragaatgacagcgttattgcttaatgggtagagagtttctgtttggggtgaygaaaaagttttagaaagaatagtgatggttacctaacagtgaatgtaatcaatgtcactgaaaagtatacacacaagaaatgttaaatggcagattttattaaatatatttagtttaccataataaaacaagattgctagaataaaagatctctaaactctatttcctcttctactcctgtaagttttttaaattcttgaggtcagaggctaggagaaaaaaaccctgaagacaccagaaataggttcttaaagcaggcattctgtaatggtttatctttgtattgttttaagtcctagaagaaaccatgccaatggaggaagaaaactacatgcatctgaacttagtgaatgttaaaaaagagttgactgattagaataaggaaaaattaagaatccgtgagtgaacactatacttgtaagaacaaaaaggaaataggatattcccatccagtcagtcattcaacaggaaagacttcatgatgcaagaacctggataatctcattgttctaagaggacatgtggcagtattcttaaatctcttataatctttgtgcatcaagatttgcttaatataaagagaactgctgtgtttaaattctgattaaactttccaataaaattgtttttcactaacccttattcttagacctgtaaattatttgcaaaaattacttaaaaatataaacagtaaacaggatccactggacctagatggtaaatggtgatgactgctttttctggtatattgaaggttaatatatttccttagtactgtctgcttgatgcaattaacaccccagcagcaatcagcactacttgtgtccatatcttggtttctaagcatttcttattttataaggctcttggaagaaacagtcaatttcaggactaaggcaaactacagggcaagcctggaacatcctgtgccagaaagcaaggtaacgatcaaataatgaaaaaagaatgcacaagccaggcacggtggctcacgcctgtaatcccagcactttgggaggccraggcaggtggatcacctgaggycaggagatcgagaccagcctggccaacatggtgaaacctcgtctctactaaaaatacaaaaaagtagctgggcgtggtggcagaggcctgtaatcccagctacttgggaggctgaggcaggagagtcactcgaacccaggaggcggaggttgcagtgagccaagatcgtgccaccgcactccagcctaggcaacaagaaactctgtctcaaaaaaaaaaaaaaagaatgcatgcttgagccagcttgaaggggctcccattggccaaatttagaacaatttgaacatcaaaaggaatgaagaaatcacatcactctcaacttgaaacaacaaaaaaatgagtttattgtgaaactaaaggggggggygctagagttcttgttgctcgaaaaacataaactaataaatacattgttagaaaatcactaattagcaaacaccaatataactgatttaggcaaggatcatccatggcaaaaggcttttgaggaataggatatttacactgtcttcaagtactataccatttaaaggtaactttatgatggagagacttgacatcttaaacaagtggttagcaacactaataatgggacaaaaatgacattatgtgtctcctgatgtgatgcaatggaaagtcatcatcatctatgtaatcacgcgtgtatgtgtgtgtgtgtttttagagacaggaccttaccactttgttgcccaggctggactccacctcctgcctcagccttcggagcttttggagtaactgggactataggcttgtgccaccaaccagctatctacgtagtattcttgccaaaaatgtttgtttcttcatgattatgttcattagacatctccaaattgtgggacgttctacaagaaaactgatctaacgcttcaaaaatgccaatttcataaagacagaaggtggcggggaataattttagatgaaagaagattaaggagctaagagagtcaaatgccatagtaatctytgattggctcttgcattgaaagagagttataaaggacatttttagaaaaactgagaaaatgtgaatatggtacatgtcaatgttaatttcttgagtgtaaaaaaagatatggttatgtagaagaatgaccttgatgtaaaatgataagtgcttcagtattaytgatgtgatgatgtctgcaattcacttytgaatggttctgcagggggaaaagggaaaaaaaaggaatatataaagagaaaagcaaataggacaaaatgctaactgattactctaaacagtggtcatcatattgttctttcacctttcctgtacttttataatttttcaaataaacagttgtagtttaaggggggaaaattgcatatgacagactaaaaagattgagacatcactctggagataagggcaagtgatacaagctaaaaggttcttaaactaaaaatgataacaacaggtaaaacaaaataaagcagttatggccaaatcacagattccacgcaccttcttccccctttccccccagtgttttgggaccattaccatcttttcttccaatctagagaagcctaaaacaatgaaaatgggttttttcctccttgaaatactgttttatgtttattgacaacttccaaagaactaaaaccaaagttgtctcttcttatggcacattactggcacaatactaagtgccaacaacaagaagtttatctaaaataaaacttacaagtaatgagttctgaaaactcacctacctacaaaacggaatgtgccttcggctatacaagcaaacatattcttacaactgtgcctttcttaaaaaataagtaacctctccctccccctccccctcccgtctccccacagtctccctctccctctgtctccatggtctccctctgatgccaagccgaagctggactgtactgccgccatctcggctcactgcaacctccctgcctgattctcctgcctcagcctgcagagtgcctgggattgcaggcgcgcgccgccacgcctgagtggttttcgtatttttttggtggagacagggtttcgctgtgttggccgggctggtctccagctcctaaccgcgagtgatctgccagccttggccccccgacgtgccgggattgcagacggagtctcgttcactcagtgctcaatgttgcccaggctggagtgcagtggcrtgatctcggctggctacaacctccacctcccagccgcctgccttgacctcccaaagtgccgagattgcagcctctgcccagccaccaccccrtctgggaagtgaggagtgtctctgcctggccgcccatcgtctgggatgtgaggagcccctctgcccggctgcccagtctgggaagtggggagcgcctcttcccggccgccatcccgtctaggaagtgagragcgtctctgcccagccgcccatcgtctgagatgtggggagcrcctccgccccgccgccccgtctgggatgtggggagcgcctctgcccggccacgaccccgtctgggagatgaggagcgtctctgcccggccgccccgtctgaaaagtgaggagcccctccgcccggcagccgccccatctgggaagtcaggagccccctctgccccacagccrccccatctgggaggtgaggagcccctccgcccggcagctgccccgtctgggaagtgaggagcgtctccgcccggcagmagccccgtccgggaggcggggggcagcccccgcccggccagctgccccgtccgggagggaggcggggggcagcccccgccyggccagccgccccgtccgggaggtggggggcrcctccgcccggccgcggtcccrtctgggaggtggggggtgcctctgcccrgccgccccttctgggaagtgaggactccctctgcctggccgccaccccgtgtggcaggtgtacccaacagctcactgagaacrggccatgatgacgatggcggttttgtcgaatagaaaagggggaaatgtggggaaaagataaaggaatcggattgttgctgtctgtgtggaaagaagtagacataggagactacattttgttctgtactaagaaaaattcttctgccttgggatgctgttaatctataaccttacccccagccccgtgctctctgaaacatgtgctgtgtccactcagggttaaatggattaagggtggtgcaagatgtgctttgttaaacagatgcttgaaggcaaaaaaaagtaacttcaacattacttattgaagttacagaacttacagaacaaatatactcttttcaataaattaccataattaaatcaatttagaaaaagcatttctaaaattcaacacccactcataaaaactcatagcaaacttggaatrtaaggaaatttccttaatctgataaaagcaaatacaaaaattactcacagtaaataccacacttaatggtaaatgtttaaaagttgacycctgatgcccactaccagcacttgaactggccagtatcaaaagcaagaaaaagaaagaaacagcatacggactggaaaggagaaaataaaggcaatcttgaggaaccacaactaaaactacaccaccatgtaccaggtaccaagataacacaaagtcataatgatttagacagtgtaggtttgctgcaagaacagacaagccaacagaacagtcaagaaactgatctacttacacagtcacctgatttatgacaaagatgacaatgcggtggagacatgacactctttccaataaatgctratgggrcaactaggtatccatacagtaaaaatgaaacctgacctcaatctcccccatatacaaagccaattccaggtagaatgtagattctcaatgtgaaaagcaaagcagtaaagcttctattagacaatataagaggatatcttcagaaaagtagtaagaaagacctcttaaaaataagacaaaaaacactaaccatgaaggaaacaattgttaaaattaaaaatgtctgttgatcaaaggacagacaccactgtaagtgctccaagtcaagccacagaccagggaagaaacttayaatatataattggaaaggcagtcattactatgaatcaattagaatataactaacatcccaatagaaagtagttaacagatgagcaggtatttcacaaaaacaaaacacaaaaatccaagtagccaataaacatctgaaaaggtcatcaacctcattactcatcactagattggctagcaaatatgaaaagacacatggtggtaaagactgaagcagggagaacttctgtccactgctagcaagcggtaaactggtataaccaccttagaaaaagcattctaagtggaactgaagacacaaacacgccatgagaaagttccaggcaaaaactagaaacaaactgttcatctgaaaaataaacagtattaatgaaaattctaagatcggatctgtaaacatctatcacaatgcgtggcacacagagttgctccctataatgtaattccatccgtccatttcttcacatatgcatgacaaatggatataatttaagatcagcctcaaaacacattccaatcgtttcccatctcacaaatrtgaaaaccaaaactcttacaatgatctggtactgctctcatactggctagaaagctcttctctaaaatatcctccatatatccacacagctcactccccacttatttcaagtttctgctcaaatggaacctaacagagaagccctctctgatggcttacagaagacaccatccctccactcacatccctcattctctacacgcctcttaccttcctgtttttctacttagccttacctaccaaacacccaaggtaaggctatgtaactgcatgccttcacccctagagtgtaaccatgaaagaaagaacttgctgtattttgttcattactgcacactcagcagaacatgcctggcatgtagtagatactcattaaatatttgttacataaattctatggcatggattctaggcttggaaagaatagctgttatatggcctacgtggctgacagttctttaaactatgtgcagtttagtttatcacaagaaatatgaaaaccctccattaagttaaattagctgttctgctttataaaaaatttaaaatatttactcttaatgcatttaattccccaaggatctatatcaggaagtataagctattccaaaattccaagtgagaactacatgaggcactcaattataaatatattatcctaatgaattttctaatcttactattatcctgcaaataagcctataaaaacgatactggatccaccactttttaaaatattacaataaaatctcagtagttctgctaataaaagctaatagtatctagagataaaatacagrtatctcagaaacatcaccttagccaagaaacaaaaatttcaacataatgcaattcttagaatcagatttaacaagatcttagtacaaggaaacctccctgaacagcccaagacactccacaacagtcctagaccacacattttatggtataggtcacagtctagacaggttaagcttccatttttccaacaaatattttactgctgttagtaaaaacagatttagttaaagacaaaaaaaggatgatctgaatttctctcctctccctgtatcttataacaaatgaagattaaataaaacctttggggggggaaggaaatcaactggaagatggttgtttgaataaattatatatatcagctctgaagtaaccaagaaataaacctgcctaaccggcattcaaaccagccaagagccatttttcaggctcagaaagtgttttgcaattaaartaacattccaattttcgttaaaattaaaataagttttatcaatagctttttttggaaaaaaaaaaatcccatccaattttacaaacttttaggtaaaataataaaattgtgtacttttaaaacaatggtgttttcctatgtaaaatgtgtaaatatttatataaacgtaactggaaccaccctatacatactgtcctagttttcaatgcctacgtaacagctcctgatttatttaaccaatcccccaatgtcagacttttagtttttctctttataaacaaagctgcagggaatgtttcttacatgttttattgctagatcaaaatagaaacaaaccgaagttctaactaaaataaattgttttggaaatgtttcaccattgactgtaagtgaaagcaatgttaaaatatttgatcctaaccgctgactacagatattgtcacttagaggttgtggcttgttcatgccccttgtctgtcctcttcctcaggttgccaattttttgtcctttttattccatgttccagagaacatacaagaaaaawagagagagagagcgtaaaacttgttatactccttagctgaatttggaaaaaaagaaagagcaaaactaatgagcaacatttaagccacattacctaccagcccctctcaatcaaggctcccagagaagattatgccctaagcctaaggcacccactgtgtgtaaggaactcatttctctctctgcatctacagccaactaggtaggtaccctctcagggaaaactgagaacagtcattcaaatcattttctgcagagtttaactctgtctcacaaaacccatgtagggaaaggccaagagcttaaaagcatgtttgattcatctttcataaaggaatactaagtgccacatatgaagctactatgacattttccccttctacactcaggatgtcactacgcttctactttactagaactcactgtactcccacaactgggccagctttaaagcctaaataaattgcttcacaaaaaattttcactgccgatttactgggtagttttcctgtactacactataattacagtgcagctatctaatcagtttattttgtggccttgtgggtctcctgtccactgaagcaaatgcttctattaaataaagatagattaaatactgacgcgctttttcctgaactggggataattttacacacccatgacagatatacgtggttattttgtgtgccgaattaacattaacacaacacagaaaaataatttggtagcacagtcaatgtctacagaaaacagtcattcagtttgccacaagactgtaactgaaaaagcagttactctctcttccaatgtaactcaacacgataccagaaagctgttcagagcaccccaaaaagtatcctttgcatttcagtcacactaacatcagaataaaactaaggatatctttttaatatgccaaatggcagaaaacatatcaagtcagcattatgcacgtattatacactgaaggaggtgaaattaacccactgcagcagaggaaaggcaatagaaacaccatcctctgagggtctgtgtcacattctctgaaagaataaaaaatgccaagttttggcaaaaggagtaagatttcatgaggggctgttttttctttcttctttttctatctttctcttttaaaaaaatacattaatgtcttctaatttaaagacgccaaactagttaagttttatatatatatatatatatatatatatatatatatatatatatatatatatatgaatgacagggtctcactctgtcgcccagggtgaagtgcagttgcatgaccatggcccactgcagcctcaaacgcctgagctcaagtgatcctctcacctcagcctcccaagtacgtgggactacaagcgtgcaccaccatggcccggctaattttttgtatttttttgtatagacggaggtctccctgtgttrcccaggctgatctcgaactccttggcttcaagcaattccacgaccttgacatcccaagcagctgggattacaggtttgagtcaccaccctagccactggatttttaaaccttcatcttgaaaacatggcttccaaacctaacagttgcgttattagagaaaaatggctgagaaatgaaaatccaacccacaaaataatttaaaccaaccagaacaaagaaagattcccgcagttcatcccaacaggtggtttccaagcaaacgagggttttttaagttctatcaaaacccccatctagtagaactgagtatatttttgtatctatgtaaacagtcgttcttatacaggaatgttcaattaaaaagttaagaacttttaaactgcttatagtgttgaagcaacttcctaaccctttataatccatgctcttccaaacatgacataaaatattttaagcaaattaaatactgcttttcaaagtaacaatttcaagacacttgaggggacagaatcaatctgaaagaccacagaatccacagaaaaatcagatttaacaataaaactrtttcttaaattgggaatacttctttatataaagtcccactaggaaacacaaaactttgtacccttttcaccagtagtttaaaactcatttattatacgatgaaattaaaatttgtaaaaatgagccgggtgcggtgactcaggcctataatcccaacactttgggaggcgaggtggggaagggtaggagggggaggatcgcttgaggccagaagttcgagattagsctgggcaacatagtgagactctcttttttttttaatgtttaaatggcattatattgtgacaaatattaaataaccaaatattgcacaggaagcattatcatgacaaacgcggtaaaacttttccgtgcaatcaaagagcaacaaacagtacacattttaagcaatgtttaggtcattacaagctacaaatattaaggcgaacgcttccgttgacagcgtgctgcccccgyccccaaattcccacgcgctgccgcacgccttcagctcagaagccccctttcctgggcaggcgaacgggctgcacacccctcactccgctgcgaagtcaaagggctgcagacaaagacaacagaagcacgtgacaaaagtttatccccgttccctccgggggcccrggcagctgggcctaggccacgcggggcggcggcccagagcacaggcaggggcagcccggcgggcggaggcggaagcggcgcggggctgctagttaccttttcctgctcctcgcgcagccgcgccacatccggggcgcgcaacggaaccrgggcaggggccggggccgaagggggcgaggggtcggggggcgtctccacggtgggcgcctccatgacgggcccgcgggcctcagcgcggcgtgtgagtcctgaaccagcgcctgcgcaggcggcgcggccggcagttgcccagcgcccgcgcgcccgccctcaggcaccgcgcgccccgcgcccaggaggccgcgcccgccgccgccgctgctgttcgcgtccgcgccgcccgctgccgcatctcacacgtgcatgtccccgccgccgccgccccgcagcgggctccgagtagcaggccgcctgccaggtaccgagacgcctctccggtgcgggcccagccaggcgtcgcgtggcggccgcgcctccccacacgccccgcctctcgcggcacgccggaagcaagcgcgcaggccccgcccccgacacgcccagctcgcgcaggccccgcccccaggggagtgcgcttgatgcgaaccgcgtggctggggctggcggtgtccgcgctgggctgcgtttgtatccctctggaagcttacattttatgccgatatttctttctttttttttttttgagattacgtatatgaaagcactaaatataggctttggaaccttaaaaaaaaaaagcttacattctatagaagctccacgcccaggaaacgctcggcaacaagagccgcgtgtcgccttgagtgccccatctccctccccgtcgtttggcgctgcatctgtatctaggagcttaattcatgtactagagctgtttcataagcacatttaattttagcaaattcaactctttctgtgcctttttagtgagttgaaatatacaattatattttgcatgttcattaattactgtacacattgtattttctcttatataaattaagctactgtactaattttaatatgctgctatgaatggactaagaaattttccaaggataactttgcccccacttttcttttttttttttttwtttttaagagactgagtcttggtctgtcgcccgggctggagtgcagtartgccatcatttctcactgcagcctcaaactcctagactcaagcgatcttcccacctcagcctcaggagtagctgggaccactggcccgcaccaacacatcctgttaatttttctattttttgtagaggcggggtctccctatgttgcccaggctggtcttgacattaagcgagcctcctgtcttagckaacctcctgtcttggattccctgaagtgctaggattacaggtgtgagctaccacacctggccgttccaattattttagaactcctgtgcccacttcctcctacagccctttgtacagcctcctattaacctaactgcgtgaaagtggccttgccttatctgctgcagtcgctagcagtaaagatgggtcgtgttcgttccacatcatacagacaagtctaggcagagagatgcctgcagagtcacagcctggtgtgcctgcttgctctgcttctcttccctcactcctgcccagctcccaagtccagatccaccctttttttcctttttatggcttcaaaggaagaaagcaaggacaacttgggaaaagataaatgttcattcctgtcttttcctcactgcatatccaaccatcatcacctctggaacagccaggacctgaccattgttaccatctcttctaccaccaccatcctcyctccatccccagccacctcagcaaccattgatctggccttgctgcccctactcttgtcccttgtaatggagatcggctgctgcccaccccacttcccctcgtttaggggcttaacccgcraccacatagtcctgtgcctgtaggaagctgacccaccccctagctccagrcaaagggggtgatgcatctcccttctaaatagttggttcaagaatgggtgtgcgatgtcgtccaaacagagacttcctggaggcttctgggaaggttcttttttttttcctctgttgcccaggctggagtgcaatggtgccatcttggctcactgcaccctctgcctcttgggttcaagcgattctcctgcctcagcctcctgagtagctgggactacaggygcgtgccaccacacctggctaatttttgtatttttagtagaaacagggtttcaccatgttggccaggctggtctcaaactcctggcctcaagtgatccacccgccttggcctcctaaagtgctgggattacaggcaagagccaccacgcctctcctgagaaggttcttcctcattcttcaaaagtgctcccataaggaatcagtctatccccttggccaggaagtgcaaagcaggtagccccatgtgtatcagacagccccccagaccacctagacactccagtactcagaatgaagtgcgatctgtggtcagcagagctgagaacagaacccaatccttgacagcatcacagaacttgatccagggctgaatcaaccagctctggagtctgcatcacttctgaacttcccrtttaaaaggccagtaaattttctaaatgaccaggacaattttctatcatgagcagccaaagacatccaattcgcacacctctaaactattatccactcagcagtctgggtgagcttttcaaaggggatcaggtcatgtcagtctcccttctagggccctccatggcttcccacagcaaccagaatcaaatccagacatcctactagaattcagcattgtcggacccaccttccccacctccaaccaagccccctaccactcaagccaaccacaacaatttctctcttcttcagatactccagactagttcctgcctcagggcctttgcacctgctgatctctctgcctgcaatatttctcccatatctttccatggttgcctccttgccattactcaggcctcagttcaaataataacagggctttcttgatctcctgtccacaaaagcccctcccctctcctctaggcatctgccctcacctcactttttaaattttctttgtagcacttatcacactttcaaatgatcagctttggccgggcgcagtggctcatgcctgtaatcccagcactttgggaggtggaggcaggcggatcatttgaggtcaggagtttgagaccagcctggccaacatgatgaaaccccatctctactaaaaatacaaaaattagccgccgtggtggcacacacctgtaatcccagctactcgggaggctgaggtaggagaatcgcttgaacctgggaggcagaggttgcagtgagcagagatcatgccactgcactcctgcctgggcaacagaatgacacttcgtctaaaaaaaaaaaaaaattggcaaggcgcagtggctcacgcctgtaatcccagcactttgggaggccaaggcaggcaaatcacctcaggtcgggagttcaagaccagcctgaccaacatggataaaccccacctctactaaaaatacaaaattagccaggtgtggtggtgcatgcctgtaatcccagctactggggaggctgaggcaggagaatcacttgaaccctggaagtggaggttgcagtgagccgagatcatgccattgcaccccagcctgggcaacaagagtgaaactcctctcagaaaaaaaaaaaaaatggtaggccaggcacagtggctcatgtctgtaatcccagcactttgggaggctgaggtgggcagatcctgaggtcaggagatcgagatcatcctggctaacatggtgaaaccccatctctactaaaaacacaaaaaattagccaggtgtggtggcagtcacctgtagtcccagctactcaggaggctgaggcaggagaatggcatgaacccgggaggcagagcttgcagtgagccgagatggtgccactgcactccagcctgggtgacagagtgagactctgtctcaaaaaaaaaaagtaaatattattttattaccttattactttattacttattattggttaatcccttcttcatgtgccaggccccccactgggaatgggagacaagagttgaccaaggcaagcaccagccctgttcatagatgttggagtcaatagagggccactaacatggtttggatattgttccctcaaaatctcatgttgaaacgtgatccctaatgttggaagtggggcctagtgggaggtgtttgggtcttgggggcggatccctcatgaatggtttgctgctcttctgcagtaatgagttcacatgaaagctggttgtttaaaagagcctggcacctcctccttcmtctcttgctccctagctcttacttccacttgccatgtgacgtgcagctccccatttgccttccaccatgattggaagcttcctgaggcctcaccagaaaccgagcaggtgttggtgccacatgcttgtatggcccacagaactgcgagccaaataaacctcctttctttacaaattacccagccttggctgggcacaataattcacatctgtaatcccaaaactttgggagcccaaagcagatggatctcctgaggtcaggatttcgagaccagcctggccaatatggtgaaaccccatctctactaaagatacaaaaaattagacrggcaaacctcatgagacatgaataaacagccaggggagttcttgatgaaaaaagaggctgctggttgttggtaagagaacagcaacagggtggatgcaaaacagctgccatgccccatttctcagccctcaccctaccatgaggctgcaggaatagctttcctggaatggctggctggttgcaaggtgggcaagatgacccttgtcctccaaaaattggggcatttttgagtcctgagggattagcacagactcctgtattggtttcagccctcttgtgcttcctatggcagcatccatcaggagatttgaaagtaaagaacacctttttgtagccagaaatttacagatatcatttccaggtcactggttgcctgtaaagattatgaaacaaaaacatcagtaaccacatgcaataaggactacacactttgcaaacatagtttggaaaagtctctaaacaaacagatggctgcaaccctcaacaagcaaaaatcagcaatccctgaagaggaggagaatctgattttcagagttactacaataatacccaaaatgccaagtgctcaacaaaatattacaaagcatacaaagaaaaaggaaagtatagcctattcacagggggaaaaaaagaattcaatagaagccatccccaaggaagcctttacattggaaacattagtcaaagacattaaatcaactgtcttacacccaatgagctaaaggaaaccaaaataatatatgaacaaatagggaaggccaatraagagatagtttaatcttataaaaaggaacaaaatagaaatcctggagccgaaaagtacaatagcttgaacttagaaattcactagagagatcaaaaagctgatctgaagaatcaggaagaagaaagaaccagtgaacttgaagataaggcaattgaaattgtccagttgtaaagagagaaaaataaataacgaaaaataggctggccatggtggctcatgcctgtaatcccagcactttgggaggccgaggagggtggatcacttgaattcaggagtttgagatcagcctggccaacatggtgaaaccccatctctactaaaatacaaaarttagccaggcattgtgacrcgcacctgtaaccctagctrctggggaggctgaggccagagaatcacttgaatcaagaaggaggaggttgcagtgagccaagatcatgccactgcactccagcctgggcaatagagtgagactctatctcaaaaaaaagaaaaggaaaaatgaacagagcctgatagatccatgtgatgccatcaagcatatatcaacatatgcatagtagaagttcctgaaggagaagaggaacaggaagggacagaaaaagaaatttgaagaaataatggctgaaaacttcccaaatttgatgaaggatatgaacatacacgtccaagaagcttaacaaattacaagcgcgagaaactcagagattcatactgaaactcacagccagattgtcaaaaatcagaaacaaaaagagaatcttgaaagcagcaagagaggaacaacttgtaaggtacaaggagtcctcagtaacattaatagctaagctttcatcagaaaccatagaggggctgggtgcagtggctcaggcctgtaattccagcactttgggaggccgaggtgggcagatcgcctgaggtcaggagttcgagaccagcctgaccaatatggcgaaaccccattctactaaaaatacaaaaattagccagatgcggtggtgggcacctgtaatcctatctacttgggaggctgaggctggagaattgcttgaacctgggaagtggaggtttcagtgagccaagattgcaccactgcactccagcctgggcacaagagcaaaactctaaaaaagcaaaactccatctcaaaaaaaaattttttttaagtgccgggcacagtggctcacgcctataatcccagcactttgggaggccaaggcaggtggatcatgaggtcaggcattctagaccagcctggtcaacatagtgaaaccctgtctctactaaaaatacaaaaaactagccaggcgtggtggcgggtgcctgtagtcccagctacttgggagactgaggcaggagaattgcttgaacctggaaggcagaggttgcagtgagccaagacggcaccatttcactccagcctggatgacagtgtgagactccatctcaaaaaaaaagaaaagagaaaagaaaagaaaagaaaagaaaaggaaccagaggcccagaggcagtgsaataacacagttaaagtcctggggaaaaaaaaaaaaaagactgtcaascaaraatttcctaccagacaaactatccttcaggaataaaggagaaattaagacattttcagataaataaaygcagagaaagctcattgctagtagccctgctctacaagagctgctaaaatgaatccatcaggctgaaatgaaaggaaacttgatagtaattcaaagccatgatgagaaaaaaaaagaacactgataaaaatagtaactacatacatcagtaaatataaaagccagtattattgtaggttttgttcataatactttgtttttcacctatcatttaaagggcaaatgcatgaaacaataattataaatctatgttaatgggcacagaatgtataaagatatgatctgggacaataataatataaagagggagggaaagagatgtataggagcaaagtatttgtatactcttaaaactaagttagtattattcaaattagggtgttataaatttaagatgctaattgtgatccccaaggcaaccgctaagaaaataactaaaaaatatacagacagggaaagaaaaaaggaatcaaaatgatacactaaaatctattaaataccaaaaaaatgtagtagtggaggaattgaggaacaaaatttaaaaaatgtacagaaaagcaaatagctattaaataaatggcagaattaaatcctttattggtaattactttaaatgtaaatggactaaactgtctaattaaagggcagagattgatagaatggatttctaaaaattattaatttatatgctgtctgcaagagacttactttggatcaaaagattcgaaaggatggaaagtaagaaaataatatgggcatgttggcttatgcctgtaatcccagcacttatgctaccaatcccctgggaagccaaagcaggtggatcacttgagcccaggattcaagactatcctgagcaacatagtgagacctggtctctaaaaataaataaataaataaataaaattaaaaaaaaataagccaggtttggtggcacatgcctgtagtcacagcgacttgggaggctaaggcaggaggattgcttgagcccaagaggtcgaagctgcagtgagctatgagctcaccactgcactacagcctgggctacagagcaagacctcatgtcataacagagaagaagagatctgaacagtagcatgtgtgtacacataagaaaaaccacgtgggattgtagtgagaaggcagcatctgcaagccaaggggtgaggcctgagaaaatatcaaccctgctgacaccttgatcttggacttccagcctccagaattgtgagaaaataaatttctattgtttaagctactcacttcgtgataaagtgttatcatggccctagcaaactaacatatcaataacctaactatgtggcttaggtaactagaaaaagaagagtaaactaaaaccaaagctagcagaaagatggaataaggccaggcatggtggctgatgcctgtaatcctagcaatttgtgaggccaaggcaggtggatcacctaaggtcagaagttcaagaccagcctggccaacatggtgaaaccccgtctcttctaataatacaaaaattagccgggcgtggtggcaggcacctgtaatcccagctacttgggaggctgaggcaggagaatcactggaacctgggaggcagaggttgcactgagccgagatggcaccactgcactccagcctgggtgacagagcaagacttcatctcaaaaaaaaaaaaagggaagaaaagaaaaagaaagaaggaataacaaagattagagtggagaaaaacaaaacagaaaacagaaaaatgatagaggaaatcaatgaaaataaaagttgattttttttttttaaagagatcgagtctcactctgttgcccaggctggagtgcagtagcacagtctcggctcactgcaacctccgcctcccgggttctagcaatgctcctgcctcggcctcctgagtagctgggattacaggtacacgccatcatgcctggctaatttttttgtattttagtagagatagggtttcaccgtgttgcccaagctgatcttgaactcctgggctcaggcaatccacccacctcagcctccaaaagtgctaggattacaggagtgagccaccacacccagtgaaaagttgatgtttttaaagatcaacaaaattgactaagaaaaaaagagaaaagagtcaaattactaaaatcagaaatgaaagtgagacagtactgttttgcagaaataaattggataatactataaacaattgtactccaaaaaatcrgaaaaccttagatgaaatgtacaaatttttagaaaaacacaaactaccaaaactaactcaagaagaaatagaaaatctgattggatctataacaagtaaggatattgaatcagtaatcaaaaagtttccaacaaaaaagcgcagraacagattgtttcaagatgaattctactaaacatttaaagaagtaacacaaatccttctcaaactcttctaaagattgaagaggaaagaacacattctatgaggccagcaagacaaagacactgagagaaaagaaaactgcagaccactgctccttatgaacataaacacaaaaattctcaacaaaatactaacgaatttggcagcgtatttgtaagattatataccatgaacaagtggaatttattccagagacacaatggtgattcaccatataaaaataaatcgatgtagtccgggtgtggtggctcacacctgtaatcccagcactttgggaggctgaggcgggtggatcacctgaggtcaggagttcgagaccagcctggccaacatggtgaaattctgtctctactaaaaatacaaaaaattagctggatgtggtgatgggcacctgcaatcccagctactcaggaggctgaggcaggagaattgcttgaacccrggaggcagaggttgcagtgaaccaagatcgtgccactgcactccagcccgggcaacaagagggaaactcagtctaaaaaaaaaaaaaaaaggaatgaaggggggaaaaccacataataatctcaaatgggcctggcacrgtggctcacgcctgtaatcccagcactttgggaggccgaggcaggtgaatcacctgaggtcaggagttcaagacaagcctggccattatggtgaaaccccatctctactaaaaatacaaaaattagccgggtgcggtggcagacacctgtaatcccagttacttgggaggctgaggcaggagagtcacttgagcccrggaggcggaggttgcagtaagctgagatcacaccactgcactccagcctgggtgacagaccaagactgtgtctcaaataataataataatmatcatcatcatcataatcatcatctcaaatgatgccgaaaaagcatttgacaatatccaacatcaagataaaacacttagtaaagtaggaatagaaacgaacctcttcaacgttatwaggaccatataagaaaagcccataactaacataataatgagagactgaagatttttttcctctaaattgggaacaagacaaggatgcccacttttaccactactatttagcgtagtactaagagttctagtcacagcaactaggcaagataaagaaatgaaaggcagccaagttagaaaagaagaagtaatattatctctcttggtagatgatataatcttatatgtagaaaatcctaatgaatacccacccaacacacacacacacacacacacacacacacacacacacaactgttagagctaataaattcagcaaagctgcaggatacaaaatcaacacacaagaatcagtttctatatagtaggatatatatttctaagtagtaggaaacaacaatctgaaaagaaaattgagaaaacaattccatgtacagtaacatcaagaataaaatatttagtaaaaaaattaaccaaggaggagcaagtttgtacatygaaaactacaaaacactgctgaaagaaattaaacagaaatatacagaagaacatcttgccttcatggattggaagacaatattgttaagatgacaattgttatgggctgaatgttagtgttcttccaaaatgcatatgtcagtgccctaaccrccaatgggactgtttctgaagatagggcctttatggaagtaattaatgttaaatgaaggtggggccttggttcaataggattagtgtccctatcctggcagagataccagagagctttctcttgctctgcatgcaaggaaagaccatccaaggacatagtaagaaggtggtcatggacaagccaggaagagaaacttcatgagaaactggcttttccaacaccttcatcatggayccttagtttccagagctgtgaggaatataaatttctattgtttaagccacctgtcatggtattttgttatagcagttcaagcagactaatacaacaatgttctccaaagccatccacagattcagtgcaattcctatccaatcccaatggcattttttttgcagaagtaggcaaactggtcctaaaatttgtatggaatttcaagagaccccaaataaccaaaataaccgaaaaagaagaacaaagttggaggtctcatacttcctgatttcaaaacttactacaaagctacagtaatcaaaatactatgaagccaggcagatggctcatgcctgtaatcccaacacattgggaagccaaggcaggtagatcacttgaggtcaggaattcgaggccagcctggccaacatggtgaaaccctgtctgtactaaaactacagaaaaaaaaaaaaaaaagacaggcatggtggcagytagtagtattcctgtctactacttgggaggctgaggcacgagaatcacttgaatgcaggaggcagaggttgcagtgagccgagatcgcaccactgcactccagcctggatgacagagcaagactttgtctcaaaaaacaaaaaaaacaaaaaacattgtggtctcagatagtcatatagtccaataggctagaataaagagcccagaaaataaaccctctcgcgtactgatttttgacgagaatttcaagaccattcaataagaaaaggasagtctctttaataaatggtgccttacataagaagaatatatatggaaaaggaaaaaaaaaacacaaatggtgccaaggaagctggatatccacatgcaaaagaatgaagttgaacccttgccttacactatgaataaaaattaactcaagattgatcaaagacctgaacgtaagacctaaagtcaaacacagaagaaaccataggggcaatcatgatcttagatttggcaatggtttctcaaataggccaccaaaagcacaggtagcaaaagaaaaaaactgtaaattggatgtcatcaaaattaaaaacttttatgcatcaaaggacactatcaaccgggctcattggttcatgcgtgtaatcccagcactttgggaggatgaggtgggcagatcacttgaggtcaggagttcaagaccagcctggccaacatggtgaaaccccatctctactaaaaatacaaaaaattagcctggtgttgggtggcacctgtagtaccagctacttgggaggctgaggcaggatagtcacttgaaccctggaggcagaggttgcagtgagctgagatcacaccactgcactccaccctgggagacagagcaaaactcagtctcaaaaaaaaaaaaaaaaagagacactgtcaagagagtgaaaagataacacacagaacgagaagaaacacttgcaaatcttgtatcttatatataagggtttaatatcaagcatatatatattgcactgtttttttgttgtcattgagttgtaggagtttcatggaaaaccccaaaatgagcaaagaacttgcatagctatttctccaaagaagatatacaaatggccaataggcacatgaaaagatgctcaatatcactaattattagggaaatgcaaatctgaatcacaatgacagaccatctcacagctgctaggatagctattattttttatttttttattttatttctttaattttttgagatggagtctcactctgtggcccaggatggagtgcagtggcactatctcagctcactgcaacctccacctcctgggttcaagccattctcctgcctcagcctcccaagtagctgggattacaggcacctgccaccacaccccgctaatttttgtatttttagtagagatggggtttcaccatgttggccaggctggtctccaactcctgacctcaagtaatctgcccacctcaatctcccaaagtgctgggattacaggcatgagtcaccgcacccagccttaaatttttttttaattaatggaaaataaatgttggcaaggatgtagagaaattgaaactctctttcattcctggtgggaagataaaatggtacagccattctggaagacagtttggcagtttcttacaaagtcaaacatagacttatacaacccagcaatcacaatcccaggcattacccaactgagttgaaaatttgtgtcaatacaaaaacctctatgcaaatattcatagcagcaaagcaagaacacggtttcagtatacatgtgtttagtgaccatgataatgtgcaaaccaagaattgcctgttttgaatgtgttacttcctgtcttggagcctcactttctctaaataagaggaagagcctgaggattcctgagaggtttcctactttgctggtgaaggaacttgggagtctgcaaatgtccctaaatgagttctgggtgtcaccttgacctggcttcacacttagagttgccaggtttagcaaatacaaatataggtcattcgattaaatttgaatttcagataaacaacaagtaatcttttagtataagtatgtccatgtaatatttggagcacccttctaccgaaaagaaaattcatggtttatctgaaattcaaatttaatacagcctcttgtattttatctggcaatcctattcccactactgcccttgagagcctccccgcttcccctccacatccattctcctatgttgctttgaaaataaacaagcatcagggactgacacactgatttcaaagtccctgccacttaaatggatccctttcatctaccaggaactgaagatggaaacaagtgggcrgagacaaaagagagctgagtgaagggaggtggtggaaaggaaaggggcgtttcgtgacatcggcccagactgctgtctccactgaggctcaggggcctcagggttggcctcctgcactccttctcagccttggatgcatgttgggagctccgaaaaataatgcttgggcgtgacctgggcggtgggaagtttttaagcttctctagtgattcctcgaaacagcctaggctgctgttttcttgctgctagcaaaccagccaaactcagtggcaaaaatcaccgctcccagccaggcagccgggcagctctcattcagaggctcatgcagctgcggtcatcttgaaaacttctgcttgcacatatctggacttgagattaactgtcacctgggatctcagtagggcagtcaaccagatcacctgtatgtggccttgccttatagcctgggcttctttgcagcacgcctgttgagttccaagggagccagacagaagtggcatggccttttctaatctagcctggagtgtygtgtagtatcccttcagccacattctactcatcagaagcaagtcactaaggccagctcacattcaagagggatggaattaggccgggcaccgtaggtcacgcctaatcccagcattttgggaggccgaggtgggcagatcacttgaggtcaggagtttgagaccagcctgaccaacataacaaaaccccatctctactaaaaatacaaaaattagctgggcatgatggcaggcgtctgtaatcccagctactggggaggctgaggcatgagaattggttgaacccaggaggtggaggttgcagtgagctgagatcacgccattgcactccagcactctagcctgggcgacagagtgagactctgtctcaaaaaaaaaaaaaaaaaaaaaaaagccgggtgcagtggctcatgcttgtaatcccagtactttgggaggccgagacaggtggatcacctgaggtcaggagttcraaaccagcctggccaatatggtgaaaccccgtgtctactaaaataaaagattagccgggtgtggtggcatgtgcctgtaatcccagctactcaggaggctgagggagaagaatcacttgaacctgggaggcagaggttgcagtgagccgagatkgcaccactgcactccagcctgagcaagacagcaagactccatttcagaaaaaaaaaaaaaaaaagagggatgaarttagacttcatctcttgatgggacaaatgccaaggaatttgtgatcctatgtgaagaccaccacagctaccactggaataaagtctccagaatccattctcctgtctacactcccccagcccaagacaccatcactgctcacctgggaagtccagtagcctctgcagggtctccctgcctcccatctcccaccccaggctgtcctccacactgcagctggagtctcgagcccagagagtggagtccacggcccccacaagctggtctttgtgtctccaattcattcgcatcctcaagctcccaggcagagccagactcagtacaagcaggtgctctcccgagccatgcatgagcctagctcctgccagacaggcacgtcatcccttggtagggagccacaaaacttcccaacccccatcccttgctcctccttcaggacctgacccagacccctctccagggaagccttctctgagcatccccaaggtgggtcaagctcaacaccctggcctttcctttgcaatgtataggtcgtttcacacattttcttttaaccttgtactgcagtttaacacatatgcagaaaagtgcacaaatccttagcgaattttcacaaagtgagcaatcctgtatatccagctctcaggtcaagaaacagaacatttctaaggctgggtgaggtggctcatgcctgcaatcccagcactttggaagactgatgcagaaagatcacttgagggaaggagttcaagtctagtctgggcaacatagtgagacctcttctctataaaaaattttttaaaattagccaggcatgttggcacattcctgtagtcctggctactcaggaggctggggcaggaagatcacttgagcccaggaggttgaggctgcaaaaagctataattgtaccactgcactccagcctgggcaacagaataagattctgttgaaggaaagaaggtaggaaggaaggaaggaaggaaggaaggaaggaaggaaggaaggaaggaaggagagaggaagaaagagagaagatttttattcgggtaatgggtgcaccaaaatatcagaaatcactgctaaagaacttattcatgtaaccaacaccacctgttccttaaaaacctattgaaataaaaacagaaagaaagagagaaagaggaaggaaggaaggaaggaaagaaggaagattgattcctagaaccccaggagccctccaaggtccttttgttcaccatccaccatcccttcctccccccagtcctggtaaccactattccaacttccaatcctttggactagtgccatctgtttttaaacttcataccaatggactcatacggtatgtgctctggggtctggtttctgtgtccagtttcatgttagttcttgtagcattttaatcagagccggtcacataatttgtagtgcccagtgcaaaatgaaagtgtggaccatcccctccaaccccacccccaacaccattcaaaagttattaagaatttcaagatggcagctgcagagcctaagtcagtcacgggattcttctgagtgcacagccctgtgtaagtcacacacgcccacgaagccatcctgtttccagttgcctgtttggtcgagtgtctcttccttgagggcaagagctgtgctgggggaaagtcaccatctctgtggagtttcttcagccttcattcattaaaacctcacagaggccctgaggccaagaaggagggtgatcattataagcatcacacctgtttaattgatgcaatgtctagactgaaaatgccgcgggactcagccaaggtcccccagtgagtgagtgcaggggcggacctcacacacaagccctctggctctaggcagcctccccctgcctccagctctgccctagaatctactgcatgccaagtaccggacccaggacaaagggaaaaaagagttcctgcccaaaaggaactctcaattcaactggaaaacaaaaacaggacttacacacatgaagacattattaaccaaaacattttgtccttcatgtgcgggccttgtagctgcaagaattggaggctgtctctgcctaaccaagcaagaaggatcaacaagagagggtgcagcaaggtgtggtggctcacgcctgtaatcccagcactttgggaggccaaggcagggggatcacctaaggtcagtagttcgagaccagcctggccaacatggtgaaaccccgtctctaccaaaaatacaaaaattagccgggcgtggtggtgcatgcctgtgatcccagctacctgggaggctgaggcaggagaaccacttgaatccaggaggcggaggttgcagtgaaccgagatcacactgttgcactccagcttgggcaacaaagggagacttcatctaaaaaaaattaaaaattaaacaaaataataagagggggttcagagagcctggacaggaagctgagggcaggcagagctcctgggagccctagggagcagtggagccccaccccggctctcacaggggcatggtctggtcagtgtgctgctgttgcatctgtgcaacacacactccagccatcccatcagtcccggtatcacttgctcacaggacagcctctgattggctgagctctggcctggggctcaacccctggctctcctagagctgggagacagacggagggcctggcccctctgttctcacagtgggagggagggaattcctcagaaagaaatcaaggggtcatgaggaccagggatgaaagcgaggtggctaaaaaatgacagaaaccccctataatgcacgtgtttgtttagatcgccagtacaccgagcaacartggggggctcctgtccttgaaactgactttgcctgtgcttgtggaggaggctggtaaaaccattgtaaaaggtgagtccgcaagcacccaggtgtttgtgaaagtgtggtgtgatggttacttttagctgtcagcttgactgggttaagggatacccagatagcaggtgcaacattatttctgggtgcatctgggagggtgttttcaaagagattggtactcgaatcagtagaccgagtaaaaaacatctgccctcaccaatgtaggtgggcaacattcaatccactgagggcccaaatagaacaaaaagacagaggaaaagcaaattcactctcttctggacctgggacatccaccttctcctgccctgggacgttgaagctcctggttctcagaacttcaggctcaaactgaatgataccatcagcttccgtggctcttcaacctgcagatgacatactgtgggacttcttaggctcctaatcactcaggccaatctccattataaagcccctcttccaggtctatagctatgtctacagcgccatctgtatcttgttcattctgtttctctgactaatccatgtggttaaagtaaaatcctcaaacctcacactaacagcagagaagctataacactgtcaagcttcaactcaccaatgcatatgccagagccctcttagaaacgtggcttccttgaagggaagaccatgttgtcatcagggcagtgamctccaaggagcctgsaaaagagtgagaagacccactgggaataatgtggaaagaattcccatctgtgacataggagagaggcccagaatctggtggacgtgaagattccagttctatcttgtgggcagggacacatccccaggcctcacccagcaccctggggctggaatacacctctaacttgtatcctacctccagtcccagctaggcaggactatgatctgggaagtagattgtgggagccatgtcgtttgtgggtgacagctgcctattgctccctggactgagcaaaagaggttccatttgccctcactacctcctctttccagtgctaggcagggcaatatcagtggcgacgccatggggcatggttatgaaagtgggaaaatgcttgatcccacttgtgcaagcattttctactctgtgtgtgagtacagcagtcactgaacaggggtgggggccaggggctgctgctttgtgtccatgtatcagttagctattgctgtgcaacaaatacgcagcaatagctaaccgatacatggacactccaaagctcaatggctgaaaaaaaacaataatgtcttatttttcatgagtttgtgggagggctggagtgctgctggaggttggaggcttggctgaggcaactctgctccacatattttaccctcatcctaggacctgctgatttcgtccttatcttagagatggcagaaatgcacaagatggtatagagacactcagggcctctggaactggtgcactgtcacttcagcctggttctgttggtcaacacaggtctcatggccagcccagagtcacattgacagggcactgcaaagtgatgtggcaaagggtgtagataacagaaagaggtgatgaagcgaggccagtacccaagggtgaatggagctggggggcagaaactaggaagccagcttgatccatgccaggttgcaagggcaagttcaggccatgcacagaggagttgggagaagagtcaagcctgggggaaatcccagggaaggtacagagactaaggaggcagaaggccatggtgctggtggctgaaagtggcctggagcaagctggcagtaagcatgagtctcatcaacttcgccttgtgcccagaaagggcttgtgccagagtgcccaggcccataaaacaccacttcagggcagacctgttccaaagatccagagcaattttagatgtatctgtgtttctgttgttgttgatttttttcatttttgttgttgagacgaggtctcactatgttgcccaggctggccctgaacttccgggctcaagcactcctccctcctgcgcgtcagctgggactacaagcacgtgccacagcttgtatctgtttttattaaaaccatatttcctgaattttagccattcacattcaaattttattgattttttttgccatatccgcttgccacctatactaatatttacttaatatttttatttaaatcaactcatattttttgttgtcgttatttagtttttatttcataatcataaacttgactctacaatccagctaggcatggaagggaataaggaaaacttggagctcaaagggaactgcagtgagagcacaaagattataggatactgtgagcaaatggggtggaggagtgctctccggagctagagaaggaatggtcttgaggttaagataaaacacaagtcgactgggcacagtggcacatgcctgtaatcccagcactttgggaagccaaggtgggcggataacctgaggtcaggagttcaagaccagcctggccaacacggtgaaaccccgtctctactaaaaatacaaaaattagccaggcatggtggtgctcacctgtaatcccagctactcaggaggctgaggcaggagaatcacttgaacctgggaggcagaggttgcagtgagctgagattgtgacattgcactccaccctggatggcaagagtgaaactgtctcaaaaacaaaacaaaacgaacacaagtcaagcttattagagttgtcaacagtcagcaatggtgatcttcttgctggtcttgccattcctggacccaaaaccctccatggcctccacaatattcatgccttctttcaccttgccaaagaacacatgctcaccatccaaccactcactcttggcactgcagatgaaaaactgggaaccgtttgtgttgggtccagcattttccttggacaagatgccagaacctgtctgcttcaggatgaagttctcatcatcaaatttctccccatagatgtacttgccaccactgccattatggtgtgtgaagtcaccaccgtgacacataaaccccggaataattctgtgaaagcaggaacccttataaccaaatcctttctctccaatgctcagagcacaaacattttctgctgtctttggaaacttgtctgcaaacagctggatggagatgcggccccagggctcattgaagaacttggtggggttgaccatagctgatagtatggggcccctggaggcagtggcgatgtgtgcaaaactcaacttatatttttaatgtaaagatttaacttaataatattcatgaaatcattgacttctgtgcttgtttatatatatatatatatatacacacacacacacatacacacatacatatatatgtagattttttttctgaggcagagtctcactctgtcacccaggctggggtgcagtggcacaatcttggctcactgcaacctccacctcccgggttcaagcaattcttatgcctcagcatcctgagtagctggggttacaggcatgcgccaccacacctggctaatttttgtatttttagtagagtcaggatttcaccatgttgaccaggctggtctccaactcctgacctcaagtgacccacctgccttggcctcccaaagtgctgggattacaagtgtgagccactgcacccagctccaactcatatatatatatatatatataaaatggcacaatcttggctcactgcaacctctgcctcccaggttcaagtgattctcctgcctcagcctcctgagtagctgggattacaggcacctgccatcatgcttggctaatttttgtatttttgtagagacagggtatcaccatgttggccaggctggtcttgaactcctgacctcaggtgatccatctgcctcagcctcccaaagtgatgggattacaggtgtgagccaccgcgcctggccccaactcatatttttaatgtaaagatttgatttaataatattcatgaaatcattgacttctgtactagctgtatctttactaatgtcacagtaaaacaaaatataacctccaggacaaaataattttatgtatatatatatatatatatatatatatatatatgtgtgtgtatatatatacgtatatatatatgtgtgtatatatatatacgtgtatatatatatatatatatacacgtatatatatatatatatatatatatatatatatatatatatattttttttttttttttaagatggagtctcactctgtcgcccaggctagagtgcaatggtgcgatcttggctcactgcaacctccacaccccaggttcaagtgattctcctgcctcaatctcccgagcagctgggattacaggcgcccaccaccacgcctggctaatttttgcatttttagtagagacagggtttcaccatgttgcccaggctggtctggaactcctgacctcaggtgatctgcccgccttggcctcccaaccatctaggattacacgtatgagccatcgcgcccggccaattattcatattgttaaagaaagaaaacaagtcatagtaggatatttagagtgtgaatccatttatacagaaatcgaaaagatccaccactatatatttgaggtaaagtttaaaagggtcagccaggtgagatctggagtttgagaccaacctggccaacatgatgaaaccctgtctgcactaaaaatacaaaaattagctgggtgtggtggtggatacctgcaattccagctactcaggaggctgaggcaggagaaccgcctgaacctaggttgcagtgagcagagatcgcttcactgcactccagcctgggcacagagtgagactctctctcaacaaaaaggaaaaaagaaaagttgactcccagggagacatgcatccagctcaaatctgtctccctcctggctttaaggcagtcattttattagtcaagttttggggttggattagcaggtgattggtggaaggaagagggagatgggcagaatccttgaggattcatgattatcttctcatgctaacttatggttcgcgtgtgcaaattcagagggagttatctgaaacgtgatggaaattcaggctgtgatgtcagcaagctggttctgcacagactctagttggccacattcgttccaactgatttcagccagttttattatcttacgaatgaaaggagtttcagcatttcagcaagttgtttctttccttatctgctatcctgcaaactcaagaatttctgttacttactggttttattgttgttgttgttgttgttgttgttgttgttgtgagacagggtctccctctgtcaccctggttggagtgcagtggtgcgcaatcgtgactaactgcagccttgaactcctgggctcaagcaatccttttgccccaacctcctgagtaactgggatgacaggcatgcgctaccatgcccagctaatttttattttatgtagagacgggttctcactgtgttgtccaggctggtcttaaactcctgggctcaagcagtcctcctgcctcagcctcccaaagtgctgggattacagacatgagccactgtgcccagagttactgatttctttaactctttgaggcacaatttcagaaggaaagaaggatgaaaatattatggttgcaatagcagttactaagcaaaaaacaaaacaaaactaggacgaagactgcctgcctgtctaacataccaaaatccatttctcctggtttgctttgcaaggcttagtcttcagcggcaagacctacctgtgcagacactcatctggacccttctgtagctagtgcagacagcaggtgcagagtggctctcgaggaacggctgtgtgtcctgcacagaggcctcctgtgtggggcagggaggacagcaggaaccggacacaaacaaaactaccctgaaacagcaggaacaggcaattgcaggcacagcattgaggcatcggtcttactttgggaggctgaggcaggtggatcacttgaggtcagaagttggagaccaacctggacaacatcgcgaaatcccatctctactaaaaatacaaaaattaatcaacacaaatttgggagttcctgcaacacctctcagtgtcatcggtggagggtgtccaggttcttggtgccttgaacaaggaattggacaaaacacacaaagcaaggaaggaatgaagggatttattgaaaatgaaagtacactccacagtgcaggagcgggctcgagcataggggctcaagggcccggatacagaatcttcttgggtccaaatactccctacaggtttcccattggccacttggtggtcaactcgtgtaaaccaagtggtggcccgaaatctgtctgattggttgtggaaagcaaccaatgggaagttgaggcaatccagtcaggagtcaatctgggtttggcttttgttattgccatggtttccgtcagtgtaacactaggttcaaattcctctagaattaccttgtgcttcagatgggggttgagttgcttcagtgtctttctttctccctccctccctccatcccttctttccttcctcctgttatatgtaaagtttcagtgccgcaaaaccaattgcactcaaatataaaattttcttttaattctcagcaaggcaaggtacttccatagaagggtgcgcccttacagatagagcaatggtgagcgcacacttggacaagggaggggaaggggttcttatcc

SEQ ID NO: 97698 - DNA, 75159 bp, Homo sapiens
cactgaatccatgccaagagggaaataattgatttaactgatctaaaagtgtgtttgagctttttttcagacaaactgtcaacacacacatgaaagcaagattctaaaagtgctgtcagatccataatgtttatacagcaaagcaaacaacctttgttattccaattaatgcatttgctcatgaaggaagtctgatccaaaacgttttattttttctcagctgcactgaaaattataatgttgactcatattgaagcaatttagaaatgtactcagccacaaaatgaaaatggattaagtataatatttgttactagggtacctgctaaaaataacatctcaaaattatttattacatttcctttaaagggtttcaagtattgtcacgtgtatctacttatctctttgaagggggctaggcccataatagtattctcttaaacttacaaaccaatgatgataaatattaggagataaactgtgtatagggaaaataatgtggcaagatcagtttgttgagataccttggatggtgacctacaatactttacagtaattactctatctttttccctctattgtttaactctaaaacagggagtggagtttgggagttgaatgtcccaacacctgacaggtactttagtactttatagtctagttcaacactattagttttaccaataagaagtgaaatgatctgtttaaggacacattgctaagaggctaagatggaacatgaactcaggatatatatgtacatgtacatatacaaatatatacacatagataatatatagagagagtatatgtacgtatatatacacatatatacgtacatatatacatacatacatacatatatgtatatacatgtatacacacatatttaattatacatataattttgagacaaggtcttgctcagttgcccaggctgaaatgcagtgctgtgatcttggcttactgcaatctctgcctcccaggctcaggtgatcctcccacctcagcctccctagtagctgggactacaggcgcactccaccagtccagttatttttttgtacagacacattttcaccatgttgctcaggcgggtttcgaactcctggactcaagagatccacctgcctcggcctcccaaagtgttgggatttcaggtgtgagccattgcaccaggccatgattttttattccaaatactgagctttctctactacctcttgtgatcatgaataattattgagataaatccaacaagatcgggatattcaacagttaaaataattcaatgtttcaactaatagatgacatttttaaaaaagagtgggaagggaaaacactacatattaaaacagatgtattgacaaaatggtaagtgtgacttttttgatcctgatgagcataaaccaactgtaaaactacattcctgagacaatcaagggatattcaccacagagtgggtatttcataacagtaaggaattagtgctaattttgttagatatgttagtagtagtatggttgtgttaaaaagaagtgcttatctgttagacctatatactgaagtatttgccagtgaaataatctgcttatttactttaacatactcctgaaaataaattttaaaagtgcagagatagatgggtaaatgatgacaattgttgatcatcacagatgctaaggttatttatgttactctacttttgtgtatgtttgaagtttttcacacaaaattttaaaaatgtaattattgagcttgtacttcctataaaataccataaacatcctttattattcattgagtgtccaaattttttattttaaattggagacagccatagaagccctatatcatgaatctatagacttcaaaggtgctaactcatgcctctctaacctcactaatgactgctgtgctgagatgtaaaattatgctttgcctttaatatgtgtatacataaaataaaactgcactcttccctgtattgttgttacttgattctctagcttagtaactaaccctttctaaaattcaatttagcaaatatttttggaatgatataccaggttccactaggccccagaaacagcaagtggggtatgaacatatcatttgcatatataatatgtaaatataaatacatatatgtatctatctatatgtatgtataatgtatatgataatagaattgataaattctatattagctatattaaacatgtacaatggaaaacctaaaaagaaacatgtgatgaaaaacttaatgaatcatgcttaatgtcagaattatctttctattctatttaaaaatttacaaaatataaagaggtaatcaaagagtatacagccagaaaatgtagaaaacaggtattatagaggtatgttagataattaatttataaaaatattgttatttgtctggatttggggatgtttgtggcatttgtcagcttttataaatttgtagagagttgtttttcacttcaaattctcactttcatacccaattttgcatttttttttcccttaaagagattcccccacactgaataaacttcaggtgccacattctgaatctgcttggatatctatattttgtcaggcattgtcccgggagctaaggatacatcagtgaacaaaatagagaaaaaaggcctctcttcttttgtgaagtttagattctaattgggagaaacagacaaaaatataataagcacataaattaaatagtatgttacatggctagtgctatgtaaaaaagttgaggagggtcaggggatgagagtgcagggcagagagcatgagtgagataaaactgcaatttaggcctggtgcggtggctcacgcccataatctcagtactttgagaggctgaggcaggacaatcacttgagtccaggagtttgagaccagcctgggtaacatggcgagaccctgcttctaaaaaaaaaaaaaaaaaaaaaaaaaaatttaaaaaaaattacaaaaaaaaaaaaaaaaaagaaactgcaacttaaatagggtggccagggtagggttcaccaagaaggtgactgtgagcaaagacttgaaataattggttactgataataccaatggtgtctagtacagtatattagtttagtggtcttgcattaatgtcctactcaggacttattttagaatatttgaaggtaaaacaaccccaaagtttcagaagcaggagggtaaagcagcaatagttggaccagcgctaagaactgaacacctccctggggcactggtcttagagattggtactaaacaatagcggcgtgaaaccttcattggaagataataaaatgggaacattgcatttaccaggtcatctttaggggtgagacctccaagaggcatgacccttaaggagatctactctgattaactgtcgagttttctactgctgagtaggaagaggcaaatatggaaccttatcttgaagtgtccaggacaacagagggctgagtactgccaccaagagttgtccttcttacccacttaccattcaacctttcctctaaataaaagtcagaaaaacaacaaaaagtagtttaaatacttacaaatttataggatatattattggactgcccaagaaataataaaaatatgaaaatggaaccacaactgtgacaatttttaactttcttagagcaccatactttcttttggcataggcagctgcggtatagtaggcagactgaaggacaagtcagaactggatatgagttctgactctgccactttttagccctgggcaaatcagaaagggaaaaactaagttttatcatctataaaatgggaatgataatctttcttttatgacaattaaataattgtgtttaaatgaacttcttaatcaacaaagtatcatagatgtttcacatagtaacaaaactataaggtagtccacagtagctatgtaagaatcatagttatgaagtatataataatttaacttacagtatttatcaacaaatagttaagacagtacgaaatgctttgaaatctcaatttacagttagtctttatgtagcttcaagaaagcaatcatctaacttcaagtgaagacttttcaacatcttttaacgggatattagagcagaagacatatacatctcatacctcaaaagcagaataggtcttttcttactcacttgaatactgaaggaatgacccttaaccagatgaaagttcagcacaaaaataactggctattttctcaaaattgccagcgaggtagagtgattcctagatgatacttgtcagcaagaaagatgatctgaagaatgaacaaaaatagcctctgtttaacagctgtgatatctataatttataagctgtgatcatctctcatcagattgtcttgatgtttggatgagaatgaatgtttgaaatttctatatttagtacttatcagaaaacaaagttttgttgtgtcctattctttttgatcaatacatttcaatttacatataaacagtgttcaagagacttcatgtttgaggaatgtgaccttgaaactctactggcatgcagtgctataaatgtttgactaatccttaattacttatccccaaacagaatttttttttactgttttaaaattttttatttcattggcaaataaaaattgtatatatttagtatgtatatgttttgaaatatattgattgtggaatggctataagtcaagctaattaacaaacatattgtatacgaatctttttgtgtgtgtggtgagaagcaaataaactttaatcactgaaagacagaacaacattaaagaatgagacaacattaaaggaaggaaggaaggagggaaggaagggcgggagagaaggaagagaggcagagataatcgctttattacctaattctttgccagtcttttttctttttttttgtggggggagggtggggaggtcagtctttgaacacgctgcctaggcatcatgcttctaatttcctcttaccactcttttcacttctatatcacatttattcttcctttaatatgtgaccttatactggcctcgcccttcacaattcctctgtcgcttacgtattttactttctgtgggcagaacattgtttccctttccacgtctttcccatttccttcttgtacagctgtatcacatttcggtactatatgtttatataagcgcgtggtaaaactacatatttatataagcatgtgctaaaaaacactcgagcaaataccgtgactgagattttttggaaaactgtgggcaaattagttaaaattgagagctctggcggagagggtctcttccatctataggacaaaataattgggaattacagaataagtagaggaggacaattcaagagagcacagagctgcgtgcattctccctgtgccgcgacctgtatccaaaagcctcagacgagacttgaggagcttcctagaggctctcctgccactgcccctttggccagggcccttcccgcagtctcccctcccgattcttcccttttacagcccctcgctcccgacatgcgaggcccgtctcttcttccagtttgacttccaagtctttccattccctaggatcgggccccagtctcaccccctattttcacccccttcggttttcctcagaaagggcctcctgcctccctcggcaccctcgcctacccccctcgcagcacctgtcgcctccgcccctcactcggaccccgcgcatctggcgcagcccctcccgcactcccgcccagcgccccgcgtccccggcccccgctgtcgctgcttcgggttccgccgcaggagcctctcactcccgggagcgggcgcctcgcgctccctccctcggccccgccccgcccgccgctcgcccgttgcttcccacctgggcccgaagcgcccagcgccctctcccgggaccccgcgcccgccccgcgcccctcgcggctcggggtccgccccctcgcccgcagggcccgctgcactgtgggtaggcggcggcggcggcggctacgcggagcggcaggcggtggagcgaggccgcgcgcgccgaagatggctgagaagcagaagcacgacgggcgggtgaagatcggacactacgtgctgggcgacacgctgggcgtcggcaccttcggcaaagtgaagagttgagtacgcgctccggaccgctgtgcggggctgcctgacttgcgggaggccgaggggagaggcgggagccccgggcctccggcgggcgcggggctcggcggcaggtggagcggtcccgggtcgcgcggagctggggccccgggagggtggcgcgcaccgcctcgcctggcaccggcgcccgggccccacagggtccagggaagagggcgggggtgtgagctgaggatgggcgtcctgggttccaggttccgcgcccatctgcctttctggaggtcggagcaaggcacttctgtgttctctggacctcagtgtcctcctctgcaaaatcgggagaactggactcgttctgcgaggcgccttccagctctgagcctgtaggcttagggcggggatcatccacgctactgaggactgaggcgccgtttcgtgccgggtgccctgttaggtgctttacatggaatctcattgaatcctcacagtgacttggtcaacatgttgtcctcaccctaaaggtgagaaaactaggacccctagagatgtagtaacaagcccaaggtcacacagaaatggtcagtaccagagtgaagtctaagatgtcctccaattctggtcttgctgggaggtccctgccatccccagattccttcacgttccaggactctcggttgttgggggtgactgtttgggggatgctccaggggccagaggttgtgagtctttcttcctggggtgttgtttaacgctggaatgcagctggattgggtcagaggttaattaaaacagagaggtctgaaggtgtttgtgtttgtaaaatggctatgggaagacttctagggtaagggagagaaaaagtttccttggtgtttggaggatttgaggctgaggaggtcaggactgctaaggcatattctgctaaggtctgtcttcatggagataggatccccttttgratgtagaaaaacaggctgcttttgaaatgttatactttattcgagttaagtaactagtaagaatagttaagtatggaactttcatttgttttcttttttgttaattagtcacatgkgatttaattaacctgccttctctccagaatagagacagttgtttattaaaaatactttgttgcaaatccagaattataagtgaaatattgacctttattttttctctttgctgaagaaatgctgggtaggcagtctggaaattttattctgaggtctctatttccttgtaaaattcatattttaaccccaagtcaaggctgttgaatgagtagaagagactcatttttcattcctttggtaagaatcagctcctgttttcttgcacatatttaatactcattcatgtgttcaaaaaacgctgagcacctgcaacgtggtaggcactgttctaggcaatgaggatacagcaaggaaaaaacagatctttttgtttagctttctagtaggagaaggcagacagtaatcagawtatatatgtaaaaggtatgtttaattttattgagaaaaacgaatcagggaagggaagatagagagtcttgtgaggttggcagttttcaataaggtggtcagacaaggtggtatttttgcaaagacctaaaaagtttgtaaaattctttgctgtcctgtgagggttataaagtcctgggttatttttgaaagaccttataagtagagtggatagttagaatgtatttaagatgaatacaggacaatccagggattggattaatgcctgtaatgttacttgtcatttagtattattattaaggactattgtgttacaacattatacagttgctcaagcaaacagcgcctttgacatttggacatgtacacrcaaagttatataacttaaccctatgtcctttcatattgtgttaaaagtttttgcttgtctttttaagttcatatactgtaatctgaatgtagagtagaatactcatcagatcaatcagtccattgccaaagacaacttaaatctcttgtatgtacttttgaattgtttccaggcactggcttcttaaaatataaacagaaagaactttgatttatgagaaattcttttcctggagaacctctgtccaatgaacaaccagttgaaggagttttcctaacactgtgttagatcctctcaaaagtgataccatggtttcctatccaagattaggattagtacaattgttactcatataattcttcaagggacaagcgaaacaaaaagtcatgttttttttttttgttagaaaacagctttatggttgggcactgtggctcacacctgtaatcccagcactttgggaggctgaggcgggcggttcaattgaggtcaggagtttgagaccagcctggccaacatggcgaaaccccatgtctactaaaaatacaaaaattagccaggcgtggtggtaggcgcctgtaatcccagctactgaggagtctgaggcaggagaatcacttggacccgagaggcagaggttgcagtgagccaagattgcatcactgcactccagcttgggcggcagagcaagactccatctcaaaaaaaaaaaaagaaaagaaaagaaaacaacttatttaggtatattttatatatgaaattcatccattctaagtgtacaattcagtgatttttactaattttgccraatgttgcaaccatcattatagataggttttaggacatttgaggacaccacagtaagattctttatacccattcacagttaatctcatttctaccctcagtcccaggaaatcactaatctgttttctgcctgtataaatttgctttttctaggctcttcttcataaacgtgatcgttcaatatgtcatcttttgtgtmgagcttctttaacaatgcttttgagattcatgcatgacatagcatgtgccattaatttgttcctttttatagttgaataatattccattgtgtggatatgccacattttgtctatacaaaaccagttgatggtcatggtttcaagttttgggctattataaataatggcactacgaatattcacatgtaagtctttgtgtggacatatgttttcatacaccttgggtaaataactagaagtagaattgctgggtcatatcgtagttttatgttttactttttgagaaactgcaacactttcccaaaatggtcacaccattttataacattcccatcaaagatgtatgaaagttcccttttctgagtatctttgccaacatttgttattgtctgcctgatttattatagccattctagtgggtgcgaaatagtatctcattgaggcattaattttgygtttccctaaggactaatgatgttgaacattgtctcacrtaattactagtcatttatgtattttcattgatggaatgtctgtttatatctcttgcttattttctaattgggttacttgtcatcttataagttgagttgtgaggattctttgtaaattgtggatacagatcctttaatggatatattttgcaaatattttcttccagtytgttgtgtcttttcattttcttgtgtcttttgaagtataaaagttttgaattttcatgaggtccaatttattagtttttaaaattattttatggactatgctcttgatgtcataggcaagaaatctttgcctagcccaagtctcaaagattttcttttatgttttcttgtaaatattttattattttagccctgatgtttaactatgtgatctattttgagttaattcttatgtatggtgtgagatgaggttgtaaggttaactttttccatgtggataaccaattgtctcagcagtttttgttgaatgcaggtgcatttttaattgttgtagattttagacattgcaaaatgaatttctactaaaaaagctaataggagatgatgtaattttaaaagcttggccaggtgtggtggtccatgcctgtaatcctagcactttgggtgaccaaggcaggaggatcccttgagcccaggggttcaagaccagcctgggcagcatagggagaccctgtctttgattgattgattgattgatagaaagatagatagatagatagatagttagataaatggttataaaaacatggaaatggagaagtaaggaacattttatgtgctttctctcttgacttttttcctttttcttatttgtttattaattagttttttttagggactatgttgaccaggctgttctcaaacttgtggccttaagcagtctatctgcctcagcctcacagtgttgggattacaaatgtgtcccaccatgcccaactttgactgttatgctaattatagatttagaaattttaggccaggcacggcggctcacgcctgtaatcccagcactttgggaggccgaggtaggtggatcacttgaggtcaggagtttgagaacaacctggctaacatggtgaaacctcatctctactaaaaatacaaaaattagccagctgtgatggtgcgcgcctgtaatcccagctacttgggaagctgaggcaggagaatcacttggacccgggaggcggaagttgcagtgggccgagattgtgccactgcactccagcctgggtgacagagcgagactccgtcttaaaaaaaaaaagaaataaagaaattttaacttcagttgttgatatatcaatttatggaccaaagttagggacaaaaagcaaaaattgaaaatggaatagttttaacagcagtagttttaatttgttttttaaaagtatatggaaatctttgtatttgttaataaagccttatttaaaatgttttaaattttgtccttcattagtctattgtattatcaggttgmtgagggactgtttttggaaacagattatatgggctgacagagtttaaaagtaatgctttttatctatttaaaatttttctctatattgactgttcaggctctcactctgggtagggtaaaactgttagagagttcttgtaattagacttgttcatttcttatctaacttctctaaaggtgatagaaattctagaagaatggtcctgttgtttgtgttatataaagactgattgaagaaacaaaattatagtgctaattatttatttaaaaagaagcctgcattttcaagatgagtagtagtatatatgtggtttatgatttaaacaaatttttttcaacattttactccagaaatatgtttacccatatgtggtttatgaaataaatattcttcattggaattgtacaccaagggatacttaggttctttcttgtcggcaaagtctcacgaagaagttaccctttccatttttcaaatagttacatgactggcctacagactgctttcaagaaattaagtaaatattttactaattccccacttgtttttgagataacaggaaggataaaccaaaacttaaacaaacaaacaaaaagtgttaccttattttgaaatgtaaatatcaagtcctaaatgataaatcaaatttcacacaactctcccatcaattgatggagctaaaagttatgtctgtggtattttggtcccttgcttgacttgtgtgctagtgtggaagccctgaacaatttaactccctgggccttgttttcttcccctcctaaaggataacactggagtagcgaatctgtgaggtcctttacaatgctatcattaaaccgatttttaaaagatttaactccaaaaaaatgggtatatttaattattcatcctggttaatgaaaatttgagttcctgaatctgaaatgtagatgtaatgtagaacaggggaaaaggaaacatattttcaatacttcagtgataaaaggtacaatttgattaagttgttactatattctaatcactgtatgatatatgcacttgatttttttttattcccagagtaatcctctaagtttggtattatctccatttaacaaatgaagaaattgagaatcagatactttragtaacttgtccaaagttccagtgctattaagtggtagagctagcaatcaaattcagggttctcagactgcaaagtctctgctctatggactgtaaagtcaaaatgcctagtatgttctgagtttcaaacytacaaggatataattttctatgtctgctcatatttatcagaattgagaaaataagatttaaatgtctttcagtccatatttagagataaataacgttttttgaaatgccatatatagatgattaaaatttatatttttacttttccaacatttacttggatgcctcaatctttcatttcttattataaaatgtgctgaattctaccagttttaacccatgtttattagaaatactagtgatttcagtgtgtttactgatatgaaagtaatcttttttttttttttgagactagtctggctctgtcgcccaggctggagtgcagtggtgctatctcagctcactgcaagctccgcctcctgggttcacgccattctcttgcctcagcctccccagtagctgagactacaggcgcctgccaccacgcctggctaattttttttttttttttttttttggagacagaatcttgctctgtcaccagtctggagtgcagtggcgcgatctcggctcactacaacctctgcctcctgggttcaagcgattccactgcctcggcctcccgactagctgggactacaggcgtgcaccaccacgccctgctaattttttgtattgtagtagagatggggtttcaccatgttggccaggatggtctcgatctcctgacctcgtaatacgcccgcctcagcttcccaaagtgctgggagtaaaggcgtgagccattgcgcccggcctcacccggmtaattttctgtatttttggtagagacagggtttcaccgtgttagccaggatggtcttgctctcttgacctcgtgatccacctgcctcggcctcccaaagtgctgggattacaggctataaaggtaatcttgactagtgattgccagtaacctttagtaaccagactaaagagaacttgtacaaatgatttgatgttctagaagaaaacattggtataagaaggtattagctctggaattaattccatttctactaccagttgtctcacctttgggaaaaaccattagatgctgagcctttgtttcctccttcgtaatatggcaatgatcatacttgtcctgcctaccttctggaatagttatgaagatcaaatgagttgaggtatataaaatggctttggaaaagataaaatgctatacagatagatgacacttgtggagatggtgagatgcatggcaattgtaggtaaattctgcaccctgtgttagaaagtacttactttccattgaaatgccttcagttctcacaccaacattgagatagagctgtagtaatctgcccctattttgtggttgcctaggttgaagaaagctcttaatgactactttatctgtgctttatgatacttattaatgtttatattaaaaacaatatcctgtatgactaagtcatgtaatttgctttttcccaaatatggaagatgaatgaaacaagaatgaaatggaagtaatagttaaataaaagtgaatgtacacacattcacagtaaattgattttacttttgaaattatgcaaattctaaacaagtgttaaatwttggttccaaataatgaaattatgtttcttctcaaatactagattagtgattgaattaaaatcagttgaattattctcacaattaggtaaatacgtgctatttaggtttctcttgctgatatatatagatatatataatatatatataatttatatgatttttgaattgtgtccttaatatctgaatggattttgttcatttggtgtagccagttgattgactttcaaagggtattttaaataggaaacaatgttataaatggtagctattttcatagtatgtccacaaaggcagcctgatgtagtataaatactctctgtagtatgttgaacttagaagacctggtgtggaacctttgttttgtcataaaccagctatgtggtcaaactcaatctgtaaaaatgggaataataccatatgttctcttctagtgttgtgagaagtacatgagaaaatgtacatagatgaaaaagcactcagaagtacttatgtacttttgtgtatgtagacaccattatgtacttaaacccacaattagctgaactatgagaataatctgtgatctggttctgagaccagaaatttattgatgagagagagggaagaattcactacctcctgtcttgttttactctggtcttatttctgcaaatgaatgtgttcagaaacctgtaattctctagaagctgctcacttttcaccatcttctgtgcatcacttggaaggcacaaacacattatatatattttgtatacatacatatatatgtatgtatgtattccagatcccatggtatccatcatagaaactcttggaggaaagaggcataagctgggaagggggaaagtgtgggcagcagatggcatttagtatgaatgggtcattttaaagtcctggtccacttgtagtagaaccaaaatgaggctatacatatattttcagtwcagataatacactctgagctaaaaatgcttttctaccaaactttatcttaacatatccatataaattagaaaggattttgtagtttggtcatatattgaggtaattacctcagttccatgagctttctccctttttcatgctgacacaaccatgctttatcttgcttctttttgtaaaaacatcccaaaatgtccacttaccttgtggtccatgttagctttcttgaaagcatttggtactgctttgtaataataataccaccccatttattcttctgagattcctgtggtttcctaaatgatagagaaaatattttgtagaggaagtattaataatktttgaagccaagcagataatttaatttgacctagcaggaagatctaatctcaaatcctttaagaaataatgagtaagtggctggcacaagacccttaaagcattaaatatgttataaaaatgagagcaaatctacctagtgtatttatcaactacaaatataagagaaatgtaaaccttaaatcaggcttttatttttatctgttattgaagtgattgaaatgcgtatgaaaagcaatgtgtttattttgaaatatgatgaacctttttatttttagtatggtgttattaaggaaagaatttcaggcagttatctctgctaataatagaagccttcttcaccccttcaagggaacagtattcttgcttaagtggtgtcttatgtttggcagtgtttgcctctgataaattttatgtatttctttgggtggtacctttgtttttaaaatattcataattctctttttaatctgccattagatctttttaaacagccttttatatgattaaagataatttataaaatcttgctatatgtctcttactctgaatgttagtatgttattaatatactttgttttwtcagaatcatttttcttcagattatatatactattaaaacaagaacagtgtgttcttattcaacatctcagtttctaaattrtaaatgaattataaggtaagttaaactgactgtcataaaacaatagatctaacatttttaaatataccatacttttttttttctaaatgcttgttttacttgggcaatatgataagtataagttattttcattttctttttaaaaaaatcattttactgtttctcacaatgtatgtatttatataymtayatatatatatatatatatattttttttttttttttttgtagagacagggtytcactgtattgttcaggtagtctcaaactcctgggctcaagtgatccacctatattggcctcccagaatgctgagattatagacatgagccaccatgcccagcttttttttttttaatgtgtttgagtataagttggaactatatggtgttccataattgattccagtttttccagtcttaattaatggaataatacaatcaatataaagtatttgctgtgtttagtcatacgggattttaagcaaaatgttttttaccagtgttcatctgctcatgagggatcttctcctatgacccaaacacctcccattaggccccatctccaacattggagattaaatttcagtgtgagatttggataggacaaatatccagactatgtgaagtggctaaaaggcagaagaactaggaagagtttgagtcttgtgaggcaacagttggagttcgcagtttatcaaggagagtctgataaacagttgggtttttggctgcaaccctctgaagacggatatcctgcttagaataagcttaatctcagattgatctgcctcttacctttcttctctgggggaagataaaactgtcagagcctctacagattttcatacacaatgttcagcattctaagagacagggtgaagataatagaaacaggtttgtaggggatgcagatagtaaagatatcaaacacagaattttaaataactgatacttttgtttaaagtggagaatattagcagaggactggaatctataaaaataaaggaaattctaggactgaaaaaatacaataattgaattatcttttagatgattaatagcagattagattccattgaagagaggattagtgaattagatgatgggtcagaagaaaatacccagactgaaagataracaaaaggatgaaaagaaagtataagacacatatgagaacacagtgaaaagtctaatacatgtattattggaagctatatagaaaaagttaattgcaaacctccatttttcttttctgtaaaatggtaaccccaggtttaccttcttttaatagagtttctctggacatagactaagataaatgtgatttatcagttctattgccaacaacagtatttattgtaaaaatgacctgtgattggttaactgcatttggactgggaggactacaaatggacatgttatactcccaagagactacattattcaccatttctaccagcataaaacttatagggaaacagacgtccagtttccctttaaggtgtctcttcaaactcaagcacttcctgatgggaggcttagaagttgcaagaatgggcttattttatgaagtatttcttgtttgaggcttgtatatgctggagtgtactgtatccactgatacgggcttcccaacttcatgtacccctgtgtgatgaggaggcatggaagtagcagctgaatattttaaggacttctgatgaagatgtttttggttatgscatcctgacgttctgtgtttctgtcctaagttctcataaaaagctaagtaaaactgatgtaacattaccaccttttgtatcctgaggtatgaatgtcatcttgaatccaagaccactgatggtcatacacagcaggtaatacataattccagaagaagaggacaaagggaatggggcagaggcagcatttgaagagataatggcagaaagtattctaaaactgattaaatgcctcaagccacagattcagaagcccccagcagaataaatgtaagaaaaccattcctagagatatcattgtgcaactggtctaaaccaattcccttttcttgagcctcccttatgctggtgtagactgtatttatccttgcagaaatgggaaaaaaatgttgagaatatcttaaaagcagccagggggtggggtaaaaaaaagaagtgtattatcttcaaagggacagtaataagttgactccccaactaaaacagtgaaaacaaggaaaaaatggaatggaatttttttttaccttcgaagaggtaaaagaaacaaactgccagcwtataattttatgcccagcaaaaatgttcttcaaaaataaaggtaagctgggcgtggtggctcatgcctgtaatcccagcactttgggaggccaaggcggggatcacctgaggtcaggagtttgrgaccagcctggccaacatggtgaaaccccrtctttactgaaaatacaaaaattggccagatgtggtagcacacatctgtaatcccagctactcgggaggctgaggcaggagaattgcttgaaccggggaggcagaggttgcagtgagccgagatcgtgccactgcactccagcctgggtgacagagcragactccatctcaaaataaataaataaataaataaaactccagcctgggtgacagagcaagactccgtctcaaaataaataaatgaatgaaagaaggaaggaaggcaaaatgcatttttatgcaaacacaaattgagacaatttgtcaacagaagacatataacaaagggaacaccaaaggcaatttttcaggaggaaagaaagtgaccccaggtggaaggaagaaatgcaaaaagaaatgaagagcgttgggaagtctaagtatgtgggtaactaaatagatactgactatacaaaataatatcttgcgagaytgagaatatatgtaggaatgaaatgcaagaacagaaaagatatgagaaaaagtagagttatagtgttctaaagtccttgctttgtttgggaaatgtaaaaacacaaatttttattagactgaagttaaggatgcatgttgtaatatctggggtagccattaaaatgaaacctgaggactctagagaaaaaaacacagatcatgtttcttattttgttttggagagaattctagatcattccacaactctactttaaaaagaaattttatggaatgtaaaattatgtagtcaacaagaaaacattcagaggtggttaatgagaatggaaggggagttgtttgaagacaggaaaataaaggaggacgagtaagaaggagatgaagcatgtggaataagagagacaaaaagaaaatagacacataaggaccagagttggaaagacattaagagagggcatggtttatgacgctttgggataagtgttgctggcagagtctactgaatgctaatacattctccaacggtgttaaagagtctactraatgctaatacattctccaacagtgttgaagaatttataatggtaaatgttgttgttkttttttttcttccccccccccgccattttttgtttgtttgtttgttttgttttgagtctgggtctcactctgttgcccaggctggagtatagtggcacaatcatagctcactgtaatctcgaactcctgggctcaagtgatcctccgtgatcctcctgcctycttttttttttcttttttggaggcagagtgttcctctgtcccccaggctggagtgcaatggcatgatcttggctcactgcaacctctgtctcccgggctcaagcaattcttgtacctcagcctctgcagtagctgggactccaggtatgctccatcacaccaactcctgccttctcttcctgagtggctgggactacaggcgagtgccaccatgcccggctaatttttaatttttttttttttttgtagagatggggtcttcctatgttgccagggctggtctgaaactcctggcttcaagcgatcctctcgcctgggcctcccaaagtgcttggattacaggcatgagccaccatgcttggctgtaaactgtattcctgactctattttttaatcttaaatgatgatgtaaaaataaagttgattttcctgtggaatcctagattaacttaaattttaaagaagtattttattggctgggcacggtggctcatgcctgtaatcctagcactttgggaggccgaggcaggtgaatcacatgagaggccaggcattcaaaaccagccrgccaagatggcaaaaccctgtctctactaaaaatacaaaaaatgagctgggcatggtggtgcatgtctgtaatcccagctacttcagaggctgaggcaggagaatcgcttgaatctgggaagcagaggtttcagtgagctgagatcatgccaccgcactctagcctgggtgacagaacaagactctgtctcaaaaaaaaaaaaaggaaaaaaaaaggtattaaatattttatttatttatttttctttttattgctgctgcacaaattaacgttttaaagaaatattttaaagttacaatctaaagccagtataaacacttattttaaaaataaagcagaggtgtcatatctcactcctgtaatcccagcactttgggaggctgaggcgggtggattccttgaaccagcctggacaaaatggcgaaaccccatctcaacaagaaacataaaaattagccagccatggtggcacgtgcctatagtcccagcgacttggggaactgaggcgggaggatcgcttaggcctgggaggttgaggctgcagtgagctgtgagcgtcctactgcactccagcttgtgtgacaaagagagaccctgtctctaaataaataaataaagcagaatacagcatatcacataattaaagaagttaggtgtagagcaagtctttactaaaataaattattttcataagtctttactgatctatgtaaaatagcccattttcctgtcaccttgtcactctgctttcttcatgtatcatcattacatcactgtttcttctattagaaaatttccttattttttgtcttctaacacaccaagcacaactataatgttatatatttgtttattatttatgttctccaccagaaggcaagttccatttattttcacaattcaaggcaatgcctagtacacatcagacactcagaacatatttgttaaatgaatgaatgagcaaatgaatgaaagacttcaaggatgtacaagttcattctcttaataacatttaagttcattttacatattttattaggggatttagagactcttaagactttcagttcatgtgttattttcttgatttttcagcacttcttgatgactaaccttagtatatctgatccatacaaaggccacagccctaccccagccttactctctaactgaacacagcaattctccatacttgattattttcatgcattgtccctccctccttagcctatcactactagactctatcccttcactgtgacctcatttctcaaatctaatgctagagataatgcttatcctcttaagcatgcaagtgagcacccttgatacgttgtaatcaaggaaacctgattattgaagggtaaaattatgtgaattttgagcttgggcgttagaggcagatacaccatcctgtcactcaccaatttctaatttccagtttgctcacttgtaaatagggcataataatatttaccttgtgggagttttgggaattaaatatgtacataaagtactatttaataaatatggtacttatttaataagttgtagataaaaaggaaaggaagtctcttgcttccttgtgagaaccatcctttagagaactttaaaggattttcagggaaaggaaatttggagaagagcaatgagattgttttgtttcaccaygggcagaggtgaaaggagcgttgtgttgttttggcaggagtctggggatggtaggggtyggaacatatgtgcattacataacgctgctgatcaccagagttacggcttttgacatgaatgagttaaggttgctgaccaccccatgaggcccaactggctgatacatgtgtgatctcttggctcgtcacagcttaggtatatagtgtcctccaaatgttcttaacktttttattgtactccatatacaagagtatactggcatcttttaygtaaattctcaataaattttcacaaactgaacacatccacgtaaccaccactttgataaagacatggaaaatgaccagtatcccagaagtccccttgtgtcccatatccccttgtttccaacctccaccccaccaatgggaaccactatccatggatagtttcacctgtttttgaactttatagagacagaattctactgtatctggcttctttacatgggattatgtttatgagatctatccatgtcattgcatgtagttgtaattcattctcattgctatatagtattgcattaagactatactattatttgtccattctattactgatggaaatttggtagtttttacatcttggttgttatgattaatgctattttacacattcctgtacttgtcttttttctatttttattattttagaaaaacgtgaatttaaaaccatatatataaatattattttagaaatatatttttttctactgtcacatttcagattcttgtcattactgggagtattttttcaggtatctaccatggctttctagaataccatatttattgttatttaagttgtttgagatgcaatacttttgaatccatacacaatactgtaacaggtacctgctaatayaatgttacaaccacaggtgttttttttcacttgtctttttgagttataatcttcactatgttgtaactatttagtatactaatttttaaagtaatctttaaaagactttaaaatgatattctacatttgtatgtgtgaaatcattcttcagggataattatcatattactatatccttgataagtatcttttttgttgttactgattccatcagaagttttctcccatgtagtaaagattgatacatttgttaggcaagtgtgtcttacatatagtcatttgtcrttcaaaataatttagaaagtgccttcttaagatgaaagtgtcttcttaagatgaaagatttatragaacttgaatttaggaagaatctctttttttctgcagtttaacttttgattaaaaaggaaacatcagattatatttgggactatatatctttgagaaaaacatatgacagcacttcaaaaattcatggaaaaatggaattaaaagataaaaataaaaaatataaacatttttaatttttaattttaatttcaattttttaattaaatagagatgatttwaaaaaaaaattaaatacagacgaggtctcactatgttgcctaggctcgtctcaaactcctgagctcatgtgatcctcctgccttggcctcccaaagtgctaggattgattgcaggcatgagccaccatgcccggccaactttattttttagcataaatgccatcaaggtcaagatacttttgtaagcaatgatagcagccatttagtccattcctaaagaatttacagtcctcagagtttaaccatgtcagtgcagtcttttttacaygagtaactaaaagaaaataggtttgttttaaaggtgtgtgtgtgtttttttttaatattaggaaacaaagtcagaaggagccacatcagaactgtaagttggatgcctaatgattttccttgaaaattcatgcaaattgcccttgtttgatgagaggaatgagcaggagcattgtcatggtggagaaggactctttggtgaagctttccatgggagtttttctgctaargttttggctaactttcccaaaacactctaataatcagatgttgttgttccttggccctccagagagtcaataaacaaaatgcctgaagatcccaaaaaactgttgccatgaactctgctctgttttttgtttgtttgttgttttttgtttgtttgttgttttttaagagacaaggtctttgtgtcacygaggctggagggcagtggcgcaatcatagctcactgcagcctggaactcaagtgatcctcttgtttcagccccctgagtagctgagactgtaggcctgtgccaccacacttgggtcattttaaacaatatttttgaagagacggggtcttgctatgttgccaggctggtctcgtcctcctgggctcaagcgatcctctcgcccctgtttcccaaagtgttgggattcacaggtgtgagccactgcgcctagcccacctttgctcttcaccagtccactgtactttaactggaccacttccacctcttggtagccattgtcaggactgtgctttgtcttcaggatcatattggaaaagccatgtttcatttcctattacaactcttcgaagaaatgcttcaggatattgaagctacctatttaaaatttccattgagagctctgctcttgtctgcagctgatctgagtgcaacagttttgacacccattgagtggaatgtttgctcaactttaactttttaggcagagttgtgtcaaactaaatcgattgacatgcctatgatgtcggctgtcatttctgcctgtccttttcaattaaggcatgaacaatatttaattttttttcttacaaatctgtgagggtggtctgctgctatgggcttcatcttcaaaatcatcttgtcagccaagcatggtggctaacccctataatcccagcactttaagaggcagaggtaggaagatcgcttgagcccaggagtttgagaccagctttggcaacatagcaagaccctgtctctacaaaaaataaaaaattagctgagcatagtggtgcacgcctatggttacagtttctctggaggctgaggtgggagaatcacttgacacagaaggtcrgggttgcagggagcagtgattgcatcactgccttccagcctgggcaacagagtgagaccctgcctcaacacaaaacaaaaaactcttcttgtcccttcttaaaacaaattacctatttgtaaactgctgatttctttgagtcrttgttcccataaacttttcataaggcctcaatgatttcaccatacttccattaatgcttcgatataaatttgatgtttgtttttgctttaacattagcagaattcatgttgctttaatagggactctttttaaactgttgcttatccttcttagtgcctcaaactagatcctgttcagacatgtaatagtttattttggtacaaaagttttttgatatccatgcatagttttttcataatatgcatttccatgaattttttgaattttttaaatatttttctttttagttcagatgttgtttctggtctaatatttacttgtttatatttaataagttatttttactttaaaaatattttgatctttttttacatgcatgtttgtgtgtgcagtttctggtgtatttttaacagtagcaataggactgttcaggactcttaggaaatgcaaagagagcaaatttttttccccttgagacttgctttggagatagcaaggtatagctttgaatcacagctccaaaattgattgcttatatgcaatttggttaagtgtcttaaactctgcgagcctgggttttctcttctacargaactcttgtagaatttaaattaaaaaatatataaagtgcttaatgcatttatatacatagaarcacatgtatgcataagtatatgtgtacacacacacacacacacacacacacacmcacacacayatatacatacrtacaaacagcytgctaagtatgaggcacgcattaccattactattagctgcctttcagaattacctgttttctattgatatcataactacctttcctcaattgctttatcttttaggccccagaattgtctggtctttcctgccttggatatccgctctagctagttcctatcttttttttttttttttgagacagcgtccaaaaaaaatccaggccagagtacagtggcactgtcttggctcactgcaacctccgcctccccggttcaaacgattctcctgcctcagccttgtgagtagctgggattacaggtgcccaccgccacacccagctagtttttgtatttttagtagagacagggtttcaccatgtttgycatgctggtctcaaactcctgacctcaagtgatctgcccaccttggcctcccaaagtactgggattacaggcttgagccaccacacccagcctagctagtacctttctaaagtacaatgtacgagtacttttctttccatttcttagatctttgctacctaaagtttaagtacatagattagcagcattgaaagcttcttataaatacttcaaagcacttgagcacttttaatttatgcatttctgttggttataatacttgggagtgaaatcactgagtcatagagtatatacatgttcagttttagtagttacscattttgcatcaatttattgttttcccaagtgtttgcactaatttacattccytccagcaacctataaaagttccagttgctgtatttcttgactaatacatggcattgtctgtcttttttattgtgctattctggtgggtgtattatggtattgtattgcattgtggtcttaatttacttttctctgatgacccatgatattgagcaccttttcatgtttattgactatctagatctcctcttttctaaatctgttttcctgtgagacatataccttcttttgtaatgcccggaccttgactaaattgtagttctggtgctgatggttattattttttcttctgattcttttccatatttagaagcttctggaatgcagtactacataggattctttaggacttggaatatatagataataactctcttttgataggtgtttgttggtttgctcagatatgagagtgattagcacaccaaacttacatacacctcatattctaaagcagcaatactagtagattgtgaagcctgtatcatatattcacgcaccccaagtattagagttagtcatgcattttttttccatacagtaaataaatagttactgagtgttagttatgtgttaggtactgtgccagatgccaaggatcaatgataaatgagacacagaccctgttctgaaggagctagccaccgtaaaggagatcagtaacaacaacagcaaagtaggtaattacagcacttgatgttaagagccaccaggaagaggagctgtgggattacattagaacatcacttaatcagactgttgagttggtggaatgagttggggaatggggtgctagttagggaatgcttactgaaagacggtacttcatttgaaagacaaatgagacatagacatgtgatgcattggagatttggtgaatgggaatttaaatagttcacatatttaatggcatttatgtattccattgaatacagttcaactgaaatttgctgaatgcttatcataaactgggcatgtgttggctctgaaaatgagagaaagcacagtccttatgggaagttccaaatagttctaaatgactgaagtataacatttgaggtgagggaatagtgaatgatgttacaggaaagacaggcagagacatatatatgtattatataaatactttatgtatacctatagcactatatgaagtcctttaatattcaaccattctgattaccttcttactccaattttccaattaggtgcataacatgctgtgagtgtagaatgggtttcagcttcccaatatcagtggagcctccattctatatggtaccataatttgtcctgactaccagagcttctgtccaacaccatcgtacaaaattcttgaatcttccccttggttttcatttcagtcagcttgccttacctgtaattacagggtatacagaagactaatctttcttactactaaagtatttcataacatatggacactttggtcaaaagcaattagtggaaagagaagtgtttctgattcagggtctacagaaaataagatagtggagctggctgaggactgatacacatgccttccatcagagccaaaacttatctatgctcgttcctcatttcattcattcttgcccccagtgtttttttcccccacctcttaaacttagggccaatttaaaggtctggccttcagactgtttagggtcgtgaggggaacattgtaactggtagccaaaaatgccattccaactggaaggctatatctctagcatctaaacttggaattctaagtgtcacttctcccaaacccaaattattattacatatggtgtgtattaataaattctataatacctttaatatgatagcattatttyatatattatgagttaaatctttcgttgggtaaccacagattgcattatagtataatcattaggaacataggctttagaatcagatagatctggatttaaatactgattttgtccattactagtcagtttgaatttctctaagtcttagtttccacatctataaaatttcctcatacagtcattaaaagcttaaatgaaacaatgtatataaaatgttaaacatgtatatatacatatagatacacacctgctaaggtatccctcacagatttgtgagaaagaataattaactgtcattaaataacccctgctacaaatctggattataaattgacttctgtagacaccctgaaggatgatgtccatttcttggtagtctctcttgtgccttcacttggagaccctcctgaaggacttagtgcacattttctttttagtctaaattttaagtcagaccaccccaaatatgtcccaaaagttctaagaaactttttaagctatggtaatacaatggtaggcttgattttatttatttagataaaatacgatgatagacttgattttacttattatatagactaataacttcctgggagcactgtgattgccacacttccaaagagaagaaaaacttttcaagcaccaaaaaagtagcttaaaaacaaattttgtacaccagtcagggactctttagagtrcactcataggtgggaattgaacaatgagatcacatggacacaggaaggggaacatcacactctggggactgttgtggggtggggggaagggggagggatagcattgggagatatacctaatgttagatgacgagttagtgggtgcagcacaccagcatggcacatgtatacatatgtaacaaacctgcacattgtgcacatgtaccccaaaacttaaagtataaaaaaaaaaaaaaagaaataccaccttcagcaccttgtccagtggagcatgtgaaattaagtacttagattctttttgtggactgaagcttcattttctttgggctagttcaaattattatgcagtatttccatagcctttacattttggcaactcttttctttgatcctagcagaaaaataggttataattttggccccaaakaattattttttaattgttccttttgttttattagatatgataatatcctaaactatataatatattaaaatagaatgaggatgtatctgatatgaattactatgggatgatgtacagatacagaagtgttccaaactatgccttatgaaactgtagtgtcttgcctgtggtaaaaaatgctggacttcatatgggaatgatattggaaatttgaaaacttttaatctttgtgtaaaacgattgtgtatttatacctgtataacacagctatgtgaagttctgtgtcttgtatataaagacaaatgtgtcaaaactgaaaagcatccagaaagtggcaaccgaaatcgtcaagaggcaggagtggcttaaaagcttkatacccttcaatgtggaatgatcctcagggatatcattaggaaagtcttagagttggaaggggaattagctttgatctactccaacctgttatttaatgcaggaatttatcttatgataatcctgataaatggctgagcttcctctgtttgaatactggatgatgcattaagagtgctgattttggctgggcacggtggctcacacctgtaatgccagcactttgggaggctaaggcaggcagatcacctgaggtcaggagttccagaccagcctggccaacatggtgaaatcctgtctctattaaaaatacagaaattagccaagtgtggtggtgcgtgcctgtaattccagctacttgggaggctgaggcaggagaatcacttgaacccgggaggcagaggttgcagtgaactgagatcgtaccactgcactccagcctgggtgacagactgtctcagaaaaaaaaaaaagtgctgattttggggacatgctgcttgggtttaaacccagccctgcctactgggatctaccatggtcactcacctactagttgagtgaccacaggcaaattcttaacctctctgcaaatttttacccagccccatttcctggcttattattgccagcatctgtgttcctgacaataggcgaagacacaagggatctagcctctgaccccatcccatctagcattgagagatgaactgagaatcaagtaaatgtttgcattatacatctggtggaaaaaaagtatattcagcatatagtagttaccttaaaaaatgaaattttcagcatagaccagagtggtgaaaagcaagtttaggggaggcttcatggatcagacaagtctgttagttgaaggagagtctattgacagttcccagttctgccttctggaacaacataaatcagtttaattccttctgtgtgacaattcttcaccttatcaaacgtaaaatataaaaggcatagttcgggtgagtgtggatttttcccctcttaaaattccatagctttagagagtgttttgtgtattttggctaaaatttaggaaaaacaaaatgaaccactaatgggtgataattttgtagagctctttaactttttaatccaaaaaattgtgtggactataaattaaaatttrtttccatcaactcatatatggttactcagcaaaattggaaatttgaactagattccaaaccttttgagttttaaaatattctaaatagtgtattatttagattcagctttgagtgacagaaatatccaaaataagaatggcttaaacaaatagcagtattttgctgtcttgtaaaagtctgagcaggtgatgtagactgttgttatgtctgatggtgtcaaaaatatggttttctctttcctgttgctctccccttcttaagtctggtcttgaggtgcaaaatggtggctttgataattctaggcttcaggatgaaggaagggatgaggaataagttgccagggacatttctgctttatatctcattggctggaacatactcaggtggccacatctattaatagttacaagagaggctaagatgcaggctgtackctgggtagccatgtactcagttgtaatttgggagtttgatgtatgggagaaagaaagatgcagaagatattgggggacaaccagcagtgtaatgtaattagtatagctacttacttgagtaggccttcattaaatcgttgttcaacagatgaatgtttctaattgctcctgtcaaagtaggtattgatctggatatttacrtrtatacatgataaattatggcaagattatttattattggtgtttttataattttatttctcatctactctttatgaatatggtatatctgacagtcttcaggcagatgtaatactgtacaagatttatttcagtttatttattgcrgtctccccaccccccaaaacttggaggcgtattaaaaaatctcttctcatgtgtctgtctatgatcaacgtttcttgcatatgctcggcaaatgttttgagattgaataaatgaatggtaataaaactttgaggcatccaagccttttcttttaatttcttttgtttcgatttacacaaacaaaagtttatatctgtaatatacatagaagaaattcttgaccttaaatctgtatttattacaagattttcaggaacattcattcagctttcaggtggaatgtggttaggtttggatttaattatggttaagtaccaattatgacgttattaggcaaaaaaggctaaatccccattgtagggatttcagtgctagttatttcattgaggctattggggatttaaggagagagacgtatttgttagaccagcctggcaaggtgtttgggtcttataaaattcccaaagatgagtaataaactacccaggtatcaagaaaccatttaacttattttaattgaatagaaagttcctagaaatcggtaaggtttttctggagtcctagaaacatattttgaaatgttagcaagttatattgcttgaacttgatatgtctcactttgtttgttttatatgctgagaaagtaactttcaagcttcattaaattttttgacataatttacagtttgcaaaagttattaagataaaaataatctccagcgacagaaactcagttcttcctaagtcatcgcattacatgtttggagtactctgactgagggtattactctgtggcagttatgctggctctgaagtcagacagcccaggtcagatgttatgccatcacttactgtgtgacctygggtgacttatttagctcctctgtgcctcaggtttctcatctatacactggagggtaataatacttcatagagttgagagagcagggaagctagcacttagaataaagcttagtacataataaacaataaatgtcattaatggtcacttttgtcatcattattaatgtttttctcaaaatgagttaaaatatgactccaagaaatatttaggagattatatcagttgactttttcatttgtagcatatatgctatgtgctaccaagtgaaatagaagacacaagtttggtgaagaagaggaggagaatgctgaatgtggtttttttgtttttgtttttcatttttttagagacagggtctcactctgtcacccaggctgtattgcagtggcaccatcttgggttactacaacctccgcctcccaggctcaagggatcctccttcctcaccctcctaagtagctgggactatagacatgtgccaccacacccagctaattttttatttttagtagagatggggttttgccatgttgcccaggctggtctcgaactcctgggctcaagtgaaccacctgcctcagcctcccaaagtgctgggattacaggcatgagctgtcatgcttggcccttgaatttagttttgaatgtgttgaacttgagttrtttctgggatattaatcttgaaatatgaatttaaaggagggacagaggtcactggcatatgggtgataattaaaactatgggagatgaatgacataacataagggtctaccktgggcctaggtttgaaacctggggatactaaccttcaaagaacaggcagaggacataaaggaagccatctgagagttagtaggagraacaggagagagaaataccaccaaaaagaggtatgrtgtctgatgaaatagaggttatagtaatctgagaactgaaaagtatccatggcttgttaattaatgggtattttgtgactgtttggtatccgtagagtggaggtggaaaccagatagctgtgaatttagggatggtgataagggaggaaaagaaggcaataaatgtaactactgtaactactcttgagaaattttaatgagacaagttggaaactagaggaagatacaggatcaatggaaaagttttggagggtatatgatttggataggcttaagagaaatagccattagaaaaggaaaaaggttgaatatgaggasagtgtagaaaagatgggttcaaggccaaagttgacgagactggctttgaataggaggagggatgtggacagaagtaagcctttaagatagaggaaattggggttcacctgtaatccctgcactttgggaggctgaggcaggaggatcacttgagcccaggagttcaagaccagcctgagcaacatggtgagaccccatctctacaaagatttaaagaaaaattagctggggatgctggcacattcttgtagtgccagctactgggaggctgagtcagaaggatcacttgagcccaggaggttgaaggctgcagtgagctatgttcactgcactgcattccagcctggataacaaaacaataccctgtctcaaaataaataaatgaaaagatagggaaagtcactccaaatgacttccatgttctctaaagaaataaaaaagggtgtttgtcactgaaaggagggttagatagatgttttgaggagagtagtgaaagattagaatagaattgaggaaaatgggagaggtagctgacaaatttgttcttcgactgagggatttttcacctgaacagtatttaaagatatcactgttagtgtggatgccatgaatgtgttatatgaaaaaacagaatgactatatttatcatagaatatattgatttagcacctctgtgtacaaagcactgtgcgcrtatacttcctgagagattcagatgagcactggtcatcttgtccaaggagagtatgagctaatagctcaggtcatgtgattgtcacaaatgcaaatgtttataaaagattaaaaatggtaaatgacacatgagttttataaacatactataacagtttgaaagagatagagattccatcaaatgggggaaaataagaggactttatgaaaaaggcacaaaaaagggctaggtgtgaattctctgttgaaatagtaattaytgtgaatttttgatttattacactatttattcttctatgactggcattaaacagaagaagagaaacaaagagattaatgaaacagtgagttctctcctgtccaaacaatgttctaaagttgattatgtttttagtaagaatatagaattcagtaatcattttcacaaatattccacaaataggaacrtctctgttaggtgcaaaagatacagagatgactaagatacagtttctgtcctcagagagtgcatactctaatagaagaaatagaagtaaaaagaactgtagttttgtacaacaagggatataaagatggtatatatgagtagagaagtttagggcacaatggaaggaagcatgaataaatgattatgttgatatgatagcacattttttttcctttttcttttctttagttggagaacatcaattracaggccataaagtggcagttaaaatcttaaatagacagaagattcgcagtttagatgttgttggaaaaataaaacgagaaattcaaaatctaaaactctttcgtcatcctcatattatcaaactgtaagtatttttgtatctaataataccaaagagacacctatcttaaaatgttttttaggaattttataataattgttaattgttaaccttttacaaagattttttttcatgttcatattcagcaagtgttaattcatttaacctttatcagtccttttttttgcatactcttggttagactgaacagacattgtttctaaattagtactcaatttatgtttctaaattagtactcaatttatgtttctaaattagtacatcaattctcaagtgatgaatgaagttgattcatcacatttagaagttgattcttatccaactttaaatgtcattcagggctttgacatttctagattcatttttataatttttatctagtcaattttcactaacattcagggtattttttcctttggaaagatagaaagtatatgtcaaagattatttcacatagtatattacttgtagaactgaaagtagtactataaccataaagcttttaggaaggcaaatgtgtttttttccccttggaataaattataaacttaaaagttaggtaaatattgagataaataagataagtaattgaaagataaatakattattttaaaattgactagaccctagaaaatttaaatattcattgtgcaataatgtgtttctttcagtcatttaaagttgcagtttaatatttgttgggaaaatgtaacgtgctagacactgaaaattgtcttatttatctttaagcttggatacagttttataaaataagtattgctcttacttattgagtacctgatagtggtcaggaactgtaccaagcatttttttttgtcaagtttctgctgaatgtgtggagcattttccttatttaatttaatattatcttcatgatcagtgtctaaagtaggcttactttatagacaaggaaactgcattatctaaaaagtaatagcagyttatccaaggccacacagctagtaagtcacagagctggtagttgaggtcaarcctgattccaaatgccatgctgttaatgctccagcattccagtttttcttaaaactgagagttatataaattccttttaaagaaaaaataaatttatggatccctcattttgacttaattatttttaatataccattacttaagaaacaaagccctatgtataaactttatatgcatatagttcgaatacaactatgaaaccaaaagaaattcacaatttaaatacaaaaaaacaatggaatcaatgggattcaaagcagtatcaatagtataatgtgacaaataacagtgttttataacaaccaaaatcattgttagagagtttaatagtggaaacagtaggaggagatcaaatactaaatttatattgtgagtcaaataagattggtacagagaaagcatgttcatataaatatactattaaaaaagaagtattaataactctgagatgttatttgctagttcattaaaatcaggcattatatttaggctgayctttgtcagtgagcagtctttgaatgtcagcattaatgggaacaacttgataaccctgtggagttatattgtttacttgatgacaagagtagcatataagtgtggtaagcagagtaatacctgccccccatgtctatttcctaattcccagaatttgtgaatatgttaggttgcatggcaaagggtaacattgctaagcagctgaccttaaactagggaggttatcctggatyatgtaggtgggccaaatattaacacagtggttcttaaaagtagaggagaagagtagaagaaaagagtcagagaaaaaggtctgaacatagaaacaacatcagaatgataaaatgggagaaggactcaactggccgtttctgcgtttgaagatggaggaaagggagcatgagtcaatgaatgcaggcagtctctacaagctgggaaatgcaaagaaattctgccccagagccttcagaaggcaacacagctctgctggcaccttgattttagcccactgagacatatgtcaagcttttaagataaagaactgtaagataatacatttgtgttgttttaagccactgagtttgaagtatggcagcaatgggaaactaatacagcatcattcttgaaatccttaaataaatggctggtccaattattgttgagatttggaacattcatttagtctttactgctgtacttattgttagtgaactgtggcttattggtatttttaatgaagggacccatgtggtgcatcttacyggcagcaagagtatgccactgactgttcagagcaggcttttatgggattggtgtggatgaccggtgatgactcagttctcacatcactgctaggaaaccttcattcttagagtaagcttcaatgtcatatgatcttcacttgaagttcacttagtcataaacataaacaaaatgaggtccctgaaattgcatggcagtacttgattataaggttatcatccaggacctatgtattagatggtccagagtatgtatatagaggtttttaaagattgtcataagaattaaaattcyacccatgagcttggtractcacctytcctatccwttgtttctttaactttaaaatgggacacctcatttgaggattaaatgtgttggcactggtataatgcctagtgtttgataagcattggcccagagcaggaattagcaacttataaactaattccagtcctctttcattattccaratggttttcacttaactgaaacagttagtctctgacttcaactcygtattattcatgactttgttctagttactgggtaacatctaagctaaatctctttgctcttccccactgagtgtccacttcctatgagaagagaaagctgaaatagccagactaaaagtgtcatatgctagaatgaaagtggrgaagggaaagatctttccatatttgccttataccttgacctcatcacttttacaatgccaaccctgaaagactttgaggaaattttacccgtttgggtatgagtcctactatctgtacagttcccagttcctaaaaacacaaatcagattttatcaataagcagttgcaattgtcataattgtcatgaggattctaaggcttcttttcctttttttttttttttaacagagcctagctctgttgcccaggctggagtgcagtggtgcaatcttggctcactgcaaccttcgcttcccagattcaaatgattctcatgcctcagccttccaagtagctgagactacaggcatgtgccaccacaccctgctaattttgtattttttgtagagacaggctttccgccattttgccaggctggtctcgacctcctaagctcaaaaccatcagcctgccgcagcctcccaaagtgctgagattacaggcttgagccactgcgcccaggcccgaagacttatttttgatgtcatatttatcagtgttttcttgcctycatttctatatttactttcaatcattttatttttgtttgactgtctcatcctgattatttaattatttgctrttttctgaaggaattatagaagattgtcagagttggtcagaaagtaattggcagaggtgaatttgcagtttaaaacttttggcttccagccttgagattaattcattcagccacattgcctctttaattgtagatctgatcttaaaacaaaaaacaaacaaacaaaaaaacactcatgtatttttgctacagaagaagcttattgacatcgtctgtaacagtgttagtgatttaaacrgagagagcaaccttaccctttcagtggttttcttttgtgtagccttggactgtcaggaatagtttccttattgcaaaagtgggactctagaattagcaagaaagtttgagcattgaatgccaagaatgaaggatatttattgcatgatttctttattaacccaaattgaaaaaaaaattacaaatgaatgacctaaaacccactggtagaaaattaaaaggcacaaataggatttaaagaaaaatccaaactttcctatgaagtagaatttgttgaattgatttttgtccttttttttctttcctccataattcttaatgcaacttgattttacttggtcaaaagatgcttgttagtctggtagagatgatcttgtctaatttttttttttttttttgagacaaagtctcgctctgttgcccaggctggagtgcagtagcatgatctcrgctcactgcaacctccgcctcctgtgttcaagcgattctcctgcctcagcctcctgagtagctgggactacaggcacacaccaccacacccagctaatttttgtatttttagtagagacggggtttcaccatgttggccaggatggccttgatctcttgacttcgtgatctgcccaccttggcctcccaaagtgctgggattacgggcgtgagccaccatgcccagcctaattctttttagtctatcttatttaacctatggcctgctttttaacatcattaaccgccagcaccaccttgaaatgttgtctctaggtttccatgacacctcaggcttctgttttctttttttcattcttgtttattctgaaaactttcctttatgggccccgctttatcttcctggctgttaagtattgatgcagtcaagtacactgagctagtgtaattttcttagtgaaccctcttttgatgatttcatctactaccatggtgccatttgccatctctatgctgaagatttccaaatctttatgatttctggcccttttgtttctccagatttctgagcacatttatcaaattgtttatcggatgttcacattctaaagtcacagagtcacctgaagctaaamttttctctctcttccaaatttacttctctgtttttggagggtgyggtgggagagtggagggaggtaaatgaaaataccattcatgcagtttcccaagccccaaacttgggcaaaatctttaatttcttcttttccctcatttcttacatacaatcaatcattaaggtctgcacttctttttcctaagtgtcctctgaatttatccatttttctttgctctgtcaggttaccatcttgcttgttgtacttcagctgtttcctctgcttggaatactttatccacatctccctttccctaggctgccaattccaacttgtcttttaagtgcaattacatttgacccttgaacggtatgggtttgaaccacattggtctacttatgmttgggttttatgccrcctttgctatcctgagacagcaagaccaacccctcctcttcctcttcctcctcagtctactcaatatgaagatgacaaggataaagaccttgatggtgatccatttccacttaatgagtagttggtatattttctcttccttatgattttcctaataacattttcttgtctctagcttactttactataagaatacagtaaataatacatttaacatgcaaaatgtgtgttaattatttctgttatctgtaaggcttctgctcaacagtrggctattagtagttaagtttaggggtagtcaaaagttaaacgtggatttttgatgcacaggggttgacaccctaacccccacattgtctgaggatcaactgtacccctgaaaacctactttactcactaagactaggttaggctctaactcctctttgctctcaaagcactcaatgttcaccttttccraagcccttaaattgtgttgtaattgcacattttcttattggtatttcccacaagactgaagtacttaggagcaggaattatggttttttttttaattcaaaaaaaatttttttattatactttaagttctagggcacatgtgcacaatgtgcaggtttgttacatatgtatccatgtgccatgttggtgtgctgcacccattaactcgtcatttacattaggtatatctcctaatgctatccctcccctctcctgccaccccacgacaggccccggtgtgtgatgttccccttcctgtgtccaagtgttctcattgttcaattcccacctatgagtgagaacatgcggtgtttggttttctgtccttgtgatagtttgctgagaatgatggtttccagcttcatccatatccctacaaaggacatgaactcatccttttttatggctgcatagtattccatggtgtatatgtgccacattttcttaatccagtctatcactgatggacatttgggttggttacaagtcttcgctattgtgaatagtgccacaataaacatacgtgtgcatgtgtctttatagcatcatgatttataatcctttggctatatacccagtaatgggatggcgggtcaaatggtatttctagttctagatccttgaggaatcaccacactgtgttccacaatggttgaactagtttacagtcccaccaacagtgtaaaagtgttcctatttctccacatcctctccagcacctgtcgtttcctgactttttaatgatcgccattctaactggtgtgagatggtgtctcattgtggttttgatttgcatttatcagatggccagtgatgatgagcatttttcatgtgtctgttggctgcgtaaatgtcttcttttgagaaatgtctgttcatatccttcgcccactttttgatggggttgtttgattttttcttgtacatttgttaagttctttgtagattctggatattagccctttgtcagatgggtagattgcaaaaattttctcccattctgtaggttgcctattcactctgatggtagtttcttttgctgtgcagaagctctttagtttaattagatcccatttgtcaattttggcttttgttgccattgcttttggtgttttagacatgaagaccttgcccatgcctatgtcctgaatggtattgcctaggttttcttctagggtttttatggttttaggtctaacatttaagtctttgatccatcttgaattaatttttgtataaggtgtaaggaaggggtccagtttcagctttctacatatggctagccaattttcccagcaccatttttaaatagggaatcctttccccatttcttgtttttgtcaggtttgtcaaagatcagatggttgtagatgtgtggtattatttctgaggcctctgctctgttccattggtctatatctctgttttggtaccagtaccatgctgttttggttactgtagccttgtagtatagtttgaagtcaggtagcgtgatgcctccagctttgttcttttggcttaggcttgtcttggcaatgtgggctcttttttggttccatatgaactttaaagtcgttttttccaattctgtgaagaaagttattggtagtttgatggggatggcattgmatctataattaccttgggcagtatggccattttcacgatattgattcttcctatccatgagcatggaatgttcttccatttgtttgtgtcctcttttatttcattgagcagtggtttgtagttctccttgaagaggtccttcacatcccttgtaagttggattcctaggtattttattctctttgaagcaattgtgaatgggatttttattgagcacctactatgggttgggtgctgttctaggcataggggatataatcatgaaggacagagtctctttcttgtgttttttatgttctggacagtaagtaaacaaattaacaagatcattttaggtaaagataagtgctatgagaatgaaacatggtgctgtcacagagtgtgactaggaaagaagaagggctaatttagattaggtatgaggaagcctcactaagaagataggtttgacctaagacctaaaggatgatgaagatctgacatgtgaaaatctggggacagaatgttttcaaagcaaggggaagagcaacatcaaagaggtgaagcaaacttcaagtgttgtaggcaaaggaagattatgtactctcaggagtggagtgaggagaagagaagtagttcaggaattctaagagtagatggggaccagataacaaagggatttgaaggccttgctaagaaatttgattgtgttctaaataggaacttttggagagttggagaagtaacatgatatgaatatagtgtagaatgggtatggtggcagaagtagaagcagacagaccagttgggaagctattgctatagtctacctgggagattatggtggctttaaccaaagtgataatctagattagtgttggctaatacagtagccagtggccacatgtggctgtgtaaatttaaattaattaaaatgaaaaatttggttgtctggtcacactagccacattycaagtacttaatagctgcatatgtttagtgaccactgtgttggacagagcagataaaaaacatttctatcgttgtaggaagttctgttcaacagtcctggtctagatggagagaaatggatggatttgatatgtattttggagggagaactaatgtattactgatgggttagataaggaggagaaagaaaggaatttttttttttttttttttttttttttgcttaagcaactgggattttgggttttggcttgagcaagtaggtagtgatagtggtgtcattttctgagatggaaagaatggaaaagaaacattagagagatgtgaacattaaggatattgttttggccatgataagctaagaatccattagacatgtaaatggagatatcatctatcatctttatctctcctgcaactagcacagtagtaggtattcaataattacttgtagctccataatgacatttgaacaaggtcctgatggctctaggagtccaagcaagaacaaaagaatgaaagtgtraggaatatggtgtattgggaacaaacagtctggtttgtttggtgcacagagtatgtatagggaagtggaaaaataaagccagaaaggcaggttgttggttgatccattcattcaacagatgacaccatttaggcactagggatacagcaacagacaaaaaggcaacaacaacaaaatccttgctattatagagattatattagtgtgtggtggaggggtggtrgggaaatakacaataaatcccttattatatgtyatatgttagacagtgaagaggtgaggggatatgccatgtagatatctgaagkgggtraatgttacacatagagggaagagcaaatacaaaggaaagtagaaattcctgcaggtcagagatcaagggagcagaatgatctaggaagattagagtgagagatraggtcagagacataaagggcattataggccattgtcagggctttggcttttactcttgtctaagatgggaagccattggaaggctttgattagtggtatgatgtgatctgacttacatttagactgtaggtgagcaagagttgaagcagggaaaccaattgggagtcaattgcagtgatctgtaaaagatgatgttggcttgaaatacagcatagtgtagtagtgtttagaagtaagcatgttttgtatgtactttcaagatagagtcaacagcatttgctaacagataaaatgtgagttgtgagaggaaagaagttaaggatgacgccaaggcatctggcctcggcgaaaaaacaaggatggagttgccagtaactgaagtggagaagattgtaggaggaacaggtttgaggtgggatgttaggggggtggtttcaacaatttaattttggttttatgaagttgaaatgcttattagacatccaagtagagatgtaagtaggctgttgaataagtgaatctggagttcaggggagaggtgtaagctagagagataaatttggaagccatcagcagacagactgtatttaagatatttaaagcccyaagactggrtgaaatcaccaagataaacaagaagtccaaggactgggctctagaacactatgatgctaacatgtctgaaaaatgaggaggaaccagtaaaagagaatgaaaatgatcagtgaggtgggaggaaaattaggggaatcgggtatcttgaagccaagagaagaaagtgttttaggaaagatcaccaactgtcccttttactggtgaatattgagtaagatgataacggagaattgactgttggatttggcaacgtggaggttgctgttgtctttgaaaagaaccaatttattggaatgatgagggcaaaaacctgatgtaaagggtttaagagggaatatgagataaaaaaggggagatagtaactatmggcaggagaggagagacataggagtggtaaccagaaggaaatgaggagtctaaacaaggttagctttttaaaatgggagatattgtagaatgttggtatgccaaaaggagtgattcagtcaagaggaaggaattgatacaaaagaaagaggggctaattatagaagccaagtcccttcgtaggtgtgggagataatccagtgcataaytggaggagttagtctttgaaagtatatgaccatggagtggttggctgtgtgtggtggaagaaaagataattagaaatgaggcattcaaagaacttaaaggccatatgttaagatattttaagccttaagactggatgcggttaccaaagatatgagtacagataaacaagaagtccaaggactgagctctagagcactatgatgttaacatgtctgtttatatcacagattatctataaagatatcacttacacctraaacagtgacagtagtagcaatggggaaaaagacattaattcagaatgagaaggagttagtaagaagattgattgatgactataatgtgaaaaggtatgaggaggtattatctgatggcctgcacttcaaagacaatgagatttttgagggaggaagttttgggtaagaatttcttttagatcagaattcattcattactagactatgcaaatttgccagcatttaagatttcattaaattaatgtgaattaatgcatctaggctctgatcaacagtggcttccaatgtgtcagaaaaagagacacattatatgcctttggctagaggtacactacactacttagtctttcaaatgaaaacaaaaattgcaaaaatgaaacaaatctgatcaagtatctagatttaagagtgggttagaaattgtgcattttgctgctataaaggatggaacaacaaaattcatactgtggaatcctctttaacaaactaactggtttcttccacaaaagaatgcaagaaaaaaacaacagagatagaggagcaacctataaattagaagagacataagagacaaatgagccaattacaatatattgattgtgtttgtatcaataaatcttctgattggatatttgatgacattcatggttttttaaatttatgcatgataacaatattttgcatattgtgcatacacacatatatttttaagttatcctttagagatatgtacagatttatttacaaaggaagtgaaatccaaattcaatgtgaaatgatgactgaaaacatatacttttacaaagttaataaccaagacattaattaccttagactctagaatgttatagaaagtttgacttattctatatgtccatacataaataagaaaagtactgtcaactcaataarcatgggcaaaagacacagcattttctacgaagaaatgtatatggtgttttgcaactgttggagaatatataaatccaccagttttctaaagattttakcattgccaaactttctttggaaaactgtctttggtattatcttttcaattggaacatacacaataactatgactcagcagttgcactcatcagtgtatatcaaggagaaaatcttgccatgtagaagaatgttcgtgttagtccatttttacattactataaaggartactgaaggctgggtaatttataaagaaaagaggtttaattggcccacagttctgcaggctgtacaggaaacatggtgctggcttttacttctagtaagggtctcaggaagcttacaatcatgacagaaggcaactggcagccagggtgtcacatggtgagggagagcaagagaggaaggaggaagagccagtctcctttaaacaaccagctctcttatgaactgagcaagaattcacttattactgaggcaatggtgctaaaccattcatgagggatggatctacccccatgatccaatcacctcccaccagtccccatgttcaacattgggaatcacatttcaacatgagatttggaggggatgaacatacaaaccatattaatgttcacagcagcaaataatagcaacattatagaaacaacctaaatactcttttttttttttttttgagacagagtttcactcttgttgcccaggctggagtgcaatggcgtgatctcagcttaccgcaacctccrcctcccaggttcaagcgattctcgtacctcagtctccctagtagctgggattacaggcatgtgccaccacgcctggctaattttttatttttagtagacatggggtttctccatgttggtcaggctggtctcagactctygacctcaggtgattcacctgtctcggcctcccaaagtgctgggattacaggtatgagccaccgcacctggccaaaactctttagtggtagagtagatgaataaatacaataggatataacaatggtcaaatcaaataactacagcaaacacaacaataggattgaatctcaataaaataactwctagaatattacatagagcgtgatacctggtttttaaagcaaagaacagtttaacatatatatgaatttgaattattcatatatatgaaatatacatatgtagagagaggggatacacacacatgcatatgtacatatataaactgtataaaagaggtggggaggaaaggataaacagggtgttcaggatgacagctgcattgggtgagaagcaatgggatggggaaggcggatccctatattaattagttggaagctgttgtcaaggtcttggcctttttgtctgagtgatgggtttgtaggtattacattattaaaaatagtaattaaataaaaggtcattcatggactactgaagacaagtgtcatcaaccaagcatgattgctacatttctatgtaactgagttctaactaaagaaaaatcttatgtgtatgtagctacataaataatattctaaaatctcaatagattttaccaccaaaaaggtgtactcatgaatgttgatttttggctaactttggaaagatttctattttttttgattttcatatactattttatgtggctatttcctaaaaatgcgtataacttggtcaactggaaaatgcttaggatttttctggattattaatttatttttaccaattagaaatgctgtttctgaaaaatttttaaactacattagtttatttctctgctgtactaggaaaataatactgagaagtatgagtgattcatgattgaatktcttgtaatgcttcaatatacttgtattttagacagcacaagagatttgacttactcaggccaggcttagaatgtaatcctggaatttgccttttccactaaatccttaatgtaaaactgtctttttaagacgtcttccttctgaaatttgtttccctttgtccctaccccattgtggttaggggtgggggacaaagggaaattttattggttgaagttttgctgtaattttgctatgatttttcagtttcagattactctggttttggctctaagcactcacgttatttaaaagtgctaatttatacatttacttaaatacctactttgttataggcactttactaaatacatattcattaatcaaattattgtaataataaaaacatataattacaaactgagatgcgtggtctgaagctcaggaaaacgcatctgtgagtgcaaaaaggcacctcacctggacttaggaagtgacttttaagctgagatctaaaggatgattagggctcactcaggtcatagtataggattcaggtcagtgaaaacagcttatacaaaggagctgtagcaggaggaggtacagcatgactaacactgaaaaatgtagtatgactcagtgttgtgactcaaaggtgagaccaaacaacagagatggcargggcctgatttattcaggacctaagagcaatgggaaacctttgaagattctaaattgagaggctactggagatcatatttgtgtttgaagagaatctttatttaatgtctgtctttctggctaaactgtaagctccacgagtagaggcaccaacttttgatctcaccgagtacaatacaagtaggtactcaataaatgttgtgtcaccatttaatagcttagtgcctggcagacagtaagtgcttagtaacgttatgattttcattgctctagactggcctttagtgtaagacagtggctgctaaggatttagaggtttcatgaaataattaattccaagaatatctgttgaagacctgtgatatactcagaaatggcagctaaatttatttattagaatgtcatcacttcttttcttttgtgccccatctaggatgtacagagcacaaaagtgattgaaaattgttactaaatcagaccaacctacagtgaggtgctacagcagatgcacctgccctacagtattcagtttacgtgatcactttggtgcttgtaaagatagcttttataaaactatttcttctagagttctcagtataattacctttccaaagttcatttgaaatagtctcaattcttcttcagtcatattcgtttattttatataaattagaataccttgccatgtttcttcccaaagactaatgattgccattcaaaatatttcttctggccaggcttggtggctcatgcctgtaatcccagcattttgggaggccaaggcgggcagatcacttgaggtcaggagttcgagaccagcctggccaacatggtgaaacccccctctctactaaaaatacaaaaattagccgggcatggtggtgcatgcctgtagtcccagctactcgggaggttgaggcaggagaatttcttgaacccaggaggtggggtrcgcagtgagccgagagcatggccgctgcactccagcctgagtggcagagcaagactctgtctcaaacaaaagaaaaaaagtaactaattttaacgtctccaaaacttggtttggtaaaattgtgtataggggtgtaagttgtagtttttgggaaaaaaatttattttatcaaataaagctaattttttttcttagtttttaatgtgcccagctttggatgcctagaaacacagacasacagacacacasacacacacacacacacacacacacacacactcttaatttttcatgatgggaattgtttaacatttacaaaagtaamgcggtgaaaccccatgcatgtcttattcaccttcaacagtagtcaattcattgttttatctacgccagattattttgaagcaaatctcaacattatctttttaatctgtaaactcttcagtatctactctagaaaatacttttttaaactctaaataacataagcatagtatcatcacatctttttttttttttttttgaagcggagtctcgctctgttgcccatgctggagtgcagtggcacgatcttggctcaccgcaagctctgcctcccgggttcacgccattctcctgcctcagcctcccgagtagctgggactacaggtgcccgccaccatgcccagctaattttttgtatttttagtagagayggggtttcaccgtgtttggtttagccaggatggtctcaatctcctgaccttgtgatctgtccgcctcggcctcccaaagtgctgggattacaggcgtgagccaccacgcccggcctatcacatcttaattaaaataattaacaacattatccaccactaatcagcatgtagactttcctgattgtttcataaatggtttttaaagttggtttatttgaatcagaatcaaaataagtctatacagcataattggtcaatatgtctcttaagttacttttaacgtatagtttatcctttccctttttttcttgcattttatttgttgaggaaatggtcatttttcacttcctggattttgctgaatgtatccctgtagtatcatgttacgtgtccaggaaaatatatgtatgttttacagaaatgaggtcttgctatgttgcccaggctggtaaaatactgactttagaagatatattccacttaattgccaacatgaagcctatgcttttcaaaatcggttccataaaatcatgttgaagatcagttattttcttttcttagcactttcatgtatgttctgttttagtttgttttgctgtcaattccccaaaacattgccctgagctcaagtgattctcccaccttggccttccaaagtgctgggattacaggcatgagccatagtgtctggcccaagtatattttctgtttatctttaaatatgtgatacctcatctccttttactgtaaacaaatttttgtttatatggaaaaattagttgttgaagagggaaagatttcaaaaattatgtaaacttgaaagggaggatctaaaggaacggccgtgagcctcaagaaatagaataattttgtaatggtccgtgtttattgctctgtgattattttgataacatgtaatttgttgccatcttaaagtattataaaacattgaaatataaaattgtagcaagagtagatataccagtttgattttggttaaagtaacatactttgttaactttttttaattaacaaaaaagataccaggtgatcagcactccaacagatttttttatggtaatggaatatgtgtctggaggtgaattatttgactacatctgtaagcatggacgggtgagtaacatactatctggtacactaaatctctaaactaataaaaaggaaagtattgggacatagaacaatgcaaagatatcttcaaggttgaagttgcttttatggtagtgctcaactaaacatgtagagtgttagataaattttctttcttaaaaagcattccttttgaaatactgattttagaaaatatgtttcacttaattgccaacatgatgcgtatgctttttaaaatctgttccataaaatcatgttgaagatcagttatttccttttcttagcactttcacatatgttctgttttagtttgttttactgtcaattccccaaaacattgtgcacatttaataatattaattgaaatttaaatatttctgcttagcracaaagacaaacttgtcttttgacatgttgagctttgacaagcttttggttggtttattttgtctgatttgttgagaattccaacataattctagcttgcttaattatatttagcctaattatgaaattaaaactcttgtcaaatagatgtctcagattttttttttttttttttttttgagacagactcttgctctgttgcccaggctggagcgcagtggcatgatctcagctcactgcaacctctgcctcctggtacaagcaattctcgtgtcccactctcctgagtagctggaactacaggtgcatgtcaccatgcccggctaatttttgtatttttagtagagatggagtttcaccttattggtcaggctggtctcaaactcctgacctcaggtaatccacctgccttggctgggattacaggcatgagccactgtgcccagccccagatattcttaatgcagtttyttttgtgcttgataggttgaagagatggaagccaggcggctctttcagcagattctgtctgctgtggattactgtcataggcatatggttgttcatcgagacctgaaaccagagaatgtcctgttggatgcacacatgaatgccaagatagccgatttcggtatgtaactccagggttgttcagaaaggtactagctaccttttaaagcataacaactcattgaactaagaactttacttttcaaccttgtacgttctgtaccatgaaaaggaattarctgaaatctcctcagtagcttttttttttcatttaattaaattttcattaattttcattaaatacactttaaaaatgcagatacctctagagaagttagaaggttgtcatcaagataaatccattcaatctgcattttctcctaaggaaatgatgcataactgtttttttgttttttttttttttgaagagaggggaggagtcccagacttctttgaaaatctcatgaaagtatgggcactttccctgatgaatgcatataaaccaaggtacctgaaaatatgcatgcagttggaaaaaagcccttctgaactgatccacaaagaggtccttaggtgtaacgtctaataacttgattagagaacagtttttgtcaggggtaaaaggtacataaaatgtgatttttatactccaaacactttctgggataaacatacgtggaaaggatgccttaatagggtatttgagaaaaagactaggaagtgagagattaaagagaaagagatagaaaggtacaggctattgttgcctatttgtggtctataccttgtctttaatctaaaaacctrgaaactactttctctatttctcttccttctctaaatcatgaaacttatttattactatagctcagctagatttttggttcaatagattattttttccatgttgaattaaatatttctaaattaaaaacttttggaacataatctctttatgaggtggggcccatctggtttctaattacagaatttaaagaggcttttgaaagcacagggcaaaaaagtagtagtctctattttattctttcaactatggaaataggtaaataatattttgatgytttcatgtttgggaaagttaatatgcttcagaataacctcatttgtgatgggaatcaacatttttatttagaaaggaaatttagtttcactcatatatgtgatgtgctttagctttttgttacagtgtaagcactctgagacggtctctttccagttaaatgctttccactgcttttttttaataacttaaaaaaaaatgatatatggaggatccaggacttgaaattttgctcatatttatatgactttatctacttttaaaaatatctagcaccaagtaaacattacttttatttttaggattatctaatatgatgtcagatggtgaatttctgagaactagttgcggatctccaaattatgcagcacctgaagtcatctcaggcaggtaataatcagtgaagcataagctttttgtaatcttgtgttcattttgataacatttaattacaatatattctctatggaaggtaagattttaacatggtagaaatggattattcatttatttttccactgttaaagggataatggttatatcaaaaaatgttaaacatttcatttagatgtcattataaatatacttacgaagttttccccattagaaaaataactgaagtagatcctgatttaacatatctttcattttacaaaagtgcagataagagagtaagaatttgctaaatttaagctagtgtcatttatttattagatatagttctttaataataccttgcatattttccaaagtatatagagcattgttttatattttgtgtttggaaaaaygagattttgggggaaaatattgtttcatgaaattacacaagtagagattgtgtagttactcataacttattcattggtacattataaaaatgtttatacagattgcagtggtaaactcaagtctttctacagtgatcaacgtgtgattttaaaagttaacagaatcctataagagaaaatatggttaaagtattattgcaaatagcagataaagaattatcttagtccatttgggctgctataagaaagatacaataaaggtgatagcttataaacaacagaaatgtatttctcacagttctgaagtctgggaagtccaagatcaagatttggtatctggtgagggtctgcttcctaatagactactgtatgctcactgtaacttcacatggtgaaagggacaagggatctctctggggtcgctcttataagggcactaatcccattcatgagaactctgcactagtgacctaatcaccccccttaagtccccacctcctaatactatctccttgggggttaggatttcaacacatgaattttgagaggacataagcattcagtccattgcaaggagtttgaacaatacagcaaatgatgtaaacaatcaccattttttatataaacagattatattcttttcattagaatagtaaagatttactttgttacctcagacccaggtttgagtatggtaatatgctatcatgggaattgtaatgctgtagaaacgtaagagaaaaaaggaataatactataagcataggttatctggatcaaagatgattttagtcatatgagttaggaagtgatgagaatagaaatagtaagtactcaggataatgtgatacaggataaatactgtctacacagtactaattaagtactttaatgttttaaatatctctctctmtatatatatgatatattatatatatatatrtatatattttttgttttgagatagagtctcgctctgtcacctaggctagagtgcagtggcacaatctcagctcactgtaccacctcctgggctcagatgatyctcccacctcagccttctgagtagctgggactaagatgtgcaccaccatccctggctattttttgtatttttagtagaaacagcgtttcaccatgttgcccaggctggcctcaaactcgtagcctcaagcaatccgcccgcctcagcctcccaaagtactaggattacaggtgtgagctaccgtgaccagccttaatattctttaaaggtgtgccaggggtagaaattctattatatgtatacattatatatatgttttctttcttgtaatagttctttgggaaaaagatttaacctatacaccatagtattttttcaagtttgtggtcatctactttgtttccctcaaaaatcaaccacagaaagtattatatgttttaattcgtatgtttcagttaaatgaatttgtgacaaataaaaataccctattcacttggcaggcttgaatagtagttggctagccccattactctctttggggaacaaacactgaatattggggagcagccatggacttcattaaagaccttggaaatgaatatgtactgaatgtagactacctatatatagaagtaggrtacatagagaaaaagtgattcttgcatttcaggtttgtgttgtcatcttttttcttagattgtatgcaggtcctgaagttgatatctggagctgtggtgttatcttgtatgctcttctttgtggcaccctcccatttgatgatgagcatgtacctacgttatttaagaagatccgagggggtgtcttttatatcccagaatatctcaatcgttctgtcgccactctcctgatgcatatgctgcaggttgacccactgaaacgagcaactatcaaagacataaggtgattyttctttttgtttctgttctgcatattttctcataggaataataatgttaattaaatgattctcccaaagtctcatttcctgccctcaccacctcaccccagtactcatgcttcagccacattgaacttgtccttgtttctcaaacctaacatagattttatgccttcatgtctttgtttatattrttcactttgccttgatgtcttttcttgtttcttttttgacctgatagacttccattcatccattaaagttcatgccaccccttttgtgatttccacacgtgcttccatttctgttttatcaacattttgttcatgcttttattatttaatcctcatcctgtatctagttatttctcagtgtgtcttttttctctcttaaattatgatatcagggtagagagtgtgtcttattcatctttgactacacaatgctaaaaggcctggaaagatggtatgcttagaaagtgtctgaagaaatttcaaatggagaaatagggtgagattttgtattttacatatggttaaagacataaagcataaaaagttttgctaagtttttgaattcaatagctgctagtcagcttactgtgaaggcttttttgtcacttgagaaagtttggaaagtgccattgctgatgcgcctatgaatatgacctttgtatatcccacacctgtgtatagtagcaagatgattcactgcatcctgcctatgacttatcaaggcatgtttyttagaggttttttcttcttacctaagatttcatccgtgtttgtttacaaacatgttcttttgacatctttccagaactctttccccttttcatcattagccagcaaagaatttttttttttttttttttttttttttttttaaggcagggtctcactctgtcgcccaggctggagtgcagtggtgtgatcacagctcactgtaggtagcctcaacctcccaagctgagktgttcctcccaccccaggctcctgagtagctgggactataggcacaagccaccacacccagctaattttttttaatttttttatttttagtagaaatggagttttgccatgttgcccaggctggtcttgaacttctgggctcaagcaatccacccaccttgccctcccaaagtgctgggattacaagtgtgagtcgttgcacccagttccagaaaagactgttttgagacctctgacctttggaatatttaaatgatggctgagatagctgtttatgtgactgctgctgatttcatacaggcaaggactgatgattctttttgcatttatgtatcattttcttttcccagcctttcttcagtgttccaaacctcatgtataacaatgtaaaagtgtaaattagccaccagatttaattataaaaatgaacttagcaggaaaaaaactctttgtgtttatagttctwtagcatatatacttctgttaatgacttttccttagaaaattagacatgctgatatatttgcagctgctcatatcagcatatacatttagaatagtaataggctgggggcagtgtctcatgcctgtaatcccaacactttgcgaggctgagatgggaagattgcttgagcccagaaggtcaagactagcctggtcaacatagtaagcgcccatctatattaaaattttttttttattaaaaaaaaagtcaaatggtaatgattcattgctttaaaacaggtgtttgtatatttatatacttcagaagaaaaatgtaaatatatttactgggaagagttaatttgtacgtaggtagatggcatgaaagtatcattcatctctatactttaatatgataacttgaatctatagttttcatctttttaaatttatgtcatatatatatttacttatctatattcaattttttaatgtttgggaattctcatttttttaattcttttttttttttttttttaaagagatggggtcttgctatgtttaccaggctggtcttgaactcctggcctaaagcagttttcccatcttggcctcccaaagtgctaggattacaggcataagccaccacgcctggccaatgtttgggaattcttgatttgataaaatatagttcaatagggaaaagaattactaatcatggaaaaattacaaaataccaagcattctgctttatggcttaacttatgttattgcattgacttttcatatatagctataaaccattttacaaaccatgaaactgaagctcagaaaggttacatcatgatttatgtatctgtttgcccctattaaattataaattactttaaattagggaccaattattaattcatagcaaaatgcacaaggtckaacacatattaaatgttaagtaaatctgtgtttgttgaaaattacacaactaataaggagcacaatggggctcaacttggaactttacctgaattcaaaacctgtgccatttatactattccaaattgttacatcagttctgtgatatctatcctttcaatctatcatattttatttatctcttatgctactacatacttactgtctcaatattatttttgtacatctattattttcttgtaagatagccattggaagttcggaaatatatcttcatatttatttgcttatttaaccattttcgcttttattcattcaacaaatatttatttcacatctgctctgtgcaaggtcttgtgctaggtgctggtaatatagtggtaaacaagatagatattatcttcatggaaaacacatctttgtgttctccaggtatcttaagcttagtaatagtattaatgttatcatagttaaagtgagcggtctgaagttcaactgagcacaaatcccagtgcatctgtttattagctatgtgcaacttagttacttcccacatatattagaattttggggagcgtagtcatagatcaaaccttgtgaaattgccatttaagtaggtctgaaaatgattgaatatcagaaactgcaaatactcaacttaatataattaaagcttttagaacaatgtctagaacataatattagctattattatttttgagggaatatttgaaaaccttttagctgcacttaaagaaatttgggcatatcatgaggtttctaaaatttgatagtctttataatctaaccttaagtcatatatcaatttcaggtatcaggtagtagtgatagaaaaatataatttctgatgcctgtataatagcccatgtgaagtgaattgcttttgtctcagatgaaccttcataaacatcctagttactgctcactttggtagagttagttcagaaactgactcctgaaaatcaaaagctagaaagatggcttttaaaattgtcagttattacaaacaattatggccatttgactaaattaatgaattagaaatcaaatttagattgtttccttattgttttttaaaattaatttttaaaatataattcacatatcataaatttatccctttagattgtataattcactrgcttttagtgtattcacaaagttccataatcattacggccatctaattccagaactattttatcatccgtgaaagaaactatacacactaatagtcactccccatttccccttcctcctatcccctggcaaccactaatctactttctgtgtttgtgcctgttgtggacatttcatataaatggaatcatacagtatgtggtcttttgtatctggcatctatcatttagcataatgtttacaaagtactttcctactgtagcatgtattagtacttcattttttttgcttgaaaaatattccagtgtatgaatatactacatttagtttatgcattagttaacgaagattgaattgtttctaatttgtggcttttatgactactgtttccatgaacatttacatacacagtttgtatggctatgctttcatttctcttcggtgtatatacctagagtttataattgtcgtatgttgttgctgctrcttctgtttgtttagtgattttcctgatctgattctgtaaaatctgtattcttttttatatatggctactgaaatctctctttggtttgcttaatgatcagctagtgattagataacaatttccttaaatgccctgatctaataagtctcccatcctttgctaatgggctttgtgtgatattggggtatatccttagtgctccaacaggcagttgtaactctgccttagccttcacttcctgcttgtgcagagcctcaaaatctgccagtggtgagaaattatggccctttcaattttttctcaggcaaacacacaactctgcatttgtttctggcctttctgagtcccagaaatatatcagagctttccaaagacccctctggaaattgtgtttcctaatttttccttttaagtgttttggtcagcttttcctttacccagctttcactgctgcttcaggcagttgcgatgttagacagttgccattgatttttgttttttcttttttaacaaatgccctggggagaaggctgtttgcaggagtaagctctgagtcaggtcacataaaaaccaggcttgtgagtggaggtttccagagaactgctagacatgtaaaataatgacagttctctcatggtaagatttttggggagctctaaactattctgctcctctattctccccacctcaatgccccagtgattgttaagctcctgttttctcagctctgtgattatgaggctgttggttttcaaggctgcccaggagctggacaaagggaagcggacttagggcaacttaaaaagccacaaatctcacctttcttattgagattcagccatttttcttgaataaacagtcttcagattgttgcaagcctttggttaatttccagggttctgaaaaaattgattttcacagtttttggttaatttccggtgttctgaaaaagttgattttcacagtttttgctggtattttattgttttatggaataatagattttttgagtttattttgaaagtgcttaacttttctatttgtcattgatatttaaaaaatattagacatgtaacataattttttgccttcttttacttcttttgtagctgggtgtggtggtgtgcacctgtaatcccaggtactcgggaggctgagacaggagaatcacttgaacctgggaggcagaggttgcagtgagccaagattgcgctactgcactccagcctgggtgacagagcgagactccatctcaaaaaaaaatatatatagaaaagatctatctcaagttatttttattgctgaacattaataggtgcttaatattattatatagccaataaacacatgaatgaattattttttgtgtccatactttgtctatttatcatatatgcagcatttattgagcatttactctactaggtagtagggtagagctaaataaggtatggtcactatttcaagaagttgtcgccgggcgcggtggctcacacctgtaatcccagcactttgggaggccgaggcgggtggatcacgaggtcagcgaccatcctggctaacacggtgaaaccccrtctctactaaaaaaatacaacaaaaaattagctgggcatggtggcaggtgcttgtagtcccagctactcgggaggctgaggccggagaatggcgtgaacccaggaagcagagcttgcagtgagtggagattgagctactgcactccagcctgggtgactgagcgagactctgtctcaaaaaaaaaaagaagttgtcagtttactgggcaagattaagaaaaaaatcaacaactaaaagaatgtattgtgatagaaaagtctagtagctgtagaagttttatctttgtacatatcctcagggcctggcacaccagtatttcttacttggactattgcaactagcatcaccatcatcatttttatcttttcttttttttttttttgagatggagttacactcttgttgcccaggctggagtgcaatggcacgatctcggctcaccgcaacctccgcctcccaggttcaagtgattctcctgcctcagcctccctagtagctgggattataggcatgtgccaccacgcccggctaattttgtatttttagtagagacggtgtttctccatgttggtcaggcyggtctcgaactcccgacctcaggtgatccgccygcctcggcctcccaaagtgctgggattacaggcrtgagccacggcgcccagcatcattkttatcttttcaattcattttctataccacaaacaaaatgatctttacagaatgataactaggttatgctaccctgtctctttaaaatccttcaatgattttcatcaaccaccagttcaaatcatgagatttcctttttatggcctacaattcttagaaatatctgatttcatttggtactccatctcataactcattcttctttcatgatgttgagctcattccagttcctagagcacagcataactctttcttgtctcatggtctttgcacatattgtttcttttgctgggaatatctgttctgcaactctttgcatagctgacttcagatcattctagtgtcagcttaaatattactcagagtggcttccctgatcacctgcctctcattctaaattatatactctcattttactctatgcaatttctcttgcaatctttatcacaggatttgcatatttgtatatttgtaactatattttatgtatatttgtttaatctctgtgcagctaaaatataatctttgggaggaatggttctttttgtccatagtatgtcctcagtaaatattcaaaaataaattaatcagtgaatagaagacattcagtcagaatatatcttcatctgaacttaggggatgcccagttctaccaggtaataatgcctaaacaatctcgaaggagtagtttgtgttagatgaaaatggtttggtattctaggataacaatagtaacatcaagcrcaaaggcccagaagtgtgagaaaataaggcttaggagagcagttctcagactttttgattttaaaatcttgtaactcttaaaaattattgaggacctcaagggggattttttaaaatgtaggctattatctatcaatatttactacattagaattaaaactgagaaattaagaaaatatgtaatttacttaaaaataactatgttaaataatacatctttcatgaaaaataaccatattttccaaaaaaaattgtgagaagaattactttatatcaaagacagctaggttctcataccttcttcattcaatctgttgcactattttgtattagctgaagtgtggttttcataccttcttcattcagtctgttgcattattttgtattagttgaagtgtgtaaagaaggtctgacctcactcagataagtggttggaaaagaaaaaaagcatatttattattattaacaccaactttatcagaaagtctttaagtattgagaagctgttaaactcacacaaataatacaaaatttgaaatttttgcttgaaagcttgaattttatcattggcaacaaatattgctggttgttttccttaaagcgatgggcttgcktttttcrtttttgagaaaatgttgtccaaatgccaagtcttaataaccatagttattcaagggtggtgggtarttaacttgctcaggatcacatagctagtaagtggcagagctrggtctagagaccagatcttttgattatattctattatattgccctatgtctaaattatttggacttgccaaaccatgtcttacaataatgtattgtggtgtttttcctagagagcatgaatggtttaaacaagatttgcccagttacttatttcctgaagacccttcctatgatgctaacgtcattgatgatgaggctgtgaaagaagtgtgtgaaaaatttgaatgtacagaatcagaagtaatgaacagtttatatagtggtgaccctcaagaccagcttgcagtggcttatcatcttatcattgacaatcggagaataatgaaccaagccagtgagttctacctcgcctctagtcctccatctggttcttttatggatgatagtgccatgcatattcccccaggcctgaaacctcatccagaaaggatgccacctcttatagcagacagccccaaagcaagatgtccattggatgcactgaatacgactaagcccaaatctttagctgtgaaaaaagccaagtggcatcttggaatccgaagtcagagcaaaccgtatgacattatggctgaagtttaccgagctatgaagcagctggattttgaatggaaggtaggaaattataatgtaataagatcatttgtagaagccatttttctatattataagctgctctgagctcctgagttgagyattaagcccaactttttctagtaatatgctatgcacattaaaaacaaaacaaataacctctataaggatgaaaagtggttgatactgggaaccaacatattttgaattatagaagtgttcttggtcaagaaaaaagtaatcaactagaaatcatctgagaaaatagcttaccagtttcagcatgcatcatagcaatgaaaaatcatgagtgtcttcaaagatagtatgtttttactttctctttttttttttagggaggttatttttcttttctcttttttttaggtgacagaggcaggtggctgtaatagctagtggttgatacaaattatatcatcaggacatatttattcagtcaataaacacttttctccaagttgtgatattctcttttatttggctagtgcttttaatacttagagtacattttccttactctcagcccacagtttgcttttcttaaaaattagtgctcaatttcatttgagttctatttgaatatatgtgtggggaggggcattttttcttttcagatatgcctttcactcttgttcttttcttgaggattgtgaacttttaaaggaagaagaaaaatgtgcaaacttaccacataaatatgcatttgacgtgttcaaataaatcagtcattttcattttattatttgtacatgaaatgaatattttcttaaaatcatttaaaaaacagatctctctgttttggagcagtcttatttagttaaaaaagagacgttaacatttttaaaattctgtactgaaacattttgaaattagtaccacagatgttttgaaaacccaaagcagtgttgtttttttgtttattttttgttgttgttgttgtttgtttttttgagacagggtctcactctgttgcccaggctggagtgcagtggcgcgatcttggctcactgcaacccagggtcaggctatcctctcacctcagcctccctagtagctgggactacaggcgcctgccaccacactcggctgattttttttgtatgtttttgtagagatggggtttcaccatgttgcccaggctggtctcaagctccagggctcaggcggtccacccaccttggcctcccaaagtgttggaattacaggcgtgagccactgtgcctggtcctctttgttccttctactccataatcatccatgaacatgttcaggcagagactggacaaccaaattagaattgatgttttagagttgatgcttatctagagtgaaagctggaccctatgtaatctctgggttctctttaagtttttcctttatctttcacttttttcttcagtaccccaaatttattcaagtagcttttcctttaaatcttaattgccatacagtactgcttagtggggattaaataaatactaaagtgaactaccagtaatataaaaaaattattcgtattcctttcctacctcacccctattaattatttgttttgactttttttgcataaaaaggtagatattttgtagtttattatttttattgatttttcactttaggtagtgaatgcataccatcttcgtgtaagaagaaaaaatccagtgactggcaattacgtgaaaatgagcttacaactttacctggttgataacaggagctatcttttggactttaaaagcattgatggtaaggaagctatgcatgcatgagctctgagaagataaaacttggcactagttgaccagatgttaaaatcatctcgaagacatccggtgggtaggtcctgcactggtttttaagcaatctagacttaaccaaaatgtaagtgaagtgaaaaggatgaaagacatgttgaatacctcttacctggcatctttccacaagaagtatctccgtggcgtaaaagaatcatttgaagtgttggccgtggagcacaagtaaggaacaacagggaagcaggttttacttttcaaaattaactgacttgtcagattctttgtcatatttctccattcatattttattagttagtattatagtgtctaaactttctccttcatcacctttcctcatcctgggtggccagggcgaccaaataggtctccattgggatttgggttggatttaggtacccatggcaatcaaggagccaaaggcgtcagggaaaattgtcatgtccaagaacttagtgtgtgccaagaattaaacttgggtaaaccaaatctgattattcatttcagaggcccaagtgggataaaaccagaataaactaagggtcaggtgctggatggaacaagaatggaacggagtttagagttagggaagttgttttaaacgaagcatttaaattttactcttgaactaccatcaactatgtatggtagtgtttatatggatcccagacctrtttcatcgaaattacatgttgttgttattaaaacgcagatccctgggaaccactccagacctattaaatcagaatttctggagattggtcctgggaatcgtagaaaatgcagttttaacaagatttctctcactttgccctccacctccccaaggcaatatatgatggtgacttttgtttttaccttagtgattttttttgttgatatgctagaagaaaataagttgtcaaggatatgctttcttcacatgcagagatatcagtttgattccaatatcaatgccgattactccaatttgagcaggacttaggggccacattttgactgtgtgcaagtcttgtgattggtagcgatgtttgttatgattgttggaaggaagaagactgtgtttctacaacacagaaacatgacattcattattaagttgcccttgctcagatgtgtttayttaatattctgaatatcataaattcataggaagggcttgggcatatatactttccatataaattgctcttctttggtccatttcagatgaagtagtggagcagagatctggttcctcaacacctcagcgttcctgttctgctgctggcttacacagaccaagatcaagttttgattccacaactgcagagagccattcactttctggctctctcactggctctttgaccggaagcacattgtcttcagtttcacctcgcctgggcagtcacaccatggatttttttgaaatgtgtgccagtctgattactactttagcccgttgatctgtctctagtttctttctgttattgcactatgaaaatcagttatattctttaaatttttatcttacttttggataatatccactgcaatactaattgagaaacatgaattatttccaggggcacacaatgctattgaaattactgaaaacaaaatatctgacatcttatttacttgtagaaatctgtaattctattgtgcctrtgataaattcacataggcaatatctttaataggttaatatcaatgaagatttttaattacaataatgagttcactacagacgattaacacaccacactggcgaaccatctcaatgtaagggtggtttggcaacacctccttgctttgctgtttggtgtaggtaaatctagtttacttcctaaatttcagtaggctttatgctgtgtttatgcccccaatttattttaacaaaagaagattaaaaagtaaaagaaccacgagtaagatattatttaaatgttgaaatcttaaaaacctgcctccaagatttcagaagccaagtttttctaacagtatttgtacaaatactgcctagtgtattcaacagaaggactgtggtcatgtaacaggtaaccacaattttcaggtttcttaaaaacagctgtaactaactcaggatttttatcttgagatttccctgaataatatatttatcttaagagccttcaagtttcaaattaatattggaacatctggaattgcaacaacttttgtcttttacataaacttacgtcatttaaaaaatgtcttcaaaatctacctttctcaaattctttttgcctctatttatttttgcatttcaccaacagtgataaaatagttaaatgaaacaaagcaaagtatcaacagtcccttaaatgagaatccttatctttgatctttattttctgtgttaggtgttagggtcctggtgcagctcataatgctaattcttcattggaagccactcccttcacctcacctcacctagtcactattgtctttgttcattgtttgatcctgagtggttgattgatatagctttgaatcttttctagtccaagtttgaaaacactgttctggccctaagggctggctatgacctttactgttgaacctgatagggcagggaagctttgaacatcaagaaaaaatttttatcttaaataaataaatatatatattcacacaccagtgcttttaagcaaaaaccagtttttttgtttgtttgttttgctttgtgcaggttttctttaagattaaaaaaacacaaactatagcagggtagataatagtttattgattatattttgttttagtaaaagtatttaattttaaattctgtgtaatttatctaatttgtatttattcatttgttatttttatgttgtaattaacacttatttacctggattaccctaaaaaaattaagctcttgaaaacaaaaaaatgacattaccttgacaggcttctctttgccaaaagtaatgtatgttctgccaagaagcaaatgagaatgttagactaagtttctcctgtgttagtggaaaacaagtgtgtctatctttaaatattctttgaatcaggagtttgcgttgtgtcacatcatatggctttgcagatcttttaaaaactgatgttaaataacttataagtccaacttcttaatatcaagataaatgaatagttcaccaatttgggaaggagggcgggttgcaatttgagatagtttaaggtttaattattgaaagactgccatcttgtggccccaaaaggtaatttttacatgattatttgtatagtgataagcagtcctgctgtgttagcctggtccattatagatatggcatagttttgggttctctaaatgggtccatacctcttttgggaaaaaacagggccacctcataatatttgcctgattatgaatggaattaccttagaaataaggaactaatcagattacttaaccccaatgacaaaatccacaaaaattttgaaggcagagaaacagaaggaatccagtgatgttttagctccattagtctaataggtcagatattaaaaaattgttcatatcaaaattaccttatatggattattgccatgttttttgagagttaattatttactgttttctaattcttgccagtatttatgaacagctgtagcttgatatttacctactgaattttaggagaactaatggtcacagtttgggttcttttatgtgtatgtttttaaaacagctattttgtgaatctaggtggttggtttttagaagatttcaggagatgcagtccagcacaattagagctggaacattgttacagcaggctttttgttgctcatgggcagatagagggaaagaatcagttgttagccccaaatttccacatttcagtgttgtaaactctgaatgtgataggtagatgtgggctaagaataatttcctccagtgaagacacgggagaagagcttctattatgaggttatagataaggccttagttatatcatggaaatggactccatgtagttctagaactgcatttcccaaagtatatcctgtgagatgctccacagaaaaaatgattgcatggactaagtttgaaaaatgttgcatgctactcttcccctcgaagatgacagtggatgtcagcattaaagactttgacaggtctttctgtgaaaaaaagaaagccacataactttgttgaactttgcccaaattaatttttcattttaaaaaacttaatagcccatgaaaagcaaatttgggaaatacattttttaggaaaatactgtcccagaatgccataattagggtagttaataattaacacttccatttctcttactggttgttgggagaatctgattgaaaattagaattactttgttttaacttgcagacatgttcatcgtgagtgaatgctggattaaatagaattttctgtgtctgcaacttgtttcatgacaccttggttttcttaatcatcttgtattattatttgagtgcaacattattcttatgcatgggtgactgaaaaacctgaaacaagattacttgttaaaaaaaagtctaagagactaatgactcatgcttatggctcagtgggtaatgaatcagtgtcactgattcttacttttaaaatgtgtagtcagtgaacattttctaaatacttttctttgggataccatatgaagatctaattccttatgtttcagtgtaggaacagctaccttctcaaatagaatatgcagggagggaagtaggcaaaccatttacaagttgggtttttgttttgattaacctgttaagagacacttttgtaatctctagtgtttacattcctttatactagctatctataaagagaatccagaaggctaaattaatcagaaataattatatttctatgtcagggtattggctatatgtagcatgaacaattctccattttctgcaaatgggtttttcaggacagttttataattctgagtttgctttttcttattccctagacagtttgtactcagggaatacaaattgatttttactgttaaatgagacatagtttagaaaaaatcataagcaactattgtagatttttgatctgtttggatttatctgtagcattgaataatgtgcagtgtactgagttaatgtaggcacctcactttggatttataaaatgtaaaaacctggaacatgcctgccacagacaccactttgtctattcaccgggtactaatttacatcctattaatggttgtaaaagctgagtgtctaaatgctagacatgttcacaattttgtctgtttttgtttatttgtttttaagacccaaaacttttcaatcttgcatttatttacttggttctcctgtgtcaccctgtggctttttaaatagggaatgtaatttattttaatagtagttctcaaagactctattaaaaactctggacgagggatatgtgcaatctgttggtaagtcacatcctatgtttggcctcatttttataactcctaaaatgagaaaggtagattttaacacttctaaggtacctttgagctttaaagttcttttctgcttttccatatgatttgtgttagtgttcactttttatatatttagagtttttatatgagtgtgaatgtttctgttttgatttggtgaggcatgtcagaggtatatacttgaatatttttctaaatacagctgctggaggaatgcaaatggcaaaaatcatccagaaaaccaaacacggtgaaacatcacatccatttggcatgaagcaaagcattacaaatttggagtgatgaaagtgttccatatattttttatagtgatttttcgatctagagacccttcatattgtttacttactattacaataactttgagaggtaaccagagaaagcatttttgccatttccagatgaggaagcaggaccagaaagctcttcataaagctttaacaccatacaagtatccagcagtgatcaattgctctttataggaaaccacctttcctctggggaagaacagtctgaattaataaaacatcagagtggttgagtagtaaaaataaacacagatgtattgctttcaagtcttagagtgacataaagtagtcttaaataaatagttcttagtttattttaagcagttgattgtactaacgagatgtaattatctgaagtatttatgattagcatattggtttttataagtatttctgagttattgagggtgcttaaaaatgctgaagaaactttaaaacatgattcttcttataattttatgtgattcttatagcacaatcatttttgaaaaaggaaaactaggctgggtgtagtggctcatgcctataatcccagcactttgggaggccaaagtgggtggatcacccgagttcaggagttcgagaccagtctggccaacatggtgaaacctcgtctctactaaaaataccaaaattatccggtgtggtgacaggctgcttgtaatcccagctactcgggaggctgaggcacgggaatctcttgaacctgggaggcagagattgcaataagccaagatcatgccactgcatgccagcctgggtgacagcacaagactgtctcaaaaaaaaacaaaaaaaggaaaaagaaaactagccccagtccctgtctaaattgttatagtttttgactattatctgaattagtcttatccaaatttcatatgcagattgatttttcattttgtatgtatattacatgatataactattttcatagaatatatttctaatttacaaacactgaattattagcttgatagagtttctcccaaaccttataaaactttgaaatgtacttatgtttgagctttaaaaattataaaaacttcatttaaacaagttgctggcatcattactagcctttccacctataattatgatgcatttgatgccactgaacagtaatagcacaaagaacaggtcacacagtctagactggattgagttttaattaaacttcttcatccatagcctgataagaatcaggctgggtctagaagagttatcagactgtaggcctgtattaattttgcaagctaatgttaatgtttactgccagccttgcatagcaatgccagtttgcagttgtgactatgatgtgacttttggtaaaaatggtttatatctaaagtagtttagattttatggaagtggctcttgattgtttggacaagcagggtaggtaaatttcaattacgtttgaagtgtaattaaatcctagaatagagcactctccagaaaaaaaaatgaaaaaagaatttggagaatatcctggcatgaaaacttttttgaataatacgtagaattttgacaaggttcatacagtgcatacagtgtgaccttttctgaggtgggcagggagggttgctacgttgtgttgatttaaaatttcaaggaggaacaaaaacattctagccaaggagaattgcattgttatttttttttctactaatttaaacgtgcatttttcacagttacacatttaagttttgctaccaaaaatggccatttttctagacagataacattttcctaaagtggaagagagatccactgttctaaaaaaaaaaaaaaaaaaaaacactaaattgtgccttctcccttaaattataagaagagtaatagtaaaaacttgtttaaactatattttctttttttctaatccctctcagttctccttagatctgcctcctacaaatgatcatgttgtttgcatctgcctgattgagttcccttggtcaaacctctccctatcactatcagaagttgttcactaaatgtattttcctatttctttcatgttgattgactttataagtcaccttggtaaacataacatttggctaccttctcatgctttataaatgaatttgatgaatggcagtttttatattttaaccctttaaaaagtttgtcaaggaaacaactcagagctaagaacaaaatctaacttggaatcagtttcttcctttggctgctgaagcagcagcaagtcacgtaacctcatttagttttttgatttacaaaatgtggataataacctacctcacagatgtgtgtgagcaactgtttgaaagcccttgtttaaatacagggtttatatccccacattcaatgtaaattcctttttttaaaaaaaataagtatctttgatactgataggatgagtatcttgattttt

SEQ ID NO: 97699 - DNA, 131853 bp, Homo sapiens
tccatggtcagaaaaaagggcttggctgttgccgtggtgaacagaaaggtggccactgtggctggcccatagagagccagaagagtggtgccagatggagggaagggacaggctggagacagccccagcagagccttatttctgaagataaggaatttggaattcataagtgcaatgggaagctattgaaaaacacaggtctgattgatattatacaaagattattttggctgccatttggagaataagttgctgtattagtcagggttctctagagggacagaactaataggatacacacacacatacacacacacacacacatatatatatataaaggggagtttattaagtattaacttacatgatcacaagttcccacaataggctgcctgcaagcttgaggaacaaggagagccagtccgagtctcaaaactgaagaatctggagtctgatgttcgaggcaggaagcatccagcacaggagaaagatgtaggctgggaggctaggccagtctcgctttttcatgtttttctgcctgctttttatttgctggcagccgattaggtgatgccgaacagattaagggtgggtctgccttccccagcccactgattcaaatgttgatctcctttggcaacaccctcatagacacacccaggatcaatactttgcatccttcaatccaatcaagttgacactcaatattaaacatcacaattgcaatcgaacaagagtgaaagtagggagacttcctatgcataggacagattctagattttccttatgatacagagaaatataagacataaacttgtcttcaaagacagggcaatatgcttggggaaacaacacaattacatataagcagatattagactacataagatataataaactgtgttctaggagaatgacattcattagatttcactcaacatatatttattgagtgtccattaagtgttaggcattgtgtcaatataggaacaaaagaacactacattaagtacataaagagatcagaatcacacatggaataaatgacaaaaatgggtataggttatgctgggagggcacaaatgagagagtggtcaattctgtctaatgaagtagttgggaaagaattaataaagacagagacattttattcgattcttaaaagatagacaagaacccatatttatctggcaaataagttggaagatggttaatgtaggaaaagggagagaagttggggtcatcacatcaggcaaaagaaggggattgagcaaaggtcaacaggtatgcagaagaagtgcacatttgcagattatatgggttcacagcaagagtttggaggaagactatgtggtggagagttttgtttttattttttatggctccctaggccataatcctcttttctatgtgtgggggaatatgttactgtgtgagttggggagacagagtccaattttcctttatgatagctctctctaagccctagtgctgaggcctagcagggtttggggatcattaattcgtcctggtataaaactgaatagctgttggattttctgtagcagtattcagcataccaggtataggagcatggttcaattcatttaatattgtgtatattaggagtggggattgtgggagctagaaaattcaaggaagacagaagtgatttttggctggaatggttaaggaaggtctaaggaggtgagggatttttattcagaccttgaaatgcaggcaggagtaagtagacttactgggaggggaagttagcagtggaaggaatactgagtaaaagaatggcaaaggatacaggatcagatgtgggaacagatgaggcatatgggagatctaataaaccagtctggctaacataaagccataatggagggggtgttgaaagggtacatctgataaagtttggataaagtacaaattccttagccttgaattccaagtcatatcttccaagcaatgaggatctgttgaaggttattgtgtaggagagtgattaagattaatgtggtggcaatttgctataaggatgagaagaaaattgactccaggcaggaaaactgggttaggaggctggcaaaggaatctaacattcagggagcaataagagaggaaaggaagggactgagaagcaatagacagaatgtattccctcctctgtgctcctggctcttttcacactatagaactttcactctcaatcatgaatattcacataaatgtttatctctccccaattgtttcttcctgcttccatttcctccccatttttatctctgtctctcccacactgtttctttttctttatttctgtgttaattatttaattcatcaaatatttattatttacataatggacattgtacaagacactaaaggttcagagaagggaattcagttctccttggaaaaccaaagaggggctcaaccacaaaccaagtagaagtttctgccagaatttaggggtgcatagaggcctttcatctatattcatgcatcgcctgaacccaacctagaaaaatgacaaggaagtcatcaggggagcaggtagaggaggatgcagaggtgcagcagggaactgctggtcatttggcgaactatgtcacaggacctgtgtgcaggagtgatgaaccatgattggagaagttagcagggccttgtgtatcatgctgaagaactaaggtttattccaaatgtgttggaggttcttccagaattttacatagaagaataatatcagatatttttagagtcagcaaaactgaggatttatactctcaggctctggagtcagattgagaacagagtgttactcagggttagccacttggtggccgtgtgaccttggacaaattacctagcctttcagcctcagtttcttctctaaaatactttttttaaaaaaaaatactaccttctttgtaggcattgttttttatttggtgagaattaaatgatatgttatttgtaacattctcttatttttacctgatattgacaaattattattgtatattttatggggtacaaagtaatgctgtgatacatgtatacagtgtagaattattgactcaagctaattaacatatccacagtctcgaatggaatacttatcatttattcctcctgtctaactgaaacattgtacccttcaaccaacatctccccattcccctgattccccagcttccggtaaccaccattctgctctctgcttctatgtgttggattttttttttttttagcttccacatataagtcagaacatgcagtatttgcctccatgtctggtttatttcattagcataaagtccttcaggttcattcatgttgtcacaaatgacaagatttcctgcttctttgaggctgaataggtttctaatgtgtatatataccatattttcttgtccattcatcaattgatgaacactcagattgattccataacttgactgttttgaatagtgctgcaataaacataggagttcaatatctctcagacttcctgatttcaaatcttttggatacataccctggagtagaattcctggatgttatttctaacattcttagtacagtgcctggcacatagaaagctttccaaacagatagctactcttactagtaatgactaggaatgacttatcacctcagtcattgttactattataaaaactactctataaactattatgaacaccactcatcttggtgtgcaagatgagccagagatgggaataagctggaggaagggagatcagttaggaggcctctggaataatctaggaaagaatattctgttttctgtctggtgcccagctgtcgctcagaaggagctttaaaaaaagtttgtggaataaatgaaaaggaagactgagcagaattcagtgattgattagctcaaagaaaccagggagcaaacgaaagataactgcaagacttggagattgagtgactggagaattctggtactatggacacaaagaaaccttctctctttccacccctcagctctgcgttctcaggccattgctcacctgacatctttggatggttggccgctttttgaatttcactcacttgctcaatgactgtggtgtgcaggtctgctgctttgtctttttccagaatgccttgtcataactatagtaaaggtatatctgaatttagaaccccgacaattcaaaaatctaaaaccccacttacaaattgggtttgaatacatctctcaggttgcttccaaatctttctttcttttcttttctttttttttttttcatttttagatcatgtagatgtctcagggaagacttcagcatctgtgcctctgttggggcattaatagaatcctatgcttttacatccattattgtatttggaacaaaatatcctttatggtcatttggtattatatattttctgttttgtatataatatgaaattacatatacagtctattttaggtctcatatcattataaaacaaaacaacaacagcaacaacaaaaatttggctcagcttttggcttttatacttctgtcaacttgttatttgtactctgactccaaagacaattggagaaacttgggagcataacacaagattttattttaaccaattgatctgtccactgctatggactgatttttgcacaaagtaatagcaggttgggctgatgccatggttctctgattttctttttcttttcttttcttttctttctttctttctttccttctttctttcttttctttctttttctttcttttctttcttctttctttctttcttcctttctttcttcctttttcttgagtttgattattctgattactaaatgccttgcaatttgaaaaagaacagaagttatgagcttgtactaggaataggttagccaggttcaagggtctcacaacatttagaaagattgtttttaagaaagaaataaaaaaaaagtcttatagagagatcagtgacacttcataaacaagtttgcaatgctgtctactagtataaatgaccgtacgttgatctgccagactcattgcccggctgtttttgccagggcacatatttgtgagacagctgctccgaactagggaaggtcaagcaaaaaccactgcctgtctagagatggctgtcctgatgtcagtctcattagttcctgagttcttgccaagttagtaagaactagcatagatctggaggtcaaagtttagcagaaagagcccccacagcagtgtgcaaagagctctttttctgttctactctttttttctctactggtcacctagttggtgtgtagcgtgtgtgtgtgtgtgtgtgtgtgtgtgtgtgtgtttcccaaatagtacttgaaggataggaaattaaatgtctgtgggaaaaagcaacattttgggttctcagcattttagtcagctgctttcttacttttccagactgtgactattctttgaagctattaaaatctattcttggtaatgagaaaagggagtgacttgatggttcttttccaattgctctgtgtctgacaagaaatacctaaatactttaatttgcctttttaaatttcccctagtggtggcaaaacaattctactcctatttgtcagggaaaaaaatctctgccgtgaatttcagtgctgggaacataacaagacaaaaagctacctgggctagcctgtttctccaggatgaaacaaaaggaatatagattttagcggctgctttaacagtttggtaaaggatctggtctatcttgggtgtgggagatgggaggggtaaagaggtcagaataccatttagatcacagacagaaagaaaccaggaagtaaggggaaattattacagtctgttcatagctcagaatgttaaaggcaacagcctctgctggttggttattcattagcaaaaaggagagagccgtccagatccggactggtcgaaagacaggaacagacttgaaacagggggagagctcctggcgaaagcaagacgtggaggttttaccaggggttagtagcttcctcttgctaactttttattgggacaaaaggcaagatggcaccattctgttctcagatatttgtctaaataaagcccttttaattttattttatttttgttgtgggattcttaagcagataagaagaaaagacaccttcctagtgagcagctgcccagctcctgctcagttttgcctcggggtagcacctccagccacagaaagcaagccggtaagtctctccaggtaggacttgctgcaacccagctgctggactgatctgaaacgggactttgcatactctccgaagtatggtgagttggtgctgacttcaaagttgcctggtgaaggaagataaggtggatcgcagagactaaggggagagggagaagccctgctcctcttctccccaccaaggcacaatgagcaacatctgtcagaggctctgggagtacctagaaccctatctcccctgtttgtccacggaggcagacaagtcaaccgtgattgaaaatccaggggccctttgctctccccagtcacagaggcatggccactactttgtggctttgtttgattaccaggctcggactgctgaggacttgagcttccgagcaggtgacaaacttcaagttctggacactttgcatgagggctggtggtttgccagacacttggagaaaagacgagatggctccagtcagcaactacaaggctatattccttctaactacgtggctgaggacagaagcctacaggcagagcygtgagtagtacaaacttatacttaatttctgaactctctgagggctgggtaatgagttttcctttctacttctctacaaccccctaatgtccaaagagttgcctaaaaagtatgaggaagtactggcaagaaaccactaattgaaacacacctccccygctaagtgagtgtgaaactggccagtaattgttgttgagatgacttcaattacagtatgtacayccacaggtccagggtgtattttcaaaataaacaaatgatgtgtttaatactgtaccttctctttggctgtaaaataactcatgcctcactttagcaataaaattgcattttgtttgaaggtaaattataagacttcccttaatgatattctcaaatctaaacttcagattcttttttttaaaaaaaacttttgaaacattccagggtaatatatcaactctagccctagctctaatcctaatccctttcattctgatgggaatatacagggctaatgtagaagacaacacttagaagatactaatgttctcagtgacatcatgatatagatttttttttaattcccagatcctgagatatgctacccaaattatgatatcttttggtttttattatgattagaaactggccagctacagacatttggtaaattttgataggaaaaaggacaacatctccttgaagaggagataaagactttatcctggtatttgaatgaaatatgaattatattgcaacaaaagaggaaagtttttatgtacttattcachcatccatccatccatccatccatccacctaccacccctccaagtgccaggcatagacagtagtgggcctggtgagttggggagggtaaaggagattattctagtagtgactgaatacaaagtggataaaacatagtcttgacaatggatacttggggtctggtgggttgggaagcaaatggagactgtcattggccctgatctcattgcttcctgaatccagtgaaaccttakactgggaatgtctttcaaaaaatgtactcattttttttttttttttttttttgagacggagtctcgctctgtcscccaggctggagtgcagtggcgcgatctcggctcactgcaagctccgcctcccgggttcacgccattctcctgcctcagccttccaagtagctgggactacaggcgcctgccaccacgcccggctaatttttttgtatttttagtagagacggggtttcaccgtgttagccgggatggtctcgatctcctgacctcgtgatccgcccgcctcggcctcccaaagtgctgggattacaggcgtgagccaccgcgcccggccaaaatggactcattttatagaatggtttcttaatagggaaaccattggagattctcttatgttctcatgtaagtgtttcttatttttatgtgagcgtcccttactggtccagggaataagataataataaatagccatagagcattgtttctgctttccaaactcatacatcacatatgaagggaggtttgacgagttttgagttttgagattcttttcaacaccaagaacctataaatgtttagaagggtcttaatttatgcttaaatagaaatgaattgaaatatacttttaatgaatggaattgatcagttatcaagtgggaaaatcacctgtgtgaacatttgctttctgtgataatctacaggaaatatctttatatattggatacacttatgtgcatttatctgttttcactactttatgatttctatgtcctgtatggcattatgcatattttatatttggcataacatgtatattataataataatatattaatgtttcatgccttgaattcataatctgttagttttaaatatattcaactcatataactacttaggacctcaatttcctcatctgcaactctctggggttgccatgaccaatggatttcctgactatctgggaacaggagctcttatgttcgtatgtagtggttcagttacattcatgcttgactgtattagaaatgctgaagaaagcaaattaactgaaacaagtcaagcaatccgaaggtatcatattctgggtaaaaggcttgagagcagtgttcttattaatttagattttctttgcctacaaacacaaaataaggcaactaaattattatggctatttttgattctcagagtcatttgtagccaataatattttttccctctgcacattaccttgacctttcttcttggaattggttctcagcagcattcctacctgtcagtaccattctagatctctgtagttagctttccttgggatcttcacatccactggaataaaaaccatgatgcccagaaaatgctgccactctgcctcctggctggaacaggctacttgttttcttttaagtgcacaccatggtcttcacctgtgaacctggcttacttctgaagtttcttgtcaccgtaaggcaaaattgcttcaatactcttagtgcaagtagctgtagcttctagaattcccctccatctcaaatagaagcgatttttactgaacagccttctgcgtgagtgtgtccaagtggctcacacagtactttaacacttgaagaattatataaaaacaacttattttaatattttttcttcagtgagttttttcaaaagtctatttttttctcctgaatgctgtgaaaattaacgtaattttttaaaatcatgagctcagtaagttgacttaaggaaagattattgtttatatccacatgtatgggatgagtaggcaatgggaaaccaatgaaagctgtcatctaattcctaattagaccagtttaatgcaacgtatgttagtatttgtgtttttatgtctttacttttgatgtgcatctgtaagaagaaactgcaaatacttctggagttattggtgccagggaaaattagtttaaggctttagtttgcagtttgtttgttttcttttatacttggaagtagagatgttgaaaaacaaactattgtttaaaaagcccaatttactaattcttatcccacttagaaatgcttttcacctttactgaatatcttccactaagtgatataataaaccaattcttgaagatttattttgtctttatgaagaatcattagatttatcttatcttcgacttgaatttattcctagctcattttagagatgagtctttttcttcaacatcttcaatgtgaaatccctcgaaaaccttgcccttagggtcttattaatcagaactttctttaatattttatttatggtgtttttaaagatataaagttcacataaaaataatgatgtggaaataacatataaatattagaaccaaaagtaatggctttaaatttcattgctttaattgtaaaaaattcaagtattgcaaaatattgataaaaagcaatatgatcagcaataatattagacgtagcatcatttatctgcaaagagtttaaaaagtttttttgcttagggaggatcacctgtgtccaggagttcaagaacaggctgagcaacatagtgagacccagtctctacaaaaaaattaaaaaatttgctaggcatggtggcacaaacctgtagtcccagctactcgagagagtgaggctggggcaggaagactgcttaaacctgggaggttgaggctgcagcaagctatggttgtgccactgcactccaggctgggtgacagagccagaccctatctcgaatccccaccaaccaaaaaaaaaaaaaaaaaccaaatgaacaattttttgcttaattgttaaagtgtaccttaggtgttgtctaacatacttttgtgttaaattgaactagggtcagagatgagatcagtttaatctcccagaaaggggattggtaggaggggaatggggtggacataatcacataagccagccactgatgatttctgcttcgccaacttgaccacgcaagccaagggcagcagttgagatagctgatttgactcccctttgcatgttaagtttaagttatgataacaacaatgaaatgtgctgctgaacttctgactccatacacttctcaaagacataaatgaagattctattaagaaaattagatcactacaatcatctctaaagtttattgtttattaagctccacatttttctaggtcatattcttgtgtatcttcttacttgtgaatcagtaattttgtcttaagtccattctataggcctggtatggtgctaagtgaatgactcagcaaaggcagaggaattagtatttgctttgttatatatatataatttggctttatgttaagaaatatttccacacttatgtgtgaaacaataaaggccataaagtttatttctgtctcctaaatttgagcatggcatacctttgtgggtaggagggctagaggagccacccatactgacctacgatggtgtctttgtatctcttgttagcactttagcaggggaagaagcaaagtactggattttgtagaaagtttttcttctcctcttattactgtgaaaggtagataatttccaattcctcatctattcatcatttcagtggcttccttgaaaaagaaagcaagaataaatatttgtaacttgtagttttgttggtagtttatgattatggtataaaaatgttagaatgttctgaagtataaaagtaatgggatttttctccatgtatttaggccatattttcctgcttgtgctgctctttagtgtgtcagactagagttctttgaagattttatctaacctatgatgattgccattgtcgagcttgaaagcagcatggtgaaacaaagtggtatattcttggaaagattcttatatcacctatatcaccgttttaaaatagagtgaggctttgctattttgtcatttgaatgctgtggaatttaataattattgaatacaaattgtacatagtgtgcctaatcattttcaacttaaatgtcagcagatttttttcttagctgggatatgagaccagcttttgcatcttaattataggtatagaaacaatgtggtttaaaaattaacattacccttaatacattttaaaagtcatcagaatattcataatccactctgacataatagatgttatctactttgagaagtttgaattattaaaagtcaccagtgtgcgatcagttccacaattgttctttatctagatcatttattttgttccctttgtgtaagttgtcagggaagactaaatgcccatgtgtcaaaatgaaaataatacctagtaataaatgcctgaaaataatgcctggcatttctgggttctctcctctaagacaaagtatacttactataattttagaaatgaaataaaaaggtatttatatatataaataacactatatttataaaatatagtattatactatattatactatataatatataatatatagtataatattataatagtataatatactattatatattatatatattatattatatataatatagtataaataatatataatatactatataaataatactatatttataaaaaatacactataaatatacatatggttgtttatcaagtgttttggattaatcaagataaaaattttagcacaaatcatttaagtcaaccaaaagcatatttaaatgccatgagattaattagcgttactgtccccatcctttatttttcaccatatgttatttatgatgatgtaaaataagaatatgacaaatacgtttttaaaataatttatcaaaaaatttcatctcaggtataatattatttgacttcatgttaatataactgtactgtttatgttaatataactaactcaatttgttatataataaatttttacataaattgccactatttttaagaaaaataattaactactaaattagaatatatttcataaaaataatagcaaaatcatagatgtgaagaaaagagcaaccaattcaactatgttaaaatcccagttgaagtttaattaatacctgtgtcaagtaattaatagcagtaaagcttgattacatgcatctcaaagtacctttgagaaccagtgaagtgacatagtatggcatcattaaaatgagttaggagtcttttctaggaaaagtagcaacattgataatactttaaaatttccaattgcaatatgtcattcagaatcactctttagtaaaagtattgattatttttgcttttcaggttttctacaaattactaacaatgggaaaaatcttatgtgagtgaaataaatcattaactactgagctccagtcttaaagattagaacccaaattttaacttgatcaaatttattctttgaaaagaaaatgttctattggattcaaattggtttacttttgttcaaatgaattaatttaattccatggtttgtctctgcagatacatcctagtgttgctttttgatgaatagaagtcaagaatctcaccaaactgagattgtcaaagtagacacaaccttctatacagtaaagcaggactaaattcttttagcagctactatatgctgtgcactttcattgttcttgaggttaccaaaagaggaaaaaccaacaaaactttgcctcaattaattcttgttgcagctcagaaaattcccttcagattttctaactaccaatacaatagtgagaacctatatgggcaatataaataagagcagcctttgggttcttctggtgaatgtttcaactagatccaaacattagtgtatggagttttactgaaatataatgctggttaccctttttgacctagcctatggtatgcctaagaacataaaatataggctcagatgatctagatttgaatttgactctgtaatgtcttagctgtgtgagcctgagcaaattacttgacccctctgcctcagtttctcatctgttaaataggaatcacagtgacacctatcttataggatcattatgtgacataaatgagactgtgcagaaagggtgcactgcagagaacctgacacatagtaaggtttaataaatattatgtttcatttagttggcagctcctcttttacttctgtctaaatggatcatactttacacccccactctagtctgagctcacaatattctttccctgtaacaggtgtcctggacattgagtgtctttcagtcttcgaccgtctgcactctccctcacctgcagccttggtcttcagatgggctattctctctgcctataaccctctccttcctctttttttcctgaccagcttaacttatccttcaagtctcaccctatttgttcctccttccccaagcctttcctgacatactagactacatgaggtgttcctgcctagagttgttagcaccctttgtctttactgctaatttattttctgcagtgctgtaaactatggatgtgggtagtggaaaggtgagccattgctcctcccagagcttagtatgatacctgtgaataataagcactgattggrtagatgaataactaaatgaatgattgcttatctacaaatctcaggtcttttaaagagcagcccacagagacacctcttctttaactgttcctctctgaattgcatttttacctaccagaaaattctacattaaaggcataagctattttttattcatttctcaatgaaattgctcatgccttaatatttggttagactcacagtcataaaagcataattcccaggttctcagaaattagttgctctaatccacctctggggagaaaatacttaagagtcgtagaccaattcaaatattctttgtaatgtagactgaatatcaagtcaggaacagactgtaaatctcattgaaatggcgtctaaaaatcacatatacacatattaaaccatactatggttatatttaaagtagaggatttactggccagagcttttaaatggagagcaaatctagatccaatttacaaaattaatgttgtggggccagacttgtaatttcagtttttatgctcaatatacataatttctaattattatgtgtatgaaatatttttcagcttacataagctgaaagtctgactcttcactgaatattaatagatttttactgtacattctaacattaccaaaaaataattttatcttctttttactagttttctcactaattaactactaatttctctgcagcattctctgactcccattttaaatatgggttcttagctcttcttagcattgaaaggattgagccagtttccctagggaaggtagttatatagattaatagcagttttaacgatattgcagggttccttacagatattttcctaaagcctgcaactttagtattagtttatatggctgttcccttgaagattaatgtaacagaagaaatttgctaaaatgcatagatgcaaatgtagatcatatactctggatcacttactttattgcttatttggataaattcagatactgtcatagactgtcccttgtgtaatatctttctgtcatgatgcaatttttttctacaaagttttttagttgaatatttttctatttaccaattgagtcgattgaatgtcagattctttaatgtttttattaacgtatttttaatattcagatggtgcattttatagtgcctttaaattcagactaaattctcaatcaaatacttttttcatgatttccgtgcctttttatgggtaaaataaaaatgcaattcagtaaattaataggaacgtttgaactttatactaggtatcttacttgaaagacatttagaatactatttcttagtaaatattcctgttaacacaaatgttgtataccacattggcagcatgatttggaagattcagaagatcccactttaaggttcctctgaaaggccagtattgttgatagctataaggtaattgtaatgctattttgatctcacatatatctttttaccatttctgaataataattaattctgacatacgaagacaccaccctgcaacttccagcattgtactgcctgcaaagtcactgctagagaataatttctggatactcctagttgcacttttgagaagcaggattcaggacactttctccaatgtcttttcaccatttctggtcattgaagaaaatagtttctatgagattcagttatccattcaacaaactttttgtatgtatttgctctattaaagacactgtttttgtgtagtgggagatatgaaaattaataagacaatactcttctccagagaattttacagtttcaggaggtaagattagtaaaccaagaatgttgtgacaatgccctttgtcaaaagcacatcaggaacacatctgtagtgttttattattcattgcagggaaggagaacacacatggtgaagagtagagcgcttcagtaagagggtgttagacagggcccactattagatctagggatgtgactttggggagattttaaggaagcaggcgttgctctgttttggatattgttaagaaatgggaataactgtgtaattaggtatttaataaatcttattgagaaagatggaagattagtttgggaataaagctagaattggttaagaaacatcagtcactcaggttagccaagataagtagatgtttggtcattttttaggatggacaatatccatgtttttgtgggtgttgagacttgattatggaatgatctgatcttgtttttgtcttgatccatcatagtcacagtgtagcctcgtctgaagttgatgttttgtgagattatttatgttcaacagaagacagcaaggtctagccgttaagtgccagtccaggtccaggatatcaagagttaattttcatttcctcagttagcatagacagatgctgataaatgccataagcgtgtcaaaaactgtctgccatgtagtgtgcatgtaaaaaacaatgttcaactcatgaatgaagacacaaatagttggaagaatgagtgcagagatagaagagatcagtcctgatttgggggaaatcataccttcctttcagggttcagctcatatgacccttttcctaaaagttttctaaccttcatagaaagaattcttaatttattttgttttcccatgattttgtatttattgttagtagagcaatggtcagggataactgacatttactgagagcataccattatgtcacttaccatacaaataacttaacttgcattgtcttatattattatcctatgagacagatgcttttattacccccatttgcagatgaggagactgaagctgaaagagtttaagtaaactgcttacgtccacacaactagtaaatgatggaagtgagatttatctgcctccagcttgctctcagagcctgtacttttatcatataacagctagctataaaacttttgtcttatgaggctgtaaagtctttgattgcctggaaaactatgcaagactctttgtgccccagagaatttataatctcagaaagtgagactatctattttctcctgagattgtaaatttcctggagcagaaagactgtcttatttagttttactcaatgcttaccaagctgaatttctaaaagcctagagagatgaacaattcagtacaattccttgaataatatacaggagggaaagtaaaagtgtattcggggaatggcaagttgtagagtttagctgaagcattcatggagaagagcaatgggaaacaaatctggaaaaatagccaggaacaagttttggaaaagagcatgtatgatagtttaaagagtgggttttatctaatgggaaatagaaatagatagaaggcagggctttgaaaagactacgaggaggtaggaatggattagagaagagataagctagttatagagaagtatagtgaaattatatttcaaaggtccatggcttgaggttataagggcttaattttaatttgtggtactgttaaaaaaaaaaaagaagtgcagggatgtgaacaatcccaagaataaggatcaagaagacttaaggggaaggaaaataacatttttgaatacattcaatgcgctaagcatacaaaactaatttaatccttctaatagctctgcaaggcaaattttcttatcactatttttagggtaaggaaattaatggtaaaatttaagtaaattcatatattcttatttggtaaatggtagaagtaaaactacaaattagatgtagaagaggagaggagaaagagactgacacaaaaaatatgtaatttgggggctcagcatggtggctcatgcctgtgatcccagtacttttggaggttgaggtgggaagatcacttgagcccaggagtttgagaccagcctgggcaacatggcgagactccatctctaaaaaaaaatacaaaaattacctgggcctggtggcacttgcctgtaatcccagctactcaggaggctgaggtgggaggattgctttagctgggaggtcaaggttaccgtgagctggcatctcaccactgcactacagcctaggtgaaagggcaagaccctgtctcaaaacaacaaaaaatgtaacttgggaccaggtgaaacattaagataaatacatgtgtcatatggtaatttttattgaagcagacaaggaaggaatggttgaaacagagaggaagataatacattcaattttagttcatgtcgaaattgaagccccagtagaacatctcagtgaaaatgtccaaaggaaatttagaaacacaaaagtcaaggcaaagagccaactctattctgtaaaaatggattttgaagcattcacaccaaggtattatagatgtcacagtaatataagaactgcagaatattttaaacttcacaaggattctaagaatcaaacaatgagagtctaacaggagcaatgaggcaaagatcaagtctttagatttaaatagctgtagtttaggtgaataagtggtgtgtaagttgtagtaactgtcccatctttttgtgcttccttgyatctgcattcttggggtagtctcctcccacactcattcttggctttgccaaatcacgkgctttggccaatgggacagttgcaaatgtgacaaaagtggagacttaaaaagcacttgcacattggagttttctttcttagttctcttggagtcctgcaactgccataaaaatcctaagctaacctccaggaggaagtgagactatgtgaagagatgtcctactggcccagctgactcatcagctgactgagcaagcccagctaagatcagcagatactatcccaaagtggtaaccttyagactcatgagctaattaaatagttgtgatggaacaaagcctaactaatacagggaagaaaaagggccactgaagaaaacaatgatgaaaaattcatcaaagtggaagcaaatcaaagcatctttttcaaagcaaggagatagaatgtaaataaagwggttttgagttaaatgctaaagaaaggtcaaggtactgaggaagagggaaagaccattaggtttgctggataattatttggtgacactaaaagcagtttcataaagtaatgatgggtgatagcctgtagaaaagagaattataaagggcaactgcctgctctgtctggaactcttcagtgacacatttaggctgggttgaaccataggaaaagaattgtatgggagggcttcacatgtggaacttaggtccatcctgataatcaaagctgagagaaaacaaaagcaaaagaggcagtggatcccagcactttgggaggctgaggtgggtgaatcacttgaggtcagcagttcgagaccagcctggccaacatggtgaaaccccatctctactaaaaattagctacaaaattagccaggcatggtgtcacatgcttgtaatcccagctacttgggagactgaggcagaagaatcacttgaatccggaagctggattagctaggcatggtggcacatggttgtaataccagctacttgggagactgaggcaggagaatcacttgaatctggaaggtggagattgagccactgcactccagcctgggcaacagagcaagactccatctcaattaaaaaaaaaaaaaagaggaagtggaacacagctgcctccatctctgggtagagtctgcagtttcctaaaaaaactacagatgtctggttgtgatttatcaaaggcttgaccctttctacggcatcagatttggtaagtattcagtatcccctggtgggttagatatttggaggttggagtagagtgaggctagtttgaaggttcatctttagctccatggatttggccttcccaaatttattagaaaaattcatcagtttttgtcatgggtgacctctcacattttgaggtcatgttgtgggaagaatgagttcagtcctaggtcttaaagtagaggcagcaaatatatatatatgtatataaatatatatacatacatatatatatgtaactcatgaagaagtttgtgaaggaaacttcacaatacagatacaggcagtagattatgggggcatcaggaccacaacttggaaatgctgagtcaggggtacttgaatatttaattataaaccttgaatctacatttttaatacctttccctccctctggtatactagtagtactattttaaaaaagaaaaagaatgtactcagatctatctattcaaggaatgtttattcttcttcttattattatactttaagttctgggatacatgtgcagaatgtgcaggtttgtttcataggtatacacgtgccatggttgtttgctgcacccattaacccatcacctaccttaggtatttctcttaatgctatccctcccctagccccctacccccctgcaggccctggtgtgtgatgttcccctcactgtgtccacatgttctcattgttcaattcccacttwtgagtgagaacatgcagtgtttggttttctgttcttgtgttagtttgctgagaaagatggtttccagcttcatccttgtccctgcaaaggatatgaactcatccttttttatggctgcatagtattccatggtgtatatgtgctacattttctttatccagtctatcactgatgggcatttgggttggttccaagtctttgctgttgtgaacagtgctgcaataaacatatgtgtgcatgtgtctttatagtagaatgatttataatcctttggggatatacccagtaatgggattgctgggtcaaatgctatttctggatctagatccttgaggaatcaccacattgtcttccacaatggttgaactaatgtagactcccaccaacggtgtaaagcattcctatttctccagcatctattgtttcctgactttttaatgatcaccattctaactggcatgagatggtatctcatcatggttttgatttgcatttctctaattaccagtgatgatgagctttttttcatatgtttgttggttgcataaatgtcttcttttgagaagtgtctgttcatatcctttacccactttttgatggggttgtttgtttttttcttgtaaatttgtttaagttccttgtagattctrgatattagccytttgtcagatggatagattgcaaacattttctcccattctctaggttgcctgtttactctgatgatagtttcttttgctgtgcagaagctctttagtttaattagatcccatttgtcaattttgacttttgttgccattgcttttggtgttttagtcatgaagtctttgcccatgcctatgtcctgaatgatattgcctaggttttcttttagtcttgaagtctttgcccatgcctatgtcctgaatggtattgagtaggttgtcttctagggtttttatgattttaggtcttacgtttaagtctttaatgcatcttgagttaatttttgtataagttgtaaggaaggggtccagtttcagttttctgcatatggctagccagttttcccaacaccatttattcaatagggaatcctttccccatttcttgtttttgtcaggtttgttaaagatcagatgtttgtagatgtgtggcattatttctgaggcctctgttctgttccattggtctatatatctgttttgstagcagtaccatgctgttttggttactgttgccttgtagtatagtttgaagtcaggtggcatgatgcctccagctttgttctttktgcttaggattgtcttggctatgtgggctcttttttggttccatatgaaatttaaattagtttttttctaartctgagaagamagtcagtggtagyttgatggggatagcattgaatctataaattactttsggcagtatggcattttcacgatattgattctttctatccataagcatggaatgtttttccatttgtttgtgtcctctcttatttccttgagcagtggtttgtagttctccttgaagaggtccttcacatcccttgtaagttgtattcctaggtattttattctctttgtagcaattgtgaatgagagttcactcatgatttggctctctgtttgtctgttattggtgtataggaatgcttgtgaattttgcacattgattttgtattgacactttgctgaagttgcttatcagcttaaggaaattttgggctgagacagtggggttttctaaatacacaatcatgtcatctgcaaacagagacaatttgacttcctctcttcctatttgaatactctttatttctttctcttgcctgattgccttggccagaactttcaataccatgttgaataggattggtgagagagatcatccttgtcttgtgccarttttcaaagggaatgcttccagcttttgcccgttcagtatgatattggctgtgggtttgtcataaatcgctcttattattttgagatacatttcatcaatacctaatttattgtgattttttagcatgaaggggtgttgaattttattgaaggacttttctgcatatattgagataatcatgtagtttttgtcattggttctgtttatgtgatggattatgcttattgttttgcatatgttgagtaagccttgcatccgaaggatgaaaccgacttgattatggtggataactttttatatgttgctggattcagtttgccagtattttattgaggattttcgcattgatgttaatcagggatattggcctgaaattttctttttttattgtgtctctgccagagtttggtcacaggatgatgctggcctcataaaatgagttagggagcagtgcctctttttctattgtttggaatagtttcagaaggaatggtaccagcttctctttgtacctctggtagaattcagctgtgaatccgtctggtcctgggttttctttggttggaaggctgttaattactgccacaatttcggaacttgttattggtctattcaggcattcaacttctttctggtttcgacttgggagggtgtatgtttccaggaatttatccatttcttctggattttctagtttatttgtgtagaggtgtttatagtattctctgagggcattttgtacttctgtgggatcagtggtgatatcccctttatcacttttcatgtctaattgattcttctctcttttcttctttattagtctgtctagcggtctatctattttgttaatcttttcaataaaccacttcctggattcattgattttttgaagggtttttcatgtctctatctccttcagttctacttggatctcagttatttcttgtcttctgctagcttttgaatttgtttgctcttgcgtctctaatacttttaattgcaatgttagggtgtcaattttagatctttcccgcttccttctgtgggcatttagtgctataaatttccctctaaactctgggttagctgtgtcccagagattctggtatgttatgtctttgttctcgttggtttcaaagaacttatttatttctgccttaatttcattatttactcagtagtcattcaggagcaggttgttcagtttccatgtagttgtgaggttttgagtaagtttcttaatcctgagttctaatttgattgcactgtggtctgatagactgtttgttatgatttccattcttttgcatttgttaaggagtgttttacttccaattatgtgatcacttttagaataagtgcaatgtggtgctgagaagaatgtacatctattgattcagggtggagagttgtgtagatgtttattaggtccgcttggtcaagagatgagttcaagtcctgaatacccttattaattttctgtctcattttggtctgtctaatattaacagkgggtgttaaagtctcccactattattgtgtgagagtctaagtctgtttgtaggtctctaagaacttgctttatgaatctgggtgctcttatattgggtgcatacatatttagaattgttagcttttcttgttgcattgatccctttaccattatgtaatgcccttctttgtcttttttgatttttattggtttaaagtctgtcttatcagagactaggattgcaaccctgcttttttttttgctttccatttacttggtaaatattcccccattcctttgttttgagcctgtatgtgtctttgcacgtgagatggatctcctgaatacagcacatcaatgagtctttactctttatctaatttgccagtctgtgtcttttagttgcagcatttagcccatttacatttaaggttaatattgttgtgtgtgaatttaatcctgtcattatgatgctagctggttattttgcccattagttgatgtagtttcttcacagtgtcgatggtctttacaatttggtatgtttttgcagtgtctgaaacccgtttttcctgtccatatttagtacttccttcaggagctcttgtaaggcaggcctggtgatgacaaaatctctcagcatttgcttgtctgtaaaggattttattgctcctttgcttgtgaagcttagtttgtctggatataaaattttgggttgaaaattattttctttaggaatgttgaatattgtcccccactctattctggcatgtggggtttttgcagagagatctgctgctagtctagtgggcctccctttgctggcaggcaggaatgtataagtctgctgaagctgtgcccatacctgccccttcccccaggtgttctgtcctagggagatgggaattttatctataagcccctgattggggctgctgcctttgtttcagagatgccctgcccagagaggaggaagctacagaggccatctggctacagcggctttgcagtgctgtggtgggctctgcctagttcgaacttcctggtggctttgtttacactgtgagggaaaaaccgcctactcaagcctcagtaatggtggatgccccttccctgaccaagctctagtgtcccaggtagacttcagactgctgtgctggcagtaagaatttcatgtcagtggatcttagcttgctgggctccgtgggggtgcgatctgctgagctagaccactgggatccctggctttcagccccctttccaggtgagtgaacggttctgtctcgctggtgatccaggcaccactggggtatgaaaaagactcctacagctagcttggtgtctgcccaaacggctgcccagttttgtgcttcaaacccagggccctggtggcattggcacccaagggaatctcctcgtctgtgggtttctgagactgtgggaaaagagtagtatctgggctggagtgcaccgttcctcacggcatagtcccttacggcttcccttggctagggtaaggagttccctgaccccttgagcttcctgggtgaggcgacgcctcattcttctgcttgccctctgtgggctgcaccaactgtctaaacagtcccaatgagatgatccgggtacctcagttggaaatgcagaaatcacccaccttctgtgttgatcttgctgggagctgcagaccggagctgttcctattcagccatcttgcacacgacttaatccaagatgcttcaaggaatcttttatacacaagaacaacacatgatcctctttgcactttcctagaagacagatagggaatgaattaagaagccctggttttcttttctggtatacagtggttatagagtattcctctgtttagccttaggctgttataatccagagaatacagtgacatttcagataaaaacaataaaaaagcaactcaataccttgcatttgtgttatgcaatagtttatagcaaaacagacaggtactggttttgatgatgaatcactttgaactctgtgctatcttttatcaaagtctaactcagggaagcgatagttgaggaaaatggaaagacatgctattgatttagtaggtcccgggaaaatgatagaaaacaaaattattacatagtaattagtggagaccaaagaatcccaatagataatttttcacttttgaaaattttggtgcttaaggaaatttctaccatcttttaaagcatgaatctccattatccaaaatttttagtattataaaatattctagtttatcaattttatcttaaaatatattttataaatacaaaataatatatgtaactttcaggtaggttctaaagcataataattaatgaacatccatataaccagctagcccaagacttagactattactagtaatgagcctatgaattcttcccgtttccattgtcagagtaaatcttttttcccagaagatgttgataccacctaaatttctaatagcaaatgctggaatcaattcaaatatctattaatgggtgaggaataatttatggcttatttattgaataaaatatgcaagattaaaataatgaattgagtgatgtataataacgggtgcaatttggtagcataatattgggtgaaaaaagtttcaagagactacatgtaacataattctatttttataaagcccacaaataaggaaaaccaaataatatattgtttgcaaatgtatgttagtaaactataaaatatagtaagagaattataaatggattgctattagatttacttatttgagtattatagattttatacttccataggatattattagaagaaattattagaagttatttatgccatgaaaaataaaggtagctagtatgctggccataaggtcaaatatagacattgtgattacacatatgtagttttaccttctttacataaagtcatttacatatgactttcccttctttacacaattattttcactaaattatcccttaatattatgctcttaaataagaaagacattaaaacagattttgcagtttctgctgtcattattcactatgacttttaagacttcccccatgtgcattctaatgacaagaatccttaatatgtagatcatggacttctagaggttccaaggataggcttgaaacagttcatgaatctttgaaaatgtctataaaatttctttgattttctttttcctttttttttttttttttagtgccaggtgtttattccctcacacgtgggtggttcacatacacagcacacacaggcgcgggcaccgtgggagagggcagcactcatggcttccgaggggaggatcttggcctcagggtgtaagaaggaagaggatggtttctctccttccctcattagggcctaggggacccagcagcaaatcctgccccttccacctctcagccaaggagaagccaccttggtgacgtctagttccaacgattatactaagtggagaagggagtggcctggtcccaaccattacagggtgaagatataaacagtaaaggaaggtacagtttggatgaggccgcaagagggggcagatgacaccatcagaaacatgtgcaggggaggggcagttactgggcttctgggctgcttagtccctggcttggcaggaagggtagggaagatggatggggctcattgtttggcattgatgatgtccacgaattagggcttgagggaagcatcacccaygaggaagccatccacttcaggctggctggccagctccttgcaggttgcccccatcacagagcctccataaatggatacgggtgctctgagccaccacatcagagatgttggacaccattctcagaacttctcgtgtacttcctgggccttctggggtgttgcagtcttgctggtaccaatggcccacacaggctcgcaggccaggacgaccttgctccagtccttcacgttatctgcgatgacctctttcttctcgaaaacaaacttctcagtgatgccacttccctttcagctagcttctccccagtgcaagcgattactctgagtccctttgccagagcatgggccactttctgcccaatcagcttatctgactccccaaagacatgcctactctctgagtgccccaggaccctcgattggctttgcagtctttgatcatgccagggctgatctcccargtaaaggccccgttagttactttgtagcagttctgcgcagccacagcaatcttgggctctagcttctggggcaaagtcgatataggcagtggggagagtgcaaaccacctcagtgttggccggcaccttggccgccttcagagtgcggatgagctcccccaggctcttcttccgtcggttcatcttccagttccccccaacgaacttcctggaggtcgccatggcgctggagctgaggtgctgaaggtcagcgtcagccttcagtgattttctaggttggggattataggttttatgatattctaaaaggtatcatgttaaaaaaaatgtaagaacctgtgttgtgagattagtatgggcaaaagcttaaggttcatttctcttgaaaagttgaattgcttcctcacagcagatactaaaaatttattacacatcatggttttctttatttttagccactaggaagctcagagtccagctaatgcttattcataataaccatatttgtctttaagtctggcttattttcttccttctcacactctctttttttgaattcttttaaattgttattctatagaacatatgtggagttttataggcatctgctattttagcctactctaatacatgaataataatgatcagtcttgacatgttttacattttagaaccttaaattataaagaaaaaattttttatatcttaatctatatactaattaaaaaatacatttttaaattgcctttctgagcttggttggaagactcattgtaaaccaaacatgacaggctgtttgacagaattgtaattaatgaatgttggccagaaacctcctctagctacttccttacctggctcccattttgcttctgtggctctcatgctgattggtgctgtctcccctgcctcttaccttgtttatcccgttgcttttcaattctaactgtgcacatctttgctggagaatttgacacaagctccctgtgctttcccctcatttgcgggtttgtacacatgtgtaggattcattctgttttcctccaaatctgcaaagcaaggcaggaaagtgtcttcagttgggcctttcttcactctacctgaatgagacccaggtgcagtagaggagaaatatgaggtgtagagaaaacaatcaaaagaaaaagaggagacacattagtttaaaatgtgggtaaaaaaggcaggtgaatttttaataaacattagaaaagaagatgtttattaaacaaatgatcccaaaggcaaaaataaaagaaataagctaatgtttaaggaaaacaagtaaagtgagaatgtgtgagaaacgatagagaataagaagggatttacgagtagacagataatagtatgcagtagctgagggaaggctggatgtggatattgtgctcagtatggaaataagtcagacaaatatgggcatgccagaaagttcatgattctgtgcttatattattttaattatatttttaaagtccctggagcttttgctcctttaccattgggtctgtagtgtagaaaatgaaattctaatcattgtcattgaaagtgaattaagcccatttcttccctcattctactttctttatatcaaccaaattatctattacactttggtgttgtttatctttcttaatgtaaaaagaaagcaatgcacaaaaatacgaacacctgttgtacaggcagtggaaccaagtaagagacttcagggacctaaaattaaatttgttaaagcaacttaatagtaatataaaaaatcttttatatttgctaatgggaaattggctgtacaggcattttaaaggtggtaaaaccaaaggcttctgtagggtattagagtaagttaacagctttgcttggctgagtgattcagaaagtctacaaagaaagcagtgatacatttgggtgtgcctgacattctccattaggacaaacatgaaatatgtgttatttgctgacttaatattcaaagaaatactatgttaataatactaaaagtaactttttttctcttggcatgctcacatgtagaatatgaaattgctttttgaggagttaaaggaatacataattgaacttggattagagaaggttcatatgtttctgcacagttccaatgttgacataggacagtgctcatttaatttgctcaacatatctgtacatttaatttacagttaagtacattgatatctatgttgtaacgttattttacttatttaatgaataaagtattatttttttccttttcaaaagaatattaccaccttgtttgactttgaaagtcacttcccagaagctaattttctcaaaagcaagggaagactatctctcaggaatctttgctcaacagttttgggatgatataaaggattttgttttaccatttctattgcatcattgtacactgacaggtcattgagcacacttgggtgattcaattttgtacagagggtattatgagaaaaatgatcccaaattatttttcaaactcatgttttctgttatcaatgtaacattatattttaccaacttttgtttgctgtaattttgtaccatgtatagaaataggggtataagtaatgaatgttttagtttgatccagcagtaagtaagtatatttgctgagggcaacccaagtaattggctcactgcattcctgaagcttatcttatcaaacagatatcagacactgctgaaagatggaggtggagggaactatccctgttactcgaagatttgtcatagaaagaggctttgtctaagcaaagaaggaaactctgtcatttcttcttaagttgctgatctagtttaagaagcaaagtatatttgctgaaacttatttttaaaaaaagtgcaggcagctctcccactgcttgttccttttctgtccagacatttttcctagaatggaaaactgaaattaaatcacttttaatggaacttagaggtaatggtgattgagaaagagagccagatgaagagaaagaaaatagatagcattacaggatggaggaaaagaaggataagaatagggagaaggtaatacttaaatttctattataaaaggaaagtagcaagtgtcaaacaatctctctctactgtaaatagaaaccatagaaacagatattcacctgctcgctatttatttacgggtagttgttgcaacaactgagtacttgttagccagcaatgttgaaaaaaaagtgagtgcagtagtgattaaggaaaacgtttaagaattaattctactaataagccaatgagttgatagtttgattttaaggaatagctacatacagcgtatgacaattttccttgcttcttcattttttgatttgggcattggttatatttaatccaaatttactagctgtcatgtgctaatactttgctagtgagttatattagcagactataactttgaaacagaattttcattcaatgttattacgtagagagtttctgaatgtgtgtttttgatggatatgtagatgtgagtaatggttgtagttatattggaaaagaataagactgttagaaatgttataatgtggatgatccttaagcatcctgtgaggtcaactgaaattggatatttgtgtactgatttcttagaacaatttttgacctctcttgaggtcaccactataacttaaattctcattagtaaagaattaaatcatttgtcaggactaagttcttcttggaaggccaagcagcagcaaacaaaatcagtattcttaactcttaaaaacaacgcttgactctacttcccctctgattactgcacacgaatctctactatatagcaaaactctgaaaaagttgcctatactcagggtcctatttttttcttctctctctgatcccccacaccacaatttwaaaatttttattataaaaaagttcaaacatataaaaaggatagagaacagtaccactaggtaccattactcaacttcaacaattctcaacatatggcaatcttatctcatccttatattaatatttcttcttcccacccaatttccatccactatggtgttattttgaagcaaatcctaggcatcatataattctatctgtaaataattttgtaagtatatctaaaatacatgaaatactcttaatgaacaaacataattataaaataatctctcctaaaaaataaaataaccctaatattaccaagtatccagggtaaaacttctcacagttttatagtttgttttttatggtttatttgaatccagatttttgtgggtatgtcttgtggttgcttgtgagtccacataaagtccatttgttataattgatttgtctcttttaatcttgtttaatatggatcttctctctgcgttagtttccttgcaatttatttcctttgcctgtggaatttcccacaatctgaattttgctgactcattctctcttgaacacactgcagttagactattcttcttactactctgggaagctgctcttatcaaaagtcaccaaggaaattccatatcgtaatacttgttggtcagctcttagtcctcattttagttatctacattatttttgatacataataattatacatatttatggtgtacatgtgatattttgattcatgcatacaatatataatgatcaagtcggggtaattgggatatccatcacctcaaacactgatcaattctccgtgttgggagcattccaaattctctcttctaggtattttgaaatatgcaattactgttaagtatagacatcatgctgtactattaaacattataacttattccttctgtctaactgtatgtttttacccagtaaacaacctctgttcatcccatgaatgcaggagcattcatcccatgacctggccccgcaaaggttaccccagctctgtcaacagcaaatatcctccatttgctcaggccraataccttggaatcgttctgatttccattttcttttcatacctcatttccagacacattgctttgcctcttccttcagcagtgtccacaaatgaaccatctctcaccagctcctgtccccatctggtccaacctaccttgaactttcaatctggcttagagtgatagtttcctaactggcctctgtgatgtaacccttaccttaaatacagtctatgctcaacccagcaggcagagtgaccccattaaaatgccaaaaaattaaaattacttctctgttcaaaatcctccagcagttttctctctgacttagagttgacttctgagtctccttgcagggcctttcaaggccctaattatctctcatttacaccatcacttctctgacttaattcctcatttctttttccttggcttcttccacttctgccacaggacttttatgaggcagaaaagtagacacctagttgaaaaatgattttataaaatttgtttagagcctagattttaaaatttattgttcaataaatttgtacaaaataaagagaaaaataactggctcaattagaatttaaaagctgaagaactggtctcataaatgtaataccttgctctatcctgaaccactgatctatgggcttaggacaaattatccctaagtaatttatttttatattaaagggaaagtgtcttttttggtccatgtatgtgtacatttatcctgaggatattggtaaacatagccagttttaaagtctattgatattgtggtaatgactattattcttacttagatatttgaattgaaatgtaaccttttaattagcttgtgctgatgtttcatctctgcctggcagttcaaattgatcttattaataactggctgcctgtgatccatcatagagtctggagaacacagtctttcttgctcaagtatgctgagtgcaagaagggacaatctgagaggtgaaaatagtctctagtatttctaaaaatgacaacaaaaggctacgttattaataaacagatttctagatttcagtcctaggcatttcacaacccttgattgcatttgcttttctcttatttccataatttaaaaatttttatttttatttttttgcttatcacaggcatgaattccattatttatgtctgcaaagaagaatttttttaatgaattgaatgcaatatatacacaccccaaaaaagctgtaaacatggaaaaacaatgtgaatcaattctgcggtgctattacataaaattactctctgcatctcaaagatgtttctccctccctcaagaaattaaacatggccatgaaatataaatgaatatgtatttgcagtaatgctacttgacattttagttgtaattaacagaacttccaatattaaccaacattaattaacaatgtaaagtgtttaaacatggattgtaataacaatgctgagtggattatgcacattcatcaatacaccacatgtttgttaaagatttctcttcaaattctgtattattaagcaaacttattaaacctgccatgtgaatcttgattttttttctctatacttattctgtaatgatcactccttccttaggatatcgtggtgttggggataggctgcatgtttgcctctttttatcttaaatgtcaatcttttctcatttacatgtaagagaacattgtaagaaaagcatctcttttttctcatgtgttgcagataatgtttttcagttttagcttgccttttgacttttattatgtttttttgctacacaaaattttaaaaatatttctataatattgcctattagtctttcactttatgatttttacctgtgttgatcttctcagaaaaaatttattgtcttccatgtgctccatatgtggatgaatctgagaaatgatacacagttcctgaccctgtaggccttagaatacaatgagggattcattttattaggaaggaaccttatgttggaaatttttctacagcttcctcttgtgtatattttggatatgaatttagttataatgtcagaattatggtgacagtctgttagaatgaagtaatgagaaataattgtaagtctgggaaaatcttttaggaatttaaaaatatctgagagtttgggacagttttcatgtgaatgatcatattgtttctcaaaataaattttattcctaatctgctgtttcatatttcatagataaattggttaaagataaccaagacatggtgtatttttataacactttcatcttttaagaaacaaattgaaagaaacctaactgaatctatttctagctgatcttgatgtaattttgatgtcagacttggggtcacatggctttgtgggagtccatggactctaattctgattggcttagatgtacacagatccattgagttgatttcttactccaaaytgggrtgatgtggagtttggaacataaattaaaagtattgttgtgaatgtgtactcatttctctgccatccaaattgttcaatatccactttaaatctaacttcctgcattacatctcttctcaaccattagagctagatgtgattttcctcctctctgaaattcactgaagtatttttggcacaaagtaatatgttatgttataatgacatttttgaatgttactaaaatatatttttcaggtgatatatgtataacaaatttattatacaaaagtaaaatatcttagttttcatgtgcttatgttttctgcatgaaagtaatcagtgtacatattccacttttttacttctatgcattttaaggtgctaccaagtcttcagcttaatttttctaattttcatatttctgtcagtgaattagtcataatttaaccctcatcttaacagttagcatttagactttcttacactttttatttttctaatgtttgaatagcatagcaacaaatttcttcccatataaagatttttccatgttttgcacgatttttttaaggatagagtccaagaatctgagttactgagccaaacaatgaatgatttaaggctcttactgcttattgccaaatatgtttgtaaaggatcctactgactgcacagcttaagggcttagtcccacaggagtgtcctctactgcagataccagctacaatccccaggttgtgacctttgcttctgaccaactagctataaattgggtgcttcccatgacccactcttggggtttgattagtttgctcaaatggctcacagaactcagggaaacacgtttaccaatgtattccaaaggatattgtaaaggatacagatgaacagcctgatgaaagagattcacagggtgaggtatggggaaagcaatgaagggtttccacaccctccccaaatgcactaccctccagacacatccacatgttcttttttatggagggtttatcacgtgggtatgatcaattattagatctccagctmttccctcctcatggcttgttctttctggtgaccagccctgattcagaagcccaccatgtgttaccccattagaacaaaagatgctcctatcacccaggaaattccaaaggattaggagctttgtgccagagagctcctaaaactcttatcattttctgagtgataggagcgctaggtgcatattttattttaatatttgggaaatgattttggctgagttctcggattccccaaagtaagttggcaaaaccacgagtggtcaggcacactggaccaagggaattagcattttatgggacacctgagggatcatcctctctcccttacctctgtccctgactaaggatcaaaaagaaattgagagggtctgaattgtggagtggctggctcattataatctcaaactctgttctactatgaggccaggaaaacacctgtttcagataccaactctgtaccacacaaatatggattataccttcttccgaggggtctgtggttcataaataaaaactgatcattgtaggccatgaagaaattcaatttcaaagagtaagaatttatacagtactttctgagatggctagaaaataaataggatctggaattaataaagttaaactaaaacaaacaaaaatacaaaataattggaaaaaattttccttaaaaatcaggttaaaaaagggattaagggcacaatatcagagtattttgatttttagatagatgatgatgaatgaaaggaccttcagatggaaaaggggtgactgatagatctggatttgcattctagcactgtggcttgctaatttgacctcagaaaaggcttaaaacatctcagtttccttgtgtaggaagtgattgtaagagtgcttcccttatagggttgttctgtagaatagatgaatagttaatgtaaataatttgcacggtgcytggcccttactttatgcaatagaacaatactgaattaaattgatgatttaggaagcttttattctgaagagcaaagagagaataaaaaaatgaaagtgaatttggtatgactcactactacacaagcagtacctaaataggtaggtgctcaataaatatgtataaaataaataagagattattgaacttaaaccttaaggctgtagtatctctcatagcacttaatccattgcatcatcattatctgagcatgattttaggccctggggttacagcagtgtacaaaacagacaaaaatccctattctcaagttgtttaattctagtggggaggcagaaaataaacaaaacaaagaagtaagttatagactatattagaagatgagaagcatttttgagaaaattagaaggagaaataagcagtgtgagatgagtggtgtcactattttaaatgggatagttagggaagatctcacagaggtggtgaattgaaggatctagtgaagagcgttccaggcagaggaaagagaaggtgaaaagtccctgaggaaggagcttgctaactgtgcccaggaacatggaggagcttggtgtggctggagcagagtgagcaaaacagaatggcaggtcccacatctcaactgtctgctcagtgagggcaggaactggaagtttcctctttccttccaatgacaacataaggctaagcattgtaggattcatgacataaatgttctctgcctaaatatattgataagtgaattactgaatgatatgagttgaagtatgtccccccaaagtctttatgtggaagtccccaaccgcctttaccctcagaatgtgacctgatttggaatagagacattgcagatctagttagttaggaggagaccatacgggcataggatggagccctaatatgtacttatataaaggggaaatttggagactcagacatacacacaggaagaatgctatgtgaatgtgaggcagagattggagtgatgtatctacaaattaagggatgccaaagactgccaacaaaacaccagaagctaggagagagccatggaacagattttccctcactgaccgcagaaggagctaacatgctgacatgttggcctcagacttgtaaccttgagagctgtaggaagaagatacattcctgctaagctaacccatttgtagtgctttgttacagcagtgctagctgactaacacactgaatgaatgttttcttttgatggagtccacaccctatgttaagaaaaaaacatccagtttttaaataatcaaaagactgaaattttattagataaaaatgcaattagtcaaggaacatatgtagaaaatttaaatttattagtataggaaatttttaaaaataaattgtgatttcctgtcagaaaaaatactgatggtactgagtagtgataagggttttgtgacagtataaccagttaacatcaaaactgagttaaattgcagaaaacccagttggtgtctgctggtgaaatgcttggtgtgtggggaaaacctcctacacatctggtatcagaagtggtgtattttattgagtgttgactgtgcagtaaaaggagtcagtttctacctaccatataggcacttattatgagcattttaatgactcagttttcttttcctgtagatactggatagcttctcctctgaaccctgactttgtctctgaacagttcctcccttccctttggccagcatctctractgtcctgtccactcctatatatcagcctttttttttttaaactcaaagctcatgtttcattttgcatttttcttttaatgtcttttataatgatttttctaatcatattattttttcttctttaagcccttttataatttttgtttattgaatctgttgtagacctataggactggattacaaatgttcttctttcccttttacttttgaatagttcttactttatgctatttttatttatcctattttgtgcgtattaactatttgtgaattatgaattatcagttataatgaccttttataatttgatgattttagaaaaactccaaactccaatttttctaaatttacattgttgtgcctagtttttaaaaagttaaattgaaaaaaatttatctgacactgtactttgataatttctgtatcttttcacctttggtgacttgataagaaatatacactcagattcgattttttaaaccagtcttaaattctatgacttgatgggagcatttaggccacttatattcactattataagtattttcttctgtcaacctatttgacagtttaaaaaattatgctgtcttgtctcttttctgttaaggctgtttatttgcgactatgtttttgttttgttctagtagtatgatgggaggaagttatttcatgttaaagaatagcagtttgaacattgttggatgatttaaatatgctctctcattagccctcaaaatcactttgtgaagtaattagtaacaattactttgaattcatctaacagttttccaacacatctaacacatcattcctaatgcatttaacagtttaggatggcccacaggcaactctttaagacctgatcctattcctgcaggaacatgacaagttatacataaagcaatagccaatacttcagagatttattataaattccttatcatctcttccctactttataccttattccatgcccaattttgacacatctttctccactattcagtttgccccgttttggtattcagctgatgatttcttcaggtgttggttactggcatcattcactgatgctacatttccttccttctggtaaattctttgtagaattagtaagtcaccttttggcttctcaaagccttttgttgtgaacaaagcaaccagctctctctaacttggatcccaaagaatttggctccttgaaagacatcttatccacatccctgacattttatcatcagttaaaaaaaaaacaaaacctaatggtgggtgggcaggtgggtgtgttacacgtgtctttccttccttccttccttccttccttccttctttcctcccttcccccctccctccctccctccttccttccttccttccttcctggttcaacttatgtttttctattatgaatcatacttttggtgtcacgtctaggaactctttgcctagccggagatcctgaagggttttgccttgctttttacattagtacaatttgattagagaattatttgctgcacacttctcaactgaaatcagaagtcttgattctaaagttcaaaactatgtaaatgaataaatggatgacagacttagccatagygtatatagctagagtctttccttttaaaaaatatttttatggcttttagcattatagaaacacaaagttcctcttctatgggtactgtcatgaaggagggaggagtatggaaagataaggcccctgttctctgtgctttattgagttattggtagattactctagagttattggtagattacttttatagagttattggtagaatccaattgaaatgtcaaggagatattaaggtgctgaatttttttccattcaattctactttactctttgcaataaccctgtgaagaatgtactattattaccccctttttaactcagatgagtttcctcatctcagtttaactcagatgaggaaactgaggccagaggccatgcaacatatggaatatactcctttacagtgagtaaatggcaaactttggattcaacataaacagagaactatagcttgttttcccaacagtatttattattctgtattgtggaaccaatgacagataactcatattattaacagaggattataacacacacatattagtaataggaaggacattggtaagaagtaggctataacaaataaagatataaccacatatgttgggtgcttttaggtcttctaataagtctagttttgtaaaaggtcaaaatgacaagaatgtggtttcaagctttatcatatctggaaaagagttgtttaatttgaaaacatatttatggtctaggtataagttcatgatgatttcaccatcagtggcaggaatttccttttactgctgaaattcaatagaatatttcatagtcaaatacagagtagattccatatatagattttaagataaagttttagtcattttttgaataaagtgaaagcaaacaatacatttttgtttacttttcaatctgaatatatcttttccaaaaacctcagctaattgggagcataacttttcataacaaatattgccaattagatatttactttctggattccagaattagagcttcatccagctggtcctctgcaatgtgtgkctatgtctacacctttctaaacaaagaagcaatggcagtctatgtggtatcttttgacagatcttctggggcctcactaattctaatttcgtcctttcatggggcctgcaattctttctattctttgctttaaagccctctctccagaagaccttttttaaaaaggtaagacatttatgcagccaaaaaacacatgaaaaaatgctcaccatcactggccatcagagaaatgcaaatcaaaaccacaatgagatatcatctcacaccagttagaatggcaatcattaaaaagtcaggaaacaacaggtgctggagaggatgtggagaaataggaacacttttatactgttggtgggactgtaaactagttcaaccattgtggaagtcagtgtggtgattcctcagggatctagaactggaaataccatttgacccagccatcccattactgggtatatacccaaaggactataaatcatgctgctataaagacacatgcacacgtatgtttattgtggcactgttcacaatagcaaagacttggaaccgacccaaatgtccaacaatgatagactggattaagaaaatgtggcacatatacaccatggaatactatgcagccataaaaaatgatgagttcatgtcctttgtagggacatggatgaagttggaaatcatcattctcagtaaactatcgcaagaacaaaaaaccaaacaccgcatattctcactcataggtgggaattgaacaatgagaacacatggacacaagaaggggaacatcacattctggggactgttgtggggtgtggggaggggggagggatagcattgggagatatacctaatgctagatgacgagttagtgggtgcagcgcaccagcatgtcacatgtatacatatgtaactaacctgcacattgtgcacatgtaccctaaaacttaaagtataataataataattaaaaaaatgaaagaaaaaggaaaaaataagtaaataaataaataaaaacataagtatcttatcaggaaagcagatattctccccaagtaactcacgtcatttccataccctccttgatggtaaggaagcaggagccaggaaagttatattcacatgggtcagtctaatgtgtgtgtgtgtgtgtgtgtgtgtgtgtgtgtgtgtgtgtgtaagttctcaggattctatagcagcagacacaaactgtatgaaaagatttctgtgatcaaagttttcagtggaatatttttttttcaaaagccaactagttattttcaagtgtaactaagaaaatgttagggctataaaattaaatgtagctttgaaaaattattctttcttacgtacagtttacacacagtaaaataacagattttaagcttacatttcaatggaatttgataaatgtatatcaaataacacaacaataatgatgtagaacatttcttggttatatagatgagaggtttgtatgttgcccaggctggcttcgaacgcctaaacctcgcctccttatgcaccaggacaacaggtctgagccaccgctgctcccaatgtagaacatttctattacctcaggaaattccatatccctttccagatactctccctttccctgcccctgtaattccatcaccatagcttagttttgcctatgctggcacttcatataaatgcaatcatatatctacttttctgtgtcttgcttctttggcttgacataatggttttgaggctcaatcatattgttgtatgtatcattagtttgctgatttttgattctgagtaccagttgactatattgtaatttgtttctccattctgttgttgatgaacattttggctgcttcccatttttgtctattacaaacaaaactcatattaacatttttgtgcaagtctacttgtggccatatgctttcatttttcttaagtaaatacccaagagtggaattgctgcatcatagagtcaatgtatgtttaactttataagatattgccaaatatttctccaaaggccttgtactattttgactttacatatgagagatgctccacatctttgccaatatttggtattgttagtttttttgttagctattctatttgttatgaattgccatctcacgttggttttaatttgcatttccttgatgactaatgatgttgagcacattttcctgtgcttattagccaacttcatatttccttttgtgaagtgtctctttaagtcttctgcccatttaaaaattcaacatctggacatacttggagttcgtttttgttgactgcttttttgcctgagtatgggttactcttcagtttctttgctatgctgctatttctgtgattggatataggacattgttgtagctactctagattctgtcacattctttgaaaattattatttttttgttttattagataattaagttgcctgaatctaactgcagactttgtctgcatccgtgtatataaaactgcttgtagctcttgtctgttcttagtttaccattgagtatgatgttaggtgaagggtttatattgttgccccttttcagaatgagaaagttttcttctatttcaactttgctaagtgtttttgtttttaaatcatgaatagatgttgactttttcaaaaagatttttctgcatctattgagcggctgattatatagtttttctttttcaattcatcaacatggtcaattacaactgattttcaaataaccttctaaatgggataaatcccatttggttgtgatatatttttgatgaatttgatttaccagtatattttaaggggttgcaaatcagtgttcataagagatattcatctgtagtttccttttcttggaaaaagatgattctctatgattttggtatcagggtaactttgtgtcataaaacaaattggaaaacattttttatttctgtattttctgaaagagtttatgtgtaaaactgacattatttcttccttaaattttggtagaattcacttgtgaagccctgagggcatggagttttctctgtgcgaaggttttaaattatgaatgtaatttctttaaaaaatatagggttattaatattttctgtttcttcttgtgttattttgggtactttatatgtattggggaacctgtcgatttcatcttagttgtcaaatttattgtcctatggttgttaacattttttttattaatttaatatatgtgagaatctgtgatggtctcctctttaattgctgatattgataaattatttttgatttttttcttgaacaatcttgttagagccttatgacttttattaatcttcccaaaaatatcaatttttgtctttgtgcattcttcccatggtttggttttcctttgaccattttttactgttgtctttactatttctttccttctatgtcttctaggtttaatttgttcttttttcaaaacatggattgaaagggaatatatggctttgaaaaagcaatagaaagatttgcattagggcatgctaagaaaatttatgcagatttcttaatcatcttatttttgttattaagagattttaaagtgacatgacctttgctgtaaatttaattttagttaattacatacaatgggcatgaagactgcaggcagcataaagaaatcataaggcagaaaatccttgttctctgcttgtcaagtcaaactcctactaatagcactgtaatttgaaggtggaagtatagttatgtattccaggcaattatactgtatcactctttttactcataacctttgaatgatcaaccattataggtgaaattttgtctgcaccatttgacatattgatcatatatgtcaattatgaaacgtttcctcatgatacatttctcttaaaatatatttctccaattatctgacatcaaaatgatgtatggcgtgcttaggaagcttatattttgtgacccttcttttctttttatactggtctacgtttgtgtttttccaactgtaatgtaaacttgtaagcaagcatggtcttttttttttttattctttcagtgcataataggcctccataaatatttattttttcaatatatttttaaaatgtttctcagcatttaaaacatttataattcatctttttagtttctaaagaacagaaagaacttgattttaaaagttaatggatcataaaaatattacatttmaaagcaaacatgaaaccactgaacttttattagtccttttttttacttcaatttcccaactgaggtttagaaaccaaccacagtttagaaatctgtattcatatcaaaagtaaaccacaagaaatacaattagaaaaattataattgttgcagctggatgttgggtaaagtggttatactattgtctctactttggaatatatttgaaaagttttatgaggcaaagttaaaaaatgcctattataagcacatgtatggaaactcaaggagttggaaaaattgtgtcttgtcattgcgatttactgtttacaaaaatagttctgaacacaggtgaatctagagagcctatagaatatgtaatttggagaggtagctctcttaaggaaaaatgatacaaaatgatgtttgcagaatttgttgagaaaaggaatattggcccagtgcagtggctcacgtctgtaatcccaacactttggraagctgaggtgggtggatcacctgaggtcaggagttcaaaccagcctggccaacatggtgaaaccccatctctactaaaaatacaaaattagctggatgtggtggcgtgtgcctgtaatcctagctactcgggaggctgaggcaggagaatcacttgaacccaggaggtggaggttgcagtgagccaagatcatgccattgcactcaagcctgggcgtccgagcaaaactccaaaaaaaaacaaaaaacaaaaaaaaggaatattgatctaggacaaaagaagagatcactttaaattatttagagaataataaaatattaatgagctgtcttttataaatttttttatggtagtctttgtcttcattctctttggctcttcatgtcacaatgattttgtaatactgttttctatagatggaataaatcataatttggttttacttttgaaatgtttgatcaatttttttgttgttgatagtttagaaaagtttctttaagatcataatttattattggtaatagctgcacatttaggattgcaaataaatatttatttgaatctcattttgctttctgttttcaaattttaatccttatgcaaccaagcctacctctaaataacaaataggagttaatgtttaacttcataaacagatattctgttattctacaggaacatttttagaacctgaagtttgggtcttaataagtcataactattggctatttctgacccactctgtagagtggtattattatttgaggacaagtccatactccccactttctattctgcacaattttagtgaagtcacatgtaactgctttgcacatctgccaacacactggctctgcttattatttctgcatgacaaatcatgcaatttctctcatttctagttcccttttccacaaagtggggattttgaagcacttgctctgactatccccaagagttgccttgagaataagtgccatattctaggtgatggcactcaattataaagtggaatccaaatgttattctttacatgattgttataattgtcatcgtcgtcataggattgtgatcatctgattggctatgaggttattcattactggtaaaagtggacttgttcttttgctctctgtaccaaatcttcagtatattctctctatattcttgtcctacgttttgaaattatttggtcagctttttaactttcaagtggaagactcacatcctcaaataatcatctgtttattcattcaacagtatgaatgcaagtttatttaataccatgtgttgtgctaggctcttggaatttcagtgataagtaaaagataaggtttccactctcttgagcttacatgtgtaatgggaagtaggaattaatcaaataataccaaaaacaaagtaagctaaggaaagagctatgaaggaaaggaacaaggtgctcagactcatttgatctgtagaggaaggctttcctaccacaagccccttgccttgccatccaaagaatgcactggagataagtcagaggggagctggcttgtgcaatgaatctattatcattcaccttcagagaaatatgctcctcaagcttacttgaagctctaattctaaggctttaggatgttcctttactgtgccctctttccaacagcaggtctcttcaaatctataagattttaaaatcctttcctgggtcacagtgaacaggtcagattttattatgctctgagtatttcaatgattaaaaaaaaattatcccaggcaaagagcatggtggaaatgtctttgtatcactaaaattctggaataaaattttatttaattgcaatatgcttactagtaaggcagtcattgaggcagggaatatttcagtttctcaaaacacatatttgtatataaatagtttacatgctatttacaaataatatttccattgtgtattattagagtatatcctcttatgaaaacactttgtaagagagcaaacattttagtctacttcaagacacttataattttaataaactgaattatttaaaacacaaatataactggaaggactctgcctttcacccttaccccagggtataggcttgttctggacagcgagaggatgcataattctgttgctaccatctgctatggataatggtgtgagaagagctttgcctaaggatttgatgtgctaaagaaaattctgttttcaaagctctggctgtttgtgctgctgagaataaagacatggaatagatgggccttaattgagcagaacaatttaagaagtgctggggtatacagagggagacccagaatctagtttggagtaagggttgggtaggaaatcaaactgctttgcatacagaaacatggagaattttgttgtaaaatccctggcacagagaaaggaggargaggagtggttcctcagcaacctattagggggccctagacataagggaaaaagttttgggaaattccctcttcagcagaaaggacattaaatttcaatgaacagaaatttctggtatctgtttgaacttgttttctgctctgtattgtacttaaagctttgctcttcacaaattttatacagcatttggattgaatttgtaatgttttgtaagggttgaaaataaagaagtggggtccagtgtgaggcagtgtgaggcagagtggactggagagaaaaaggtgcaaggtgggctatggcaggatgactcaggatttaggagaagatgttaagagaaagtccccctcttctagaaacagctgtgtttttcaaattgtagtaccttggttacctgcctctgaattgcctgtggcacttgggaacctacagcatcctgagctctacctccgaccttcttagactatttgccttgtacacacttcctgggacagtcttcagaaactggagtttgagaactgaggccctagagaaggttaatccttaggtagtgataaaagaaaaacctcgacaaattaaacttagcagagtttaactgggcaaagaactgttggcaaatcaggcagtctcctgagccagagtgtgctcagacagagtccagctggtggaaagggacttatggagagaaaaagaaaagcgatgtagaaaaattgaaaagaggtacagaaacagctggattggttacagctcggtgtttgccttattttgaacagggtttgaacagttggccacctttggttgctcaaaacttggtgattggcacaagagtaggttacagtctgtttgcacatccatttaggttgcagttcactgtgtacagagaaacctttaggctgaacttaaaacgtgtaaggagacagctttctgcttgatttaacagtaacackggtgtgtgttgggaggtagggaggtgggggctctttcttctctcagtctgcctttttccacaacagttctgaggagtaagcttgtaatgtatttgtgcaactgcttctttctgtaattctaagcaggagcaagcagtaaactaattttcagatttcagaaaagtccatcagtgcaggcagagccttccttttgtttcctgacaaatagtttgttgacactgaaaacaaaagatgtgttttctggcactgtttcaggctttctttttgagaacaagctgctctgtggrtgtgttcagtttctactatttcaaagtccagtgggtggcatttacatgggttttaaactatctttagttattaacattggtgttattattggtaattattcatgatagtaatgcttagtgagtatctgggtatacagggctaaattattaaaaagaaagaaagaaagaaagaatgaaggaagaaagaaagagaacgtgtgtgcttgttctgacctgtagcagaccaggtctcacaccttgactccctgggggcacctgcttcattttaatccccccaaagcagtaaaactagtacatatctgtacatccatgttggtatctgcagctacacacacacacacaaacacacacacacatccatccactcattcacatatatgtgtgtgtgtctctgtgtcatgtatggattaagattagacagtatagtttttaaaattattttttattggtacataaaagatgtacatattctctgggtacatgtgataatttgatacattaatataatctgaattggaatatccattaccttaactatttctcttttcttcatgctaggaayattcaaataaggaacagtagattaatgttaactatagtcaacctactatagagattgtgctctgctgtactttggcctcctttagccacagctggagctggagcagctgagacatagggcaccaagtccagaaggtgcacagagcagcaggaccctgtacccagcccatgagaccatttttctcttttaggcctctggacctgtgatgggaggggctgccatgaagatctctggcatgccttggagacattttcttcattgtcttggctattaacatttggcccctggtcacttaagcaaatttctgcaactgggttgaattgctccccagaaaatgggcttttcttttctaccacatgatcaggctgcaaattttccaaacttttatgctctgcttccctgataaataaaagttccagtttcagataatctcttggtgaatgcatatgactgactgctttcagaatcagccaggtcacatcttggatgcttcactgcttagaaatctcttctgctagataccctaaatcatctctgtcaagttcacaattccacagatcactagggcagggacaaaatgccaccagtctctttgccaaagcatagcatgagtgacctttactccagttcccaataacttcctcatttctatctgagaccaactgagcctggaattcattgtccatattactatcagcattttgatcaaaactgttcaacaagtgtctaggaagttccaaactttcctacatattcctgtcttcttctgagccctccaaactgtccaacatctgcctgttacctagttccaaagttgcttccacattttcagtttttctttatagcagtgccccactctactgctatcaattttctgtattagtccgttctcacacagctataaagatattacctgagactggataatttatgaagaaaagaggtttaattgtctcacagttctggatggctggggaagactcgggaaacttacaatcatggtggaaggggaagcaaggcacatcttacatggtggcaggagagagagagttcagagaaactgccacttttaaaccatcagctcttgtgagaactcactaccatgagaacggcatgggaagaaacaccctcatgatccagtcatctcccaccaggtcccttccccaacacatggggattataattagagagagatttgggtggggacacagagccaaaccatatcaataagtaaattttgaataaaaaatgaataagtgattttcaaggtggtaggttgtggttgtggccttggcaccagctcgtgtaaatacagaagaaacacttggccttattgaaagagttggttagtttctttcacaggcatttctgagaatttaataaaacaatggattatctccccggaaaaaaatgcatgtactcattaaaacacctttgcctgtagatccttatgaaaatttcttttcacctctaaagtttggaccaagtctcttttttgtttctagtcatggaagaattcctctttgctttcaccctccacatctccatctcatatttgtttgtgaaacaatttttaaagaacaagtcacattttttccctcatattgctggtgagctcagggcttaaaactccttttgtgttaaatattaaatggagtatcttaaaactctcctttgtagttttcaaatttaccaaagatctacttcttccatggagttagtttccacatggaattatctgtaaacatcaaaggcccatatttcttgggttttttttttttccctgaccactgctgttcattaaaccaatctgctcacaaatacctttttggtttcttcacttgtgcacatacccttgtctttcayttttttagatttctgtatctctttcaaatcctttcaaagtatatttttttaaaagaacacttccatcctccttatagcctatggttaatttcctactacacactgttgatgattaaatgatttttaaattcctgtttcatcactttcttttttgatttgttacttaaagtggtcttttatctctcccttgatactctaagattttcaaaggaaaagttatatacccttcttttgctttatcttttctccatattgttagtataaaattaatgtttctaatgtatttcagcacatagaaaatgatatgattagtaccttgtaggtaatgaagttaagataccttcaagatgtttacaatattttatttgagataagagatttaatgaagctcagtgacatcatagtgcatcactgagtgttaaaatgataagccccagggctgaagcttagacataagcctctagttttgctggtgtcttttctgatggtgtgtgtgtgtgctatatcagtcataaaatattttgaatatcacctctagtataggaaaagggaagaaagatgctccctcttttttactttttgcaagagaaacctggatccagggaatacagagcaggctgcacttgacattattgacccttcttgaatggtttacacacaatgactactagctgactaaactcaaatttggtatttgagttgggacttgagtttggtctttggtctttgggactgtcatttctgaaattagtgtcctgtataaccatatagtgtcccatgtaagaagtatagtactgccccaaagcttattcgtatagagaataggaatgaacatttgtggtattttataaaataaggcattttcctaggcatcataagatcaagtgcatttactttctttggatgtgacaaagatagaaattaatgattaaagctttcaactctaacccatccatattcttctagtttctgggacaaacattatcacaaatgttgtacaaaatcaaagcagatgcattaaaatttacatttttatttcaggcttgatgattggaaatgtcattatataggcacacattttgttttttattttaaaagagaaatcaatattagctgtcttttcctcttccccaaatagaggatagttttgaaacaaaaaaagtgccctgagattgaatatttatatgaactttgttgtattctttgtaaacttcttgtgaggaattgcatacttttgattaccagactcagggaagtggattcagactataacaagattcttttataaatagtcacctcccccagtgaagaaagcacaaatgagttcacctgacttcccctctaaagaaattccttcaaaatttctcatttatgatgactataaaggtgaataacagcaacaaaaaagctttatcaaatgacccaagcaaaggatttctatgtgactgcaagtcctacctctgatacttaatttgacattgtcactttatcacaaattttttacatgtgtacagccctgatatgcttgtgttttaaaggacagaaaaatcaatttcatttttgatctttacattcacatgaaagtgttctctttgggggaaaagagagaggtcagattgaaatctgtggtctaaggccaattaacattagaaactgtgttgcaactggtccatagcagataagccttctcccataaacactttatactgcaagctatgtggcaagctcaaataaaagattacacaaaaacacaggcattatctaaagttcaatgttcagtataaaccagaagactatataaaatgcccaaattgaagtacaatgtattaatgtttcatcaacaagtatttatttaacagctccacagggcatgtggccagtgcttcatgccacasatatgtgaagttatcagactctgtccttatgctggggaggtctgtagcttcaagtgtaaacaaagaataatctaaacaagaatttaaaatgcatcgctagcttttgtatgctacatatcaaaacagaggagtagtcactgaatactgtaggaattctgagcagtcaagttttagtattgccagtataagtagtgatagcagtgtgaatttagctagaacagagggctgatatagggaggataaagttgaagaagtggcttgtgtccagatggtggaaggcctgaatttccaggttaatagaggttttactccataagcaaaataccccttatttatgtgtatgtggggagatgataaatctagtggtggtggtgtgagcaagggggagagtctgagataaatgcatgtaaagcttgtagcaacagtgcctgcctccttttatgtgatcagtaaatataaattgttaatgttaaagagaacaggcagtaaaatatttccataatccaagaggcgatgttgaattagacaagggttatggtgagggaaatggaaaggaaggaatgaataacaaaataattgcgagcattattttttttctttgtccttatcattccatgtgagtgggaaagagtagcagggctaacttcctgggaaccaaggggatactgagccgaagaaggttttgtggaaagggagggaaataattaccttgacrggaagaactctcacagagattttcttcatagtgttgtggaaacacaggtagatgcmggtgagtcataccgaaccataatagttcaaggggcatgaatcaagcctttcatttagataccataaatgactaaatgtggttatgagtgtgccctgcaaattgaaggtgttttgccaatgtgggtgacagcgatgcctgccaagtcacattcatgaggacaataggtgttttacccattataacatgtgtaactgtgatgaaaacatgaaagacactgctaaccctgagctcccacagggaaatcatcctagcttactttccctatgactggttaggccaagttgatcgacccagtttcctttctgcattttctggaaggatgttttttttttttcctggaactagtcttaagagtttatttttttaggatctgtctatagtacttgaaggctgactgccttggtcttaaggagacattataaaaagaagtcatatgttaacttttgtaaatcctagccatcagttgctgggcatgagttttctctttaaaaagtgtaagaggcaattatcttcatctgataagaattatgagttacctaggaacctagtttgtacacgtcagtgaggcacaataagattctattagatgaaatgacaaaaccttaattgaggtaacacatctatttacatgttgatttccctaaattttgattaatatttaagatatttatcttatgtaaatgttgatattcatttatactgcaattttttttttaaggctcactgcctttttcataaaataaagcacgtccagttaatcacaggacagctctcctttccctttttggattagtaaaatggcctactgccacctggtggcagcatgtcctagtccagaacagcaggcaggacagaagagtcacttgggatgaaactgttaatacaaacaaagaaataaggtcatgctcacatattcactcgtgtcccagcatgacctcaaatccaacatgcctaaaacaaaattgataatatctgccttcaattaattatcttaaaatctctactatttattgagcatgaatgtgtcgagacataaagcactttacatgcagcattcttcttaatcttgaaacaaggctataaggaaattattattattctcacttacaaatgaggagattgaggcatagagaggttaaataacttcctaatgagatgctgtcactcttaactgttattatactctgccttctgacatgttgcaggacatattgtcctttagtcattcagatttgaaatcctggtgtcacatcgtctcttccatctgtttcgctgctcattcataatcacttgttttatattcctttgggattttttcctgtatctatcaattctaagtgccaaagtttctagtccagacctttacaacatgtaaatttttgtagcatgttcctgattgacctcttttaattttttatatttaaatacattttaaagtaatctacaactacatgttattataaacatccaaattatagagaagaatgcagagtaaaaagtgaaactcctctgtcattactttcatattctctcactaatctccaggaaagtaagcacatataatttttagtttgtgaatttttttttttttcgagacagaatctcactctgttgcccaggcgatggcatgatctcggctcactgcaacctccgcctccttggttcaagcgattctcctgcctcagcctcccgagtagctgggactacaggtgcccaccacgcctggctatttttgtatttttagtagagatggggtttcaccgtgttagccaggatggtcttgatctcctgaccttgtgatccacccacctcggcctcccaaagtgctgggattacaggagtgagccaccatgcccggccagtttgttgattttttaaaatataaataaacctataacactcctaatatttgtaatttacccttttttatacaacaatgtcctgcagacacattttatacaacaatgtcctgcagacacagaaaataacacaatctttctgtgttaatgttacagaatttacatacrgtagacacttgataatttacataattatagacttaaattacatactattttcatctaaaacagaaattatattttttgtttgtttttatcaaattgaagcatttgtttcttccagcatttcttttcatatcatgagtttaatcttcttcttggttattgttaataaagatatctttcatggcatggtatgtcaataaagattattttttaaaatatcaataaactgtgtgtgtgtgagtagttgtggtattattttactggatacttttttgcatgtaagtgccaaactcaaacattctcagctgccttgtacaaatttctaattggtttactatttttatacatcagtagttctcaaatttaatgtrcattagattcagctgggggacttaataaaccccagattgttgggcccacccccagagtttatgatttggtaggtatgaagtgaaacccaagaatttccatttctaacaagtattagcctaaagctgtctccttgcatattttaagttcagcttaaaggtttctccgtgcatagtaaactataaccttactggatgtatgaacagacagtaacctactcttgtgccaatcactgagtttggccaatcaaagggggccaactcttcaaaccttgttcaaaataaggcaaacatcaagctgtaaccagtcyggctgtttctgtctctcacttctgtttttttttgttagtcactttccttttgctgtccataaatcttccaccaagtggctgcactggactctctgagcatactctggcttgggaggctgcctaatttgtgaatcattctttgctcaattaaactctgttacatttgatttgtctaaggtttttcttttaacacaagttttcatgtgatgcgatgctcctgatctagggaccacacttggaggatcactgatccgtatgactctcttgtgatgctttatactcctaggatatcttgatcccttctcagcactctctgtctactgcacgtaagaactgtagcttaaagagagagctgaaaatggctgtggtggacatccgggcctggggtgtgtgcccttccagaatggggccagcagaggctctaaaaggcagacttgatcagaatgacagtcctgccaatggttcaaacctcaaattaagaaacagttttcacacatgcaaagggtagaacaagctattgtttatccatcagtctccacagcagcacttgccctagagactgcagtccacagcaattgcatcacctttgagtatgaaggacgatgttataaatgccactacatgcagaaaacatttttaaacttatattcttcacttcctgatcagagctcagctaagtaaaattctaggaattaagtgaattgatgcattcagtcaaatattatatttatttcattgttactatggattcaattctagtgtgatttgctttgtaaagtaattgtaccaatctattatacaaaagtccaaaattgttgaaacaaaggaggattaaaaaaatttgctatagggtttttctacaaatgtagtaaaattgctttatctttaaccatttgatttataaaaactgcctgcttatatatatattggacagaggaaacacatcatttatagacttgattagccaaaatacaaatgtaacatatgtacataaaacttatgtaatggagtatttagttttgagaatgatatataggagacataataataattctggagaacttaatctgctagatacattgtaattcttgtaaaggcttacatatttatattttgtttaaaccttttatttttatttttgcaccatcatcccttcatttttttcaaataaaaacatacttagaagtaaattatatattttctaaatacatgcattaaaatttatgtgccccaactttcaaatgctgtattatgtttctgaacatatatgcattactgtcacctctagaaagttattgaaaccattaaattgcctggatggttgaagattagaaacattatagtgtattaataggacaatgccattctgagtgatctttggagtatgatactttatatactaattcagctttacaacctgaaggtagaaaccaattatatgggacaaaaaccgctttggtatattatttcttatctaagacactgttaaaatgctcaaattttactagtttaaaataagaaatgaggaccaaaatacatggtgttctttatcctaaattccctttgcctggtgcaaaaataatggttcatattttatctgagtgttcccaactcatcctcttcacattacacttcaaggtactgtggcatgcgaaatagaagtttggctcaatttcagactcaaccatcacctctccatgcggtctcaagttaataaacttccctgggcctgagwttcctcatctgtaaactaagagcatgtgagagtgctcataaaacattatttgaaaagactggagagcaagcatgagtgagtagtgtccattgaagggtttgtcccaataactcactggagagtgttcatgcctttcagtctgtgagctagcaaagatggagagcaatgaactaatgaaagagatatttagatgaatatgttgcttaaacattttagtgttgatgcataatcaatgcactttgaatcaggaaaatgcattgagttgattaagatatttcatccatattgcttctttgcttgaaatatttctgtgaaaaagtattgccagttctggaaatagagttaaaagaatgcttgagtactttattagctttcactaaacatgcatgtattcataaaaattakgtacagttttctaacgtgttttcttaaactttatacaaatgctactacaatggtatatatcattcttttcattctttaacttactctaatccttgaacaatttatttttaaaaatttaatttattttatgagagatggaatctttctatgtcacccaggctgaagtgcagtggctattcacaggtgcgatcrtaktgcactacagccttgaactcctgggctcaagtgatcctcctgcctcagtctcctgagttcctgtgactatargtgcataccaccatgcccagtcattgttttaatttctacatagtatttcattttatatctacaactgtttgtttatcttttctcctgtgatggacatttaggttgtttccaaattttcaatgccaggattctttagtggatgttcttgtagtgtatcttcttgagctcatacagcatgtagtctagaagtgaaattgagtagtacacaaatattcagctttaccagatagtgccaaattgctcttaaattagttgtaccaaatcgtactaccactagtactgtataaaagctcatttcacattttcctcaatacctaataatgttagcattttaaattgtaatgtgaaagtataaaatagtatttcaytgtggttttatatgtaatattmctaataccagcacatgtagaggccgtgttcctgtcatttttattaattatttggggtttctttttatgtgaactgcccaattatatccaggcatcatcatatcctatgccaatttttctactgtgttgtctttctcttatcgattataggtctcaacataatgtgaatactaatcctattttgggttatatactttgcaaatattttttccaggtttttggcttatattcaaattttatttcatggtgaccttgttggtgtagaagattttaactgtgatgtaataaatattatcaatcttttccctaaggtttgtatgtctttttgtttttgtcttgctaaagaaaacttccctagtccaatgtccttaggaagttttgaagtttgccttttacagtaggcctttaatctatgtgaaattattgtgtatgctgtaggtagcatcagtttttttcccatatggattattaatgataacagtgttatttattgagtcatccattctttcatcactaatttgtatatttaggtatcagttttttactatgttcaagtattctattgacttgtttctgcaataatcaaaaacatgcatttctgtttttctgtgaattcattacatggccactttggaaggtttccatgacttccatggtttcagttacataaacaatagtccatggacatcaatttgctcctgatactgactcaatgcagcagtcattagtgtagtctaccaaatgtttccaattttctaccttctgggaaatggtgggattggctgtttctactctctttacatttagacatgactataagacttactgccagtgggttcattcctgagtagaatctttaaatagaagctctaggaaccagcctgcgattcgccacattttccaatcctggctcagcaatcatggaagcatggagatagaaactccctgagtgagactgacatcgagcagagctccagatgaccttgagtaccttaatagacctggagctgagtgaaaccagttgtcttaaaccactgagatttttggagttgttcattactccaagatgacctggcatatcctgacagatacagttaatgtactgtaatttacaatttgataattggggaaatgataaacgaacaccctgcatttgttagaaggtaatatttatatgttaatgtctctcttttcaattccttcccccaactgccttacaattgtgtcattgttagggcactcacattctctaatacccattacctgtcaatcaaattcaagttaaattttgatagcacacatttttttttttctcccagcctgtatttcttcccttaagcctgcatttcttctcttggagtgtttacatttttaaagaagttacctgaaaagatcaatgttttacctaaaatctttaatgatgatgaccatttttatggccctacagtgaggggtcatttgtgaaaagcaggaattctcagcttcctcttattagaacacattggtttctactaacatgatatacatttgacagtggctttgatattaatgatccataattccttgttgatgatgattgcattcatgaacttgtgtgttcagtatctgactcttatatttctggaatggtaaagataagaggggaaaagataagaagtggaggtattactaaaaggatatttcctgggcagatgtatctttttcagataatctctccactgcttaaatgttcctttatattaataaattcctcctagatatgcaaaataatctcatcttatggcagggttggacagtggtggaggtgggaaaagaaaggaactaatatccagagaactatatttttaatccttcgtactttaacataaagtacatggatcctttgattggaatatttgcctcctaacagctcrgaggtgttaggggaagcagtggatggttggatggagatgatgagtcattttagagcctgggacatggcagacatacatggcaggcagacactggggctttggctttgatagagggaaggctcaggacctctcagacagaacacagctgtgagaagtgatgtggtagtgggcataatcaaattcctgctttgtaggtaaaaaaaaataaatgttggtgtgggttacaggcattctgaaaaatcatctcaagtgtcagaagctaccatttatacctgtaatagttttactaaagaataccaaacatttttgatattagaatactatcttgccaggctttttcctccttaaaaaatgaatgttaattggttacttaacatttacatatctctctttttaggtggttctttggagcaatcrgaagatcagatgcagagaaacaactattatattcagaaaacaagaccggttcctttctaatcagagaaagtgaaagccaaaaaggagaattctctctttcaggtaagggtattgttttgtgtcattcaatatgagcttgagagtctgcagtcatgagctttctgtgtgaacatggacacgatcatttaaaatttgccttatttcttatctttacagtagcaccaaaattaatactaaactactyaagagtaatataaaaattagccaaaaagatactgtctatggctagaagtctctataaacagtttcaaatatatatgctctagatatgaaatggagaacatggatctgctgacagtttctaacttttgcattatctaggattcttttagggaaatgataaggaagaaacaaaaactctactgttgtcaaaattatcatgctacaatataatttttttcttcttctggcatttcaattctctttgctggttaaacataaaacgaattgaaatgattaatgcaaatatatgtgattaaccccataatatgtaaaatttggtcaaatgtagtttttcacttaaggatcaagtacgtgtttacactgccccaggagaaaagaagcacaggggacctgaaaatgtactcagtagttacaggtacctaaatatatgtctttgctytgaaaaagctatatttttaggtatattgccaggttgcagaatatcttttcttgaagaccctacactaagtcatctctaaatatgaggctttctctcttcttgtcccgttctgttctctgtgttgtcaaggtctgtcatttgtgttatcatcccctttaaatacgtattattctgtttctccaattagatgtgaaccttgtggagggagaggctttgcttccctctattcctgtttccctgcaataaatgctgattaaacatgatgcccatttgcctcattgtgtctgcctgactcactgagctggaaatcagggcagccgtcatgatgccgcatgaaagcaggccataattccacatatattgggaactttgatctgacctgaactctggccaggctgtctgtatttggtacacattatccttctccacacctggtagtcccaaatatcagggcagatgggttggagctggagagaagcaagggcagtggttttgaggcaggtgttgccgagggtccgtacttcaggtcctgactatgctgacactgagwcaatgtggtactccagaaccacatggattcaacttcactactacctaatccatggataagaggttagagtatgctagttctgacagttactcttgaaatgtgattgtgtgtgatgtgtcaattaccatttttttgtttttttgagacggagtgtcgctctatggctaggctggagtgcagtggctcactgcaacttccgcctcccgggtttaagcgattctcctgcatcaggctaccaagtagctgggactacaggcgcgtgccactatgcctggctagtttttatattttcagttgggacgggatttcaccatgttggccaggatggtctcgatctcctggcctcgtgatccaccgcccttggcctcccaaagtgctgggattacaggcgtgagtcaccatgcctggcctgtcacttaccttaaatgttgtttatacccaaggtgataatcaaaatatctaatgactgatatgggatgggcattagccactcagaaaagatgctccaccaggctgggacttcacaccagtccacatctgtatatccaagtgatataagtgaatatttcatatagcaatgtttttttctcattatgaaagaaacataaaaaacttttctataagcaaacagcttaaagaagaataatctagaataagactttckaaagatgcattttaaatatcgaaatacttttcctgtcaggatttttaaaaattcttgacctataagtatatttttatgcacatatacatatacatacatacttatacccccatacacagaaaacacaatttttgttttgaaaaattctgttctgaaaatgaattttcagaagagattctgcatcaaacattagcttgtaaataatgaaatacttgtgtgtgtgtgtgtatgttttgtaaacaaaattctccaaaaaggaattcgaaagaagagactttattccagtgacatttgcagacccagaagatgcagccttctgtgtaaarcaaagatgcattccagagaacaaagggagggttatgatttcatagaaaagttactacccaggttcccagtcagtttcatttatgcaaatgagggattcaaacttgcttagttctgagtggtcaatacagctgaaccttgattgtttgtcaaagttgagtcctgattggttgatacagctgagtcatgattggccaaggcaagtaagttctgaaagtcccaaagttaaagaggtgtggattttcaggaaactcagagtatgtgtgtgacctctatcagcaaatggacccttggttctattttaaatttaggaccagttagccacttgggatccatcttgaagactggctctttcaggttaacttttgttaatagtgtatatatctataaatctatctatatctagataaatatacacacatgtgtacagacatatgtatatacatatgtgtgtgcatgcatgtatgcatgtatgtgtataacatggatccaagctccatttttcttttctttttttttttttcagacagagtctcactctgccgaccaggctggagtgcagtggcgccatgtcggctcactgcaacctctcccttctgggttcaagcaattctcctccctcagcctccccagtagctgggaatacaggcatgtgccaccacatctggctaatttttgtatttttagtagggacggggtttcaccgtgttagcctggatggtctcaatctcctgacctcgtgatccatcctccctggcctcctaaagtgctgggattacaggcgtgaaccaccacgcccggcccaagctccatatttcttatttctgtcttgcagtatcttgtgaacatttttgcacgccctttaatattcttctattacttttagaagttgcatgggtatatcatcatttatttgacttattgtatattttgtacattttaattattttgctgctataaaatatgatacagtggacatccttacagataaatagttgaatatttgagtattttcatggtaatatattcagaggaagaaaaatctttttgaaatctttatgcttaataagaagagttataagagaattccttgtttaaatacatccctgattgtttatttgtctttggcaataagtgtcaaattaggtggcagctatttagtcaaaagtgagatcaaatgtttttagattagcgttaaaaatatagaagaatgaggcagggtgtggtggctcatgcctgtaagtaatcccagcactttgggaggccgagctgggtggatcacttggggccagaagttcaagactagcctggccaacatggtgaaaccctgtctctactaaaaatataaaaattaatggggcatggtggtgcacacctgtaattccagctactagggaggctgaggcacgagaattgcttgaacctgggaggtggagattgcagtgagcagaggtcacgccattgtactccatcctgggtgacagagtragattctgtcaaaaaaaaaaaaaaaaaagaaagaaagaatgatattttcatgaggaaaacaaacttaaagtagaattacctgaattatatctttgaataatggccaggctacagtgactgttcagaatactctctaagtagaatgttatggaacaaaacagctttacaggcttagaaaaaaattacaaggatattggctgttatgtgctgtgaatactctggagcttgcttatggatttaggaagctctgcaggccttgcttrgagaccagcatatcattatgatttcttttcaatgaagtcaaacaatttagtcttttaaacaaattatctgattgctatgtattcactgggggacaaagtaaatgcataccattatgttctactgaaagaaaatttttcctattagccagagggaaggctatacaggagaaaaatggaaaggaaagaaaaaggactttcaatatatccacattaaaacaaacaacccaattgctgactgttgattactgctaaggatcttcagatataccactctagatttatttcttagtgcagttgtcttcttaatcagtctgaattgatggtcttcaattttgctgactgctgtgctgctaaaggaaggcaaaaaatatcccttttctatctctttctttcccacttgagtttccttagaagtattgtctttattccttgagcaacaatggcttggagctgtcagaaaagagcttcatgarggtgcatgatttattgatgctgagtgggctgagaagtagcagcccaaggttgggtgggtgctaattgggttgttgtgatccctgcacggctgtctgctcttgtgaggtctgagtaratctgaaaagagagttagggccacgacacctctcataatggcaagacactaattagctgtgaattacagcagcgcttttgaatattacatattatatgtggtagccagagaatctgtcttcattagatgcatgacagatagttttagtgaccttactcttatttgtcattggtagtgaattgtttttctgatgaaaaataccaaattctaactgcatgtcaactggtttggctatttcttgacttcaatcaattactttaaaggaaactattattgttattaccattaatattaatttactggttggtattctataagcattagtattatttattgtttaaagtacacttaaaaaatgcactttagggtctaaaattgagctgcagctgagtttttcagaggagattctgcattgaatactgtgattttacttgagacaactctgcacgtaaaagcctacagagtagtagagctttcacatttttcgtcagtgaaacctgttcagcaccaagcaataatatattgaagataattgaaaagtgactacattgaggccataaggcaaaagagctcatcaataatattcaaggtgatgcatctaggagttgacatatacttatacctttgtttatttcttcaacggcattcagtatgcccactgtgtgccaggccctctagtaagtgaaaggcagccaagaccagcaaggcacagtccctgaactcagtctagagaagaattacaatacagttattttgttgtgagacaagagagggcaggggccaaatctctgaggggagtcagggaaggtatcaatttgtgttttaaggtggcagtgtgtaaattattatttctggcaaagacaaatgcacagagttgtgagtttttctggtgttttgtggaatgattggaagggtggaggatagtgcaggtgtgtgggtgcatgtggggagtggatgaaggcgaggagggatggtagaaaataagtgtggaaaggaaagttggaactagactattcacgaccttgtatatcacactgaggaatttggaccttgttctacagagcaaagttttaggcagaaagtaattggtgtaatctgtctgttagatgttacctttgatgttgagaatggatgagagatttgtaggcaatagtccggggggatatgagaggaacacacacggtggaatcactagttgctgtttgaaattataggtgcaagatgagcagagtccatcagcattctgcagacagaagcaacagatcccaagctcagctggctgcactgtctctgctctagcagagggcatccccagaagcatagggcccctctgttgctcttctcttttatgagcaagtatgggagtcgcccaaggactggggataaagactgctttggtgctaagcagtctgagtttagttatcagttatttgcaaggttctttggaaagcccagcacctatgagcttgaagtgctgtgggaaatggcagcttcttttgctcagaagaggaaatcacttggcctgtgggaagctgagttcagatgcagtccctatggggtgacagtgggacaggcctagtgaaccctttgctttgcaatccagaaagagttcccaggattcttttctacacagtctcctttctccataaatgagagcttgaaccaggacagagttatgaggaacaaagagaaaagaatagaggtgagaaatatctagaagataaaactgacaggaactggtgactaatcagaaatggggcaaaataagggagaatgagattctaggatggatgtcagatctctgacatgagggattgggggatagtggtagctttggctaaatgaggtattaaggaggagatgatttacggagagatgggaggaaaccaagggaaataatctcagaggtgcttgagacacatatgagtgaacatacaaatagccattctccttttttttttttggtcagggagacttgtttgtgctgattttgagcagagtactttctatgataaaatttcctcacagtgaacttggagttcccatggagtatgcaggacttttataatagtagtttgtgatcactgtgaagtcacttcttgagaatataataggcctctctagtggcatagtttaatggaaaaataagcatattagaattttcagaacgaaatacatgttttgctcttcaaagtaattgactatgattgtacaaagtattgcacaaatggtagaactgcctttttagaaagaatactactttatgtgataattatttgatatcccttagctggggtaattatgtgttcattaagggcagctttgatacttggaagtaggcagaattatccaaagcaactttctgaataatatggatgattaacttgaatgatactctggatttgtaactttgtaaatatttctgcatgccttgtaattaattctaaaggcaattcaaaaagtaatgagaacagtaacagcttccttaggaaagttgtgtctcctttcttgttgaccttgtgtgtatccttcatgttgaacttacaaattaaaagacttatttaaatttgagtggctttttcattgtaggtaaaaatatgcatctcaaactagattttaaactccttcagtagaagaacatgtttttattgcttctatttcatgcttcttctctatcttcatagtttacagtagagttttgtaaaatcagtagccacacaaacacctctttacattgtagtctacaacgtgcagagataatcaaggacattgtcactgccttaaaccttagaagtctgggccatgtaggattacaaataatcctcctatctgctgtgtttcagacttattttagaaagacaatttcacaccttgacaggtcagttttttccaggtaataagacttttgtagaggaaacacaatcagaargacatatcacttgttagtatgaccctctatgtctctgccaggcacagagttcgtcctaaactcactttatacagacccttcagctaccatgattctgttcaaacttttgagatcttcagagtcattcgaatgtgactcagtccaatcacaaaatgttctaagtttcatcatcagtcccttgagccattcattcrttcttcattcaaaattaatgcgaacattgtggccactagtgtttgtcagtaattgtattaccattaactacagatgtaaagacaattgtatgtcccaagaagagacacatattaaatgactggaaaaacaaaaaaaatattgctccttgaatttattatgcaatgaaacttctatggattctgggagcattttgatattggttaaagatgttttgctttttaaaaagtgcacatgctgcagaaagagaatgttatgttaataactccagtatctcatataaaatgtattaaattttaaacatgttggtgccatcttagaaaatgccttttaattaaagtcataatttagttktgttcagctaaattgcaaatatcattgcctataattgcaagtgactttttctgtgagttatggtatgtactgccttttctgaacattaccaatgataagttatatttcaaatgttttaaatactctataaagttaaattaacattttattatgtgcacgtgtgtctgtgtttgcatctgtacacacacatatacaygcagatgcacaggmaaagaaccttttcctctagggcactggttcatgaagaatcttttatcttactgaaaattcataactaacatttctagaaatattctttacaaggcttgttttcttttttttccctcttttgtttgtctgtgaacccctcatattgacttgtcttaattttcttttcttcttttgcttaccttggtttgttaaaaagattttttgtattgatattttcagcaatttggaggaaaacataacaaagaaataatgcctattattaccctttggatgctgctttataataatcaatttcagatattaaataaataagtaggaagttgataagtcatgtgagaaattgctatatttttgtaattcatgatatattctacccccttgattttttcattttattaacagctgaagtaaattgatcctttatttacattttgtactttcagattaagatagtggctggagttagcatcctcctacttcctattcaactattcaaaacatacataagagatgcagaatcatagtagctctataaactaagtctatcaaccaatgatttcttagaatctgggtagatactctcacaccttcagtgtgaatgtaggttgagatgttgttaagtggctggaatagattttgacctacgyatcagatcagtgctagtcaagttgaagataggaggatgctttcactcatgctgagtgtgtgcccctgttttagagaggcaagatgtgcagttagtggaaaaccaggcagcttctgctctcctaagtggaackaactcagtgatctggcccttccctaggcaccacatagctcccttcatttctatttacagatttgttgtctggtgtgggctttcttcctggtttgcagatggccaccttcttattgtatcctcacatgggagagaaagagagagggctttggtctctttttcttcttataagggcattaatcccattatggaggctccacccctcatgttctcatttaaatttaatcgcctcccaaaggcttcacctccaaacaccatcacattgagatttaagccttcaatatataaattttgagaaagggacacaattgcaattgcaggtcataacaattgcaaagtattaaattctgtttcttattgtcagtggccatgccagtaaagtaggggaagatccactctttttctggcaaaatcatagggattgaatatttgttagacattgctaatatgtttagagacttaatgcatttgcagccctgctgtgtgtgagttaacagaagaaagtgtagactcatccaaatgcatagcgaggaggacaggcacatgtttttctaagtaccaggtttcttttcattcaaagatgagtataatgacaaaaaaaaggcgggggggggggrggttgtgagattctggatacccaataacaaaatttcccaacttatcttctaggaccccaattctttgataagccaatartgtttcactggaaagagggggttcagcagttacgtgcacttgaaagtaccccatgttacattatctctgccttgacttgacaaagcatactaaagtctctgataagtcttatggcaaagaaatagaactttttcaaccctgaatatctcaaactacttggtcatagaaccattaagttttctataaaacatggtttgggaaaaagaatactataagagatgacaataacgtgaagatagaaaactcctacatttgagacataattcactgaaaggaacagtagataaattttgaaatcatttgatttgaaatctcagaatacaagaaagcacaaattctatgaaattaagcataaaaagcagcatgaaaaggcaattgatgagagatatcacttagtgatataaagagcatacttgagatgctctttggggagaaagaataatagattaaagtttgtgaggacagatgatgcacaaagaggagacatttctttgaaatttattagaataattaaatgcaagcaatagttaaatatgtagcataagaaagctttcctcagttcttttttatttttcaagaaagcatgcttacatttgcccttaatttttttatttgtataaatttatggggtataagtatagttttgttatatgaatatattgtgtagtggtgaagtcaggccaagccctcttttatattaatgtttaaattcgtgttggcagattgaaaatacagtgtttcaagcaaaataagtgaaaacatttatacctagggcatcttttcaagatattataatatcaaggaaaaatgaaaaaaattctgtgaacatccagggaaaaaataagttaatcacaaaagaatgagaattgagttggcttcagaattcttcacagcattacgtatcaaaactcaataaaaacatataaaatctttcttatttttctcataacttatttaaaaagttgataagtatacattttgcctgactgttgataaagttgataactgcatacttccacctaaaattactaaatgttaacaccttgtgacatttactttctccctctctctcgcctttatttgtatatctacatacatccgtgtataggttgtagatatcatgtcacctcaactttaaaaattttagcattagtatttatgtcttatgaataaggacactctcctacattattacatttccattattaaacctagaaaatttcagatggatacaacaatattatttattagagttcatactcgaatctctcccaatgtcctttctggttctctatttatttgctttttgatataatagatagaagtttatgcattgctttggtattgtatctcattctcttttatttagaagagtcaaaagccttcaatagctctcctttacaaacctcatacattcctatttaccttgacatttaagcccttcatagccttgctaaaagccatttcttgtctaatsgtttgtattactttaagttaaactatgctatgctatgacataagctattgcacgattaagacttgcacttcccatcttctaaacctttctctttactttctttgagcaaggtactcaagacatagcatggtgttttgcatgttgaagtgttttctttataactgttttcttataaaggttgaattgttttaataagaatggtactgttttttttcctggcctcaatttgtctttatatagaaaagaaattttcaaaactatttggagaaacactttgaactatttttaaccattcatttaatcattgattcatacatttactcatttatcatagcactttcatttgtgtttactatgtgacataattatgtaagcaaataaataggtcacactatgacaagcataataatcaagttatatgcaaagtgatttaagacccagaaaagagagcaattacttcttttgaagggatttataagggagggcattacaggagatgagacaacaaacaccattatgcttagtagagagtaaaagcaaatggaaaatagtggcacagaatttgtttttctgttaagacaatgtttattattaagaacctttcttactttgaaagagcaaaggatgaatgaaatgaaaaagttatttctttgaaaggataaacaaaatagactattagctaggttaactaaaagaaagaaacaaaaagagagagagaagattcaaagaagcacagtcagaaatgataaagtgacattatgactgggaaataaaatttttgggaaataaaattcccaaaatagaccaataatgaatactgaaactgaatcagtaataaaaaaatctaccaccaacaacaaaaatcccaggaccagacagattcacagctaagttatactagacatacaaagaagagctagcatcaatcttactgcagctattcaaaaaaattgaggaggagggattcctctctaactcattctacaaaatcattatcatcctgatacaaaaatctggcaaggataacaaaaaaataawactgtaggctaatatccctgatgaacatggatacaaaaatcctcaacaaaatactagcaaactgaattcaacagtataccaaaaagataattcatcatgatcaagtgggttttatttcaggaataaatggaggatgattcaacatatgcaaattgatcaatgtaactcaccacataaacagaattaaaaacaaaaattatgcaaccatctcaatagatgaagcaaaaacattcaataaaatccaacatcccttcataataaaaactgaacaaactatgcatcaaaggaacataactcaaaataataagagccttagatgataaacccacagccaacatcatactgaatgggaaaaagttgaaagcattctttctaagaactggaacaaaacaaggatgtccactctcaccactcctattcaatatagtactggaaattgtagccagagcaatcagacaagaaaaagaaataaaagtcatttaaattggaaaagtggatttcaaattgtctgtcttcaccgatgacgtgatcttacacctagaaaacctgaaagatttctccaaaagactcctagacttgataaataacttcagtaaagtttccagatacaaaattaacatataaaaattagttgcatctttatacacaaacagcagtcaacctgagaaccaatcaagaactcagtcttatttgcaatagccacaacaaaggtaaaatacctaggaatgcatttagccaagatggtgaaagacctctacaaggacaactataaaacactgatgaaagaaactgtagatgacacaaacaaatggaaaaacatcccatgctcatggataggaagaataatatcattaaaatgactatactgcccaaggcaatctacaaattcaatgcagtttctatcaaattaccaatgtcatatttcacagaattagaaaaaaaattctaaaattcacatggcaccaaaaaagagcacaaatagccaaagcaatcctaagcaaaaggaacaaagttggaggcatcacattacccaacttcatgctacattacaaggctataataagtacaacagaatggtaatggtacaaaagtaggcatacggatcaatagaacagaatagataacccaasaataaagccacatagccaaaaccaactgatcttcaacaaaagttgacaaattcaacaataacgaaaggacaccctatgcaatatattgtgctgggaaaattgtgtagccgtatgcagaagaatgaaactggacccctctctctaaatacaaaaattaacccaagatggattaaagacttaaatgtgatgcttgaacctataaaagtcctakaggaaaacctaggaaaatatctttcagacattgacctaggcaaataatttattattaagatctcaaaaggaaatgcaacacaaacaaaaatagacaagtgggacttaattaaactaaagagcttctgcacagcaaaagaaacaatcaacagagtaaacaggcagcctacagaatgggagaaaatatttacaaattatgcattcagcaaaggagtaatgtccagagtctataaagaactcaaaccaatcaacaagaaaataacaactccattaaaaagtaagttgaggacaggaacagacattcctcaaaagacacagaagcaaccaacaaacatgaaatactcaacgttgctaatcctcagagaagtgaaaattaaaaccataatgagataccatcctacaccattcagaatggctactattaaaacatcaagaaataacagatattggtgaggatgtggagaaaagggaatgcttgtgcactggtagtgggaatgtaaattagtataactcctatggaaaacagtgtggacatttctcaaagaactgaaaatagacctactatttgactgagcaatcccactactgggtatttacacaaagtgaaagaaatggttatcccaaaaagacacctgcacctgtatgtttatttgcagcagtatgcacaatagcaaggtcatgtggtatcaacataagtgtcaatcaatggttgaataaagaaaatgtggtatgtattttccatggaatactatactaagaaagaatgaaatcatgttctctgcagcaacatggatggaactggagggcattatccttagtgaaataactcaaaaacagaaaaccaattatcacatgttctcacttacaagtggaagttaaaccatgggtacatgaacataaaaatggaaataatagacactggggactcaacaaaggggtaggatgggaagggagtgagagtttaaaaatgtatctatttaggtacaaagcttactatttgggtgatgggttcactaggagcccaaacttcaccattatgcaatatattaatataacaaacctgcatatgtaccccctgaatctaaaataaaatagataaataaaagaattggaaattgttttctgtgatgcacttttgaaccatttagcaaataaaaagatctgtaaattgttagtctattaccaccattatgcttgaataactaacaaagctactggattgtatatattatcaatttggccatgataaatccaatatggataatrtttttggatagctagaaagtgccagaactgagattgactggtcyctctgcttctcagaccgagatatcatgtagacataatgatctcaaattgaaaaaaaatgatctcaaacatttgagaagacctggtgcgggttttggattgaacaggaaattaaagctctttggccctggtgatgaaagtcagtcagaaagagggcatccagttcctctttcttttcactgggcttgagaaattaagttcagtttgtatttcaggtaaataacaactaaataaatgtttgaatcttaagkctgcctgattcttaaatcaaataagatatgtaagaaatttacttttgttattccaagtgacaaaaatatgttattgaaaaaataatgtgaaatgaagtccaagtagtgtatcgcgtatacaaacaggacactatgatgttgagtgctactcaactcttccctccatactcttaatttacatctgtgggccactggagggctttcactcaaacatgtgctccttcttgtggcatgtcagaagtaacacgccatcatgtagacaaaacatagaaggtttttgttaactttgtttgtttttagttttcatgacccattaattcataaaaagaagaatatctgattttrgttgaaaacaaatgtacaatttaaaagcatttttagtaatttatgctatatgaaaccacttccatacagtagcagttttgctttatgaacgtcaaaaaattgaccaaagcttaatttttcttaatggtttaggcacctagtttttrtatggtgatagttacacaaaatgtgttcatgatataaaaatgaatgaaataaacacaatccaatttaataagttattgtttctaattttaaaccatgtatctaaaatgatatatgcacattagctgctttataactatttatcagcatcctgtcaatcatgaagtcatttataatgcattttagaaacatgccttgcattatattattagaaaatttggcacagaaactgcaatctgagaaactattttgttgtcttaaaagcctatgcattgctggaattttattttcctatttgtttcagcagagcagggactttctttcaatcccctctctctgcagagctatctctttaccacctgcagatgtttgtaaaaaaggttttgtgaaaagtaaagtaagtaggaagcacaagcataaaagaaggaaaaataagcaaaaattatactttcatttttacrtaattatagtgaacagcactttctatatatctgttgtatgtatagtcccgaacaaagagatgatccatgccttaaagaacttgtgattcatttacaaacccatccattcattcatcaaatatttatttaatgcctactaagtgccagtaagtattcagagggctggactaaatggcaagcgatacagttcctgcattgtgaagcatatgttctaattggcagtagaggggtaatgccaactaaatgaaaagagacacccgtataggaaagatattaatttgttgtgttactctggtttttataagataagcaaatggtcaaaataaaggaaaacacttaattttatgtgtataataataacgagttagagtagaaatgaggattgctttcttatgtcttcaatttgtaagaaatctgaaagcagaattttatgctaagattatcttgattggaaggataaggtcatcagagctccaaatgggttctcccattaagagtattgcagtttatgataacgaactctgcagccagggtgcttgggtttgggttctttctattactagaactgtggctttaggcaagtcacttagcctctccatgcctcagcttccttttcagtaaaatggagataaaacatagtacctacctcttggtggtggtgtttggattaaatgagttaatgcatgaaaactgcttagaacatagcctggcacatagcgagcaaaatcagtatttgctattgtcattagcactcaagcctgagcaataaagaaccttcatagagcttgtcccatgattgtagcttggcatccatggcctatgaagagattgagatgctattataattgcctgtgggaaggaagaaagaaggtactgggtttgttcttttctctccggaatttgtgatgtagcttcagcattttgttttgtttgtttggataatttagtttgcaaaaaaataagaattaggcaaattaatggagctgctatcaggggtagaagggatgcccacagagcagaatcccagtgtcaacacacattactcgatgtataacccaccacatttccctggatgtgccttgtcacaataatgagtctctagaattttcagatttcatctaaatgtttgtggttcagttttctctttcagaaagtagagatcataatttttctccaccacgtttgaatgttatgataactttatttctgtaaaccttcttgctagaatcttagaagtagagaacttgaactgaagagatcacctctttaaaacactgttttcataactgaaggaattaaaggctagatagagtgttactcatccgtgctaacatgactagatgtgagcagatagctctaaaacaggatctgttgatattttttaaacattatacagaagtcacagtgctttctttgaaatgtcctgtattaatcacttttacccataaatctcagtggtttaatcaagctatataatggctgctggtttggtcatggctcgactgggctctgtctaaggtagacaggcctagggtaatctccatgtacctttcattctggaactcaggctaaaggagctgctgctatgtgagtcatgggtttctcatggcggagagcagaagactaagaagaagcaaaccaaattatttaaagcttctgtgaagacagctgtttgtcatggttgcccctactcaattcaccaaagcaagtcatttggccacatcctgagtaagtgggatggagaagaatgttgcatctaattgagagtcatggcaaaggctaggagagaatgaataattaaccccatgtttcacataaatagtcccagacataaatttgtacacatattaatggtataaaaatagcctcaaataactgttcccccccaaccaaaaggcaacatcactgtattgaaaagttgtctactataaaatatatgtataatataagcactcagcattctaatcataatgattttgctgcttgttgggagaaagtattgatactttcctctttatcttttttctttatctcaaaatcactccagattggaacagaagctctgggcatccactgcgtgagcctcagtttcatcatctataaaatagttgtagcatcagtcctgtctacgttattggttgatgagaataatatctacagagtgcttcccttgtgctagacactgtcctgaacatttctacatgttttagcatatttatttgaagtaggtactattattaccaccaatttacagtggaagtaactgcgtcatggagtagctgtccaaggtcacacagctagaaagtaaagaatctgaggtttatagccaggctatctgactcagaacttatgtggacatccaccccattgtacaataaaaaagaatatgtgaaaattctttgcaaactctagtacagaaatataagattgagatctcattcatcattccttttaaaaataaacattgtagcatttaaatatttaaacacattactaaaaattgtagttgcagtgttttgccctcaccgctgtctctatccttgtcttatatcttagtccctgaaaggaaaagtaaccacccaaagagagctcatgaaagggccgggcttagtgatgctatttgtgtggggttttggaaacaagtaatagtagttactatgcatggaacgctcaccctgatttaggtgtatttattataatcttcaccatgatcctgcagggagtgttctttttggctttacagtgaggaaactgaggcttagagaagatgaattaattgatttgcatgtaagtagcagatctcatttccaatccagctctctgtgagaccatgctcaggctcttccccaccatgctgcctttcaagtacaaggctcaggatgatgtcattgtaattgtcagatggtattccacccacaaggatgtgcttattgaagctttcttgaattgtgatagaaaaatgctccatgagctctctaaattaagatctccaaatgaagatctctaaattatcaccaaatcggcacatcgaaacaaatttgtttcaaaagttcacaacagaagtggatactgatcatgtgattcaaagtctaattcagaagctattggagttttttttttttttttaatctccccttagactttgtgtgaatggcagagggaaacaggtataggatatttcaactgagatttcaggaaaaaaagaaacaaaacaaaaaacaagaggaataaacatcaaaactcatggaacaggccatgttctgcttgggacttacttctgtagattcattattagtgcatccatttgtttatctacatatccatcaaacatgtgctgagaactcttattgagccaataggttgcagagcacagacatcaaactatttggatttcagtctcagctccrtcacttaatagttgagtggtcttgaacagactgtttaagccatctcagcttcactttcccatatcaggactgatgtgagaattcactgagataatgtgtgtgaaggtcttggcaccatgtttgacatacaataagagctcaataagtgttagtcatgatgatgatgataatgataatgctgatttgaaaatttcgtgctaagtactaggataataaagaagacatggtctctacaatcaaagggctcaaagtccagtaggagaagtacagggtaaatatataagcaatgatgtggaatgaattcaataacagaggtagatacacagtggatgctaaggacgaagtgagctactctgctcgcttacactgggcggtttcataaaggaggagatgcctgagctgggccttgaaaaatgaattaccctgtaatatgtaaatagaatgatattctacyttaacagtttgtgaaaatgcacagagatagaaaacaccatagtacattcagggagcaataaataagcatttaaaccttgaggataagatgcagtggagaattctgttatggggtctgarctttaggcagtagggaaacacttgaagagctttaaaggggacagtaacaaggtcagatttgcattttagaaagatgatgttggtgactggaagatggacagtgaggctggagacatggaaaacagactatgagctactgaaacactctaggcagagaaacagcaaggtggtggcagtgcagaggacaaattgatagcrtataatgcccagccagaattaagaaggcaggaagagaggaatccagctttcatgtctgggtttcagaatagcagtgccattcattgagagagaggagtcaagatggggaggacacttggggaataagataatgtgaattgaaattttggtttgtatctgtaagactgaggaaaatagagtcatggtattagatggagaaaaatactgtaagaaggtaatgcgcaacctagtatttccctttaagaggtgtcagtcatagaatagactttatccaaagcattatcatcttgttaaacagtagctccaaggttacttgcttttggagctgtgagcagtgccttgtgatagctgcctaaaagtgcttgctggttgacaatagagggagatatgtagggattaagagtgtgggcttcagaatctcactacctggttttgaaccatagcactcatagatatttgctctgtatcctgggacaaattacttgatctcttcataaactagttttctccactgtaaaccccatcaggttgttatgaggattagacaaaatattacataaaaaagcacttagcacagtgcttgcttaggtcaggtgctcaatacaaattcaacagatttttttttttttttgagatagagtctcactctattgcccaggctggagtgcagtggtgcaatcctggctcactgcaaccttgtcctcccatgttcaagcaattcttgtgcctcagcctccctagtagctgggattagaggtgtgtgccaccatgcctggctaaattttgtatttttagtagagatgggttttcaccatattggctaggctggtctcaaactcctaacctcaagtgatccacccgcttcagcctcccaaagtgctgcgattacaggcatgaaccaccccaccaagcctcwatagcttttattattactcataaagaatgctatgttttgcactgaaagatggagctgttggcccatctttcattggaatgtgtactttgagctgtttttctaggaatagtgatggataggactgagtaattcacagttgttcacctggttcactcctgaatgagtaagggtcattaggaagatgattagccagccttcaaagtgcaggctgtaactaaggggtggtttgtctttatgtgaagtgtttacttgtatgttacctgacctacatttgcaccaaacaatgacaaataaaagtaaacatagtctaccctctttaattgtattagtcaggattctctagagaaacagaactagtaaagtatatatatgtggaaatttattatgggaattggctcacaaaattgtggaggctgagaggtcccatgatctgccatctacaaagtagaaacccagaaaggctggcaatggtataattattcagtcagaggcctctgaaggcctgagaagtgggagagctaatggtatgagtcttagaactcaaaggcttgagaaccaggagctgtgatgtacaagtgcaggaaaagatggacatccaggagagagagtgaagttgcccatcctaccttttttgttctattcagggcctcagtggattgtaggatgctggcccacattgatgagggaagatcttctttactaattcaaatgctaatctcttctggagacatcttcacagatactcccagaaataacactttactagctatcaaggcatttcttagctcagtcaatttgacacataaaagtaaccatcacagtaacctttgtctaatccttgtttgaaataaacagcatgggtcctcattaaatatgatgaaatttccaagaaatagagctatctgcttgtagaaatgagaattaataattatcaaattaccaatagtttycttgcatatgtagaaacaaggtgaaaaaatgaaatacagtaatctgctatgaaaataaattagctaatacaaaaaatactcctttgtatttccaaaggagataaaaattgatttcaaggtattttaattaccgtttgttacctttctgtatgactttcatgtttaccctgttcaacatgtctactaattgctgaaattgggtggggaaaaagagaagaggaattgagtcctgagattttccctcattatggggaaggctttttgagagttttaggagagttttgagagagaagggaaagatttccctcagaaagctttggaacatataacatcctactgagaaaataataagttcttacctttttttctttgatcaagaaataggaaattagtggttaaatgtttctattgtttctactatcactcatatggctagacttagattccagctctgaaaacaactaacggtgtacttcagacctctagattttgtttttctcatcagtaaaagaaaaaaaattaaaccatctttaaaatttctgatagttcacatatcatattctcttttctccatttctttttcattaatagaataagagaagttgtgaagaatgtctagtctactactgtattgtctttgctgaggaatctctcataattcgaagcttcaaagctcccataaacaaaaatcctggagaatcagcctattttattgttgggcagttcagttctttagtaattctttcttatgtttagtaagtgtgccgtgtcatttgattatcttttcatttgtgcatgtatttccatatatctccaaaaggttttaagtcagcatataatgctgaaacataatataaaatatagctaaacataaaaaagacaaaatcaatgaaaaagaacagagatatagatcatgctgagtctctaacagaagataattatcacagttkagaaatcagtttagccaggggttctctggcaggtaaggcaaaaagggaaacacattgtgcttctcactggcttatgtataagaggagacacattataattttaagcattaagttcaaagagaaatgagttcatgagktctttatggaaagaatatcaagtatcatrccagacagtgtcttcagcaaaatgtgcagacattgtctttaagttgttaattctcatactgcttttctaaaaaagctggaagcattatgtgtatgtttttattttaaaggcagtataactttattacagttggtttggaaagcagagggagtaaaacatccacaaatctgccaatctaacacaattattttcatgttggcaaatttaatcatctttgcccatatacaattatggtttccacaaggaacctcagctggattcctttagtagtacagggctctaggacacgtgagctgccagatgtatcctcatgtttcygtatgatattctcttaattttgtatcctaccatttcacttaatacattttacatatttttcttgctgctagataatttttacaattacataatttttaaaaacgactctgaattttcagatttgctacaatttaacagtcatttaatcctagaaaaatgctctagtgaacattctttgcaaattgcttttcctcttctgggtggtgaactgtgttgttgtagtttcccatacaaatacctttattgaattccctgttggtaactggtccgtcttaatggacattataagagtcagttctttgcaatatattagtgtatttactattaagaatgttaatgatgatattgctcattgtattttctgtgttttccttatgaggacataatgtgagaaatttctctctcattttaatatcagaaatatagtcatgcatgacttaacaaccaggatatgttctgagaaatgtgccattaggtgagtccattgtgtggacattaccaagtgtactcacacaaacctaggtgctatagcctactacacacttaagctctgtggtatagcctattgctcctaggctacaaacctgtacagcatgtccctaaactgaatactgtaagcaactgtaacacaatagtatttgtgtatttatatctaaacatataagcgacacagtaacaacatggtttaaaatattagaaatgttacacctgtataagcaactaaccatgaatgtaacttgcaggactcaagttgcaggaccctgggtgtgtcagtgaaggcctgtgatgtcaatgtgaaggcctgtgatgttattgtactttatgataaatattgtacagttagactacatcagatttataaaaaatatttttcttttttcaatggtaaatgaactttagcttactataactttttacattatacattttttaattttaaaaaatattttgactsttttgtaataacagtgtaaaacaaacacattttacagctctacaaaaatattctcttgttgtgtctttataagcttttttctattttaaarttcttctattttttactttttaaactttttttgtcaaaaacaaaggcataaacacacacacgaccttyggactagtcagggtcaggatcatcaatatcactatctcccacatccacaccttgttctactggaaggtctttaggggcaataacacccatggagctgtcmtctcctatgataaaagtgctttcttctggaatgctcctgaagaamctgcctgaggctgttttatagttaaatatgtttttataagtagaaagagtatactctctgtctgttttgcatgtatttttttttttttttgagacagagtctcactctgttgtccacgctagagtacagtggtgtgatcatggctcactgcagccttgacctccctgggctcagatgatccttccacttcatcctcccgagtagctgggactataggcatgtgccaccacactcagataattttgttcattttttgtaaagataaggtctcactgtgttgcccaggctggtagggtacactctcaaataataacaaaaaatatagcatagtaaatacataaaccagtaacatagtcattaattattgttatcatatattatgtattgtacacaacaaacatgtaataatgcattgtgctacaagtggtagcacaatgaggtcactaggcaatagcatttttcagctccactataatcttatggaaccaccatcatttatgcaggctgttgttgactgaaacatctttatttggcacatgactgtagttgtgtgtgtgtatgtgtttttattaatagtttattaatattttcttcatggaattaggtaactgaatgtgtttacttctttactgtgagcgctagaaaggcacagtgccaaatctggctcacatcgcttgaacatggattggcatctgaagatatctatgtaaagcataataggcaagttcctggagtcatcgtccttttctttaccttttgtcttatttccttcatctacttattttaaattttattatattttgaggcattttataatttatgcaaaccttcagacatttttagaacaaggtagggatataactaaataaatgcatgtaaatatttagattatttccttagagtaagttttgaaaagtagatacactgggtctcatgtctcattatatctttacccagtgaaagattttctgtaggaaactgggataatataatccaagtatgttaattcctggtgatttattgcagatataataccaagtgaggagttagagtcccaagaggaataaagaatcaagttatttctctgagcatttctctgcaatatgagatgctgtaaatgctgttttcatgggaaattgtacttttcatgggaaattgtaattttcaattaaattagctggcaaaatattgaatgttacaattatatattgttaattaaaaagatactcatctgctttacataccggatatataaacaataaaattgacatactgtactgaacacctaatagccagttttgataaggagttggtttattcccataagggattggactattggggtctttagaataagactaatttttctcaaaaatgtgatcagcatttgaaccaatgtatggttcaggctcacaatttctatgctatgccatatggaagagatagttaatttttgcctacaaaagttgttgattattgcctctaactataaagtaacctcagctgggcttcttraccagtaacaaccctgatagaccctaggacctggcacctattagatgtatcctcaaaaagctcttttggtaagctttcttgagtcaactaatatagacacttccttaatggatcatgatctaattcagtctacagtttaacagtaaaacttactgaccaatgtctgcagcacacagaattttcatggttgggagccaagcgccctttgagacccataggttgagttgtatgcataaaatgaatcagctgtgtttgttctctttggtcttagtggatatttttccccaggaaaggagagaacaactcttctacrtgatggcactttaataatttagacagatgtactttcttctctcaaaataattcatgctggaatcctactctatttgctgtagaagagaattcagtgtaacattagcatgtgtcttgaactgtgttttaatgggagatacaacataacaaatcaattaatgttattcacttattggtgtagagctatcttagcatgatttctgaggcagtggtatagggagaatcatcatggttgtctttgtaatggttttgaaaagtataaacaaatctaaaaacaaacsaaataaacaggagtttacaagtgcaggagtttttgcacacagaattaatagcaatttcttagcttaatatgcttggtagccactatgttaagttgccattactctgtaaggagtagaaaatattactttggaactgcctctcttttgttgacaatgctatttgacaatactgatattgtgatacagtattcacacrttgtacattagaaatatctatcatcctttgtgaacaatgacactcaaactatccctgtgggagtatatagataagatcattattctcattttctagataaggaaactgaaatgaaattccttgcctaaggtcagagaacaaatcactggcagaataagattaggggagtgagttcttgattttcattcctttgctcaatcaatgaagtcatattgttttactcagtatgggaagagattattatcagtcagtaggaataakgctatgcccagatgatgccagaagaccagctgaaaaacaaaaatctgcacaatcaaccatttgtttttctgtaaaacaccaaactaattgttataccaatgtttttcactgagccgacttgacgtctttgtgtcttgcagacacagcctctgactttatgtttatgttatattccaaacttagtttctggaatttctgtcttttaaaaatctaattttggaatatccygaatttcataatagtttaatatgttctgaataatatgttacctgtgtggggtagaattggggcagagttctttgaaagtgctttatgataaaatctcacagtattcttttatatagtggcagagaaacccttttctacctcaaaggctccaaggtgaaaattactgaagttttatgaaaggactgcaaaataagaccttaccatgttagaagaaagctgggcttctatatctgtcaccaactatatattacataaatgcacttgggtttggcaaataggacggaaatcatcagaccccaactagatctcatagatcctctcccgaaccagttactctggatgtgagggttgccaaataatcaggtgaccggtggtatagtccatatagaagttaacgtgcagaataactgagttctttcaacatgcaaccaacatttattgtattcctgatacatacttacccacgtctccacaatatgtcctaattcttcgacatgttctgctagattcatcagttgacaggtgaaacatttctccctaggtmaaacaacatgtaaactcaggatctttgatcttttagctgagttcaatcataatgccagcaactttattgatggatgattccagtttattttagttaatcttatatattttttgcagctgaactactaaaatacttaactagtatgaactcatagtatttcacaaaaagaatggcacaagcattcacttatagtctgtaggaaatggaataggctcagttcaataataaagatcacaagccaggaaaggaatagaaaattcatttctctctggttctgagacacctgaattcaaccttcattaagaacgacaatttgcaagcatatgaactcaccactaacagatgaaaatacttttaaaaaacagttcgtattctgtatttgattatttatgaatatatgcaatattaaaagtgccttcatcctggctacaatgtattgaattttcctgatgtagcttttgttgtcttatttttaaataatacatatcttccagttttgttgagattgaaaacttgaaggaaccatatataaatgctcatgatgccagtaagagatgaaaaaaaaattctgcattatattttaaaaatcaagaaattagatattgacttgaatgactattctctagtagtgtttatatcctgaggttggttttttttatttttgccattttaaaataagattgcagggaagtcttgtaagtcccgaaagtattgcyataattacctatttaatattgcagcagacatctcagaaatttatatttcacttaaaatacaagagttagtgatatcattcattcatttagtagatgtttatattagtgattactctgagccaacctctatttattggatgaagacagcagagcccctgccctcacagagataattctactgtgataaatagtatcacaattaaacaggtttatgtgatagaaaggaggagctcgagtggatagagaaggctggctctgaggatttaaattgagaggaaaggaaggggccagattctagaagattcacaggaaaagcattcaaatggggttcaaaagctccaaggtaagaattactaaagttttatgaaaggactacgcaaacagatcagaatttagggagagaaagcaatggtcttcagaaatctttgaatgctaagatggaaacatttggaaatttggagatttttttaaaaagcctactcttttattttaataataaagaaatcaaggcccatgagactgacatgtttttggttatatactaattaaattttaacctgggtctgccatttcctagtctgttgctttttccgttaagcaaaatacctctctttgtgcttgaaaactctaggtgctattgccaagcattgggttttacagttgaaaatttaaacctgcatcataaagatctggcaaatatttatttaggctttctttatataatcggtagcaatctccaaagccatatttatcactgtgatttgcatctcttattaagaaaatcacaaagcacactttaacccctctgccatctatttactttagtctctagcttggagactattagatcttttgtggtgcactatgaaggaatttgtaagtttgtgtttaatttccacgtagtccatttcaatttggaactagtagatagttcatcttgtttatataagggaaattctttttattgcttcccatcatttccaattacagacctattggcttgctagacatctcagctttaatttatggacttctctttttgatagatgtcaaggcttgaacatgtaggccaagaatttatgtaaatagcaagtatattttatatttagatatccttctacttcttatatttttataactttgtggagaaatgaattgggactaacatgatattgtttacagctgtctttgactttttgttggcttttttttttttttctgagactgtgtctcgctctgttgcccaggctgaattgcagtggcacaatcttggctcactgcaacctctgcctcccgggttcaagcaattctcctgcctcagcctcctgagtagctgggattacaggcacatgccaacacacccggctaattttttctatttttagtagagatggggtttygccatattggccaggctggtcttgaactcctgtcctcaagtgatctgcccaccttggcctcccaaagtgctgggattacaggcatgagccaccatgcccagccctttgttggctttttttwwaaatttttaaacattatactttaagttctgggatacatgtgtagcatgtgcagatttgttacataagtatacgcgtgccatggtggtttgctgcacccatcaaccatcatctacattcggtatttctcctaatgctatcccacccttaatcccrcatcccccaacaggccccagtgtgtgatgctcccctccctgtgtccatgtgttctcattgttcaactcccatttatgagtgagaacatgcggtgtttggttttctgttcttgtgttattttgctgagaatgatggtttccagcttcaggaatatattatgagctaagctctatatcctgatagaagtcctctatttgatgattattatatagggcaattaacactggcctaagagtcatagccagtaggaatggtagcttgacaaatcagagtgcaaggatgtgttccagatacacaaaaaagtttaagaaaatgatattgctcttgaaggaactaaatggactcttgccttttgtattttaatgtaaaggaaaacattaaaattaatgaatgatatcactgctgaaagtaacacattttcctgaacacagatgacataatattattgtcgtgaactggaggtgtgtcttcttagacatttagatctgctgtgtgaaatctgctggttatagagcgtcttagagtcacaaggccccaagttgaatcctggcagtgccatmtactgacttttatgagtagtaaaatggacctaataactaccttatatgactgttaaaagattacaacaaaataatgtaaaatcatgcttagcatggtgtttgggtcaatacatgtgaatataacaatgttaaaatggagtttttgattgaggttattaagacacaatagaagtagaagttcaaagtcagatctccatactcacagttgacaaaggaattggtcaaagataggtatggctgttcttggatctctcagcttgttaataatttagaaaggatacaaggagtggaatggaggaagaatttgctgatggcattttgcttttgaagaaagctgttggcacactatggaaccccctttattcctgggctaatgaatgggaccccaaacctagtgagagggtgcttcaggaaggccactctgagagctaactctccaccctctgcagttgggaggatagaacacaggtgcctgactcaggttgagaaggtgaaagcatcctgtggaagtaggatagaggtaacttagggcaccagcttctctctcctcctagtaattgtcagggcaagggatgtgtaaatattatctcaggaccataagtgggtctcctaatgagcaaaagtgccayggcactgtagatggacagtctggaggagttttgggttttgcccaggaaagcttctgctggaggataagaggagacctataagggagaatgtggtgggagaactgcccaggaaacagaagctgagaggcaattgggtgcaggcatcctagaaatgtctgcatcttagcagctgcagtgagggttcctttagagacagggaagccccaaagggcctgcatgagtgtcccagagaggagtcagcttcagtttctgccagcaggctcggagtgggaagttgactgagtgtggccttctccttctttactccctcttctctctgctcttagtctggatgctcagagcccagctgggaaggaaaagtggaggagcagctatagtagagaaacagagaggaaggcacccataccatgtttccactgctgccttttgcctgaagcgggccagaccgagctggggaaggagagaagattcgacatctgatcacgtagcagtagagtgttttggtyatcatctgggactgggcatctaggcttgaattgagacactgtttgtgattttaagtggaagtaagactgtctaatacctaaaagtgggcagaaaaactttgctggagctttcatctagggacaggggagtgttattctcacagactacaaattaaagaccactgggaagaacatgaaaggtgtaggctttaattattagttgtgcttttctgtgtattgtttgcattattgtggttgatgctgtgttagaaaggttaccttcaaattcagtgttgtacacctaaagtcttgatttttgtttgatatttccttgcatttttctggcttatagcaaatactcctatagtgcaagtcaactcagttatttaggagggcattttgtagccaggtttctcacagtgcttactagaaaacttatttgcttaaagttaatattctacgtgtatgttactgagaatttttatacccagggtgaaaattaggkaacatttactttaataaccttccatactgaaataatacagcatgaaccataatatagcagtttggagactcgattccccatttgttcataaagagaagcaaaacactgacattttaaaagtattcttttaaattgaagtgtgatacacataataaaagtacacaattcataaaaatttagtttggtgagtacaaagtgaattcatccaggtaaccagcaccaagttaagaaacagaataaggtkracgtcccagtcactgacccctcatatcaatagttttgcttgtttttgatatttatttatttacttattttagagacagtcttgttctgttgcccaggctggacttgagtatagtggcacaatcgatcataactctctgcagccttgaccttctgggctgaagtgatcctcctgcctcagcttcccaagtagctgtgactacaggtgtgtgccaccaatcctggctaatttaaaaacaattattattattattttttgttgagacagggtctgccaccattgcgtagactggcttgcagacctagcctcaagcaattcttccatctcaacctccccagatgctgtgactaaaggcgtgagccaccacgcccagcttagccttgctttttaataatgagactatatatttgagtttgcgagattcattcactttgttatgtgtagctgcagtttttgtttatttacaaatttgcattccactagatgacaattttttagctaattcaattgttttttagttgataaacatttggatagttctatttatgtgttgatgaacatttggattgtttccaggtttgaacccttacaaatcaggcaactaaaaacattcttaaacacatgttttggtgaatatattgtgcacttttattgattttatgcttaggagtggaattactgtatgacatgtatgactgtgttcaactctagtagataaggaaaaacagttttccagagtggtggtaaaaattactcttccatcaactgtgtgtgggaagtcactccacttccttgttaatacttttttcattttagcttttctggtgtgtgccaattcctgtttttgaaaaaaaaaaaaattcctagctattggcatgccctcagtaaacctccatatgggaagtgggatgtcttctttcctatcataagagcattgcaccagcctgactaatcattgaagcataaagttatatatttagcaaggaatgcagaatagcattctggtgataaatgctgcccaatacttatcaacaactttgctaagtgaaagcataggtataaagtgcattagtcaatattttgaatgtaagtgcagaaatccctattcaaaatagtttaaccaaaaaggtaattaattgactcttgtagctgaaaagccaggcttggctggctcctgggattaagcttcactttccaaatcaagactgcctcccactgggctgcttctcttctcaggcaagcttgcttcctgtctggaggccaggattctgtcaatagctccaaactcccatcagtaaaccaaaaccaaaacaacagccacagcaacaaaactcttcctgtctttctggaactattaagtcccggaattggggttccttggttcttattgcactaattatgtcttcttcggctccaggtggctaccaggtccctctggaccacacgctttcagagaaacaacaattctctgasgaaaactgggggtgctgttaacagaagaagggtcaatggtaggtgggcggcaacagtaacaaaatagccactgcaagccagactaggtcaaagtaacacggtttagttattcctgtaggtcctacaggacttacccttggatgaagcaatactgctagaacgttgcatgtgtggactgcatcattttaggctctgtggaattgcttttattgaactgtgttagggcattctgttaccagtctgcattgaggtacaatataatgaacagtcctgtggaatttcatgcattattgtaagacggtattgagcacactgtttatttccaaagccacrttataggatttcatgggagaaatttctccctggtctctgcaccaggaagagtcaaactgtttctaaaaacctttcatgattttatcttatggatactgtgattcctcaaaatggtaaggtgtccttctttgcattgctagagtgatagagtcaattttatggcttgttttaatcaagtatactaggctttgaagcatggattcttttagtgctagcctcacccctttatttttctatttccttcagtattgtttcccagttctcacactctctcttttgttctatatcctttgtaaactttcttaaatcttttctgagacaaagttgagaaacacatataattttatatagatttcattttatgcattgaaaatgtcaccacaaagtaaataaatctgcttggttttagcaagaagtttattaacaggaattattttgggttccagttttagatggagcagttgtaaaacactacagaattaaaagactggatgaagggggattttttctcacgcgaagaagaatcttttcaacactgaacgaatttgtgagccactacaccaagacaagtgacggcctgtgtgtcaagctggggaaaccatgcttaaaggtgaaaatgctttcaagctgtgtttttttattgaagttaacttttttccttcagatatctgagtatttttcatggaatatcagttcaggaaaaaaattgtcattttattacctcaggcgggtataggcaaaccatggcctatgagctcacactgacgtatgcttgtttttgtaaataagttttatttgcacagatgctcattcatataygagttttctttggattcttttgtgccataacagcagagtttagaaggtgcaacggagaccatagggcaggtggtaaactagaatatgagttctaggaaggcaggggtcttgcttgttttgtttatagaaaagaacctagtcaattcttaaaacaattttacttactaaatgaatgagtaactaaatgaatgaacaaataaagaaatgaaaaaatgagtttgaaaaatataaaacatttaattatgcaaaaataggtgatacatataataaaactatagccaaagaatttgggaaggatttgtgggtgagagggaacttcagctgggccttgaaactgagaggatttagctaggcgaagaggtagrgagaagtcattccagacctgagtgaggatggcattaggtatgggatcagacaggtagacaacgaggtgcctgacttcccaagatctggaagatcaatttgaagagttaacaaatgcagatyctcccaccatactttttgtttttgaagtaattataatacagtttacaatattttgttttaagaagttttatttaaaagtacctagactattattttcaacaaaataatattaaatctacttttttttttttaacaattgctcttattattctatgaaacagatccaggtcccagctccatttgatttgtcgtataaaaccgtggaccaatgggagatagaccgcaactccatacagcttctgaagcgattgggatctggtcagtttggcgaagtatgggaaggtctgtggaacaataccactccagtagcagtgaaaacattaaaaccaggtgcgagaacaataaaggttaaatggcatatgttgatttttatgagctcaatttaacactgtaaatatctaagaggtcatagggtggctaatactggcagcaagcaggtgttgtggtcattgtctctagcccaggtgaccccaacctatggataaggcattaaaatataaaaacaagaacacacttcctggttcagctgagtcttaaaatatcgctgattgaagagtctgacaactcatctcttctctgaattaggattcagtcttccaatgtccttcttcccattttgttcctagccttagttaaaagatattgacttagctgaaaatatttaaaaaatcagaaggaatcttgatactattcagggaacaactatttttaaaagtattaattttgtatggttaaaaggcaaaatggtccatctaaagaaacttgtatttgaaaatgtaggaactttttttcccttccatcttcctttttcctgtgatggcaagtaaaattatactgaaatcagtatttattcagccaggctttattccctccattttaaagagggactaagtaactttccaaatactttctggtcatatgatcttgagcaaatttttgaactctatgcttcagttttgtcatttgtaaaatagagataataataaggccaacagagaagataaattaggtcattagtggacatgctttgtatagtgcctggttcacagtaagtgatggataaaaactattattataataaggaaaaagtcagtaaatggcatagctgggatttgaactcacatttattactattgcctcacgctccatggaagtgacagtctataaaagtgcaacattgctatagtagcctcatatatacctttataacagaggtaagaataatcaacataggctagattgtagttttctgggagacctgcattatttacctagcccagaattcttagaggtttggtaaacctcctggtggcagaacttgagctcttgggatttgttggctagcagcatagggtaacaccatggttcccaaactgtgtgccaaggctcatgggggcaccayggtgaattcacaagagtgctgtggaatacttaaaagttttgaagtcaacatcctgaatattgtacaagctgctaccttgaagtagttcatagtttcaactttagaacaacattccttttgttgacatcatatctttgtgaagctgggtttttgatagttgctatggtcaaatgcaaaatccacacaaaaatcaatatggaccagaaaatgggggtagcagtgcttcatctgattctaagattggagaaattgtgcagtgtcccagggatgcatatatcactttagtaagcacttgtagttaagaattaagtgaagaattatgttttcctttcaatttacctgtgttactttttcaaatggctattaaattgttaagataaatacttcttcttttttttttaaagtatttctttttttttttaattttttttttattatactttaagttttagggtacatgtgcacattgtgcaggttagttacatatgtatacatgtgccatgctggtgcgctgcacccactaacgtgtcatctagcattaggtatatctcccaatgctatccctcccccctcccccgaccccaccacagtccccagagtgtgatattccccttcctgtgtccatgtgatctcattgttcaattcccacctatgagtgagaatatgcggtgtttggttttttgttcttgcgatagtttactgagaatgatggtttccaatttcatccatgtccctacaaaggacatgaactcatcattttttatggctgcatagtattccatggtgtatatgtgccacattttcttaatccagtctrtcattgttggacatttgggttggttccaagtctttgctattgtgaataatgccgcaataaacatacgtgtgcatgtgtctttatagcagcatgatttatagtcatttgggtatatacccagtaatgggatggctgggtcaaatggtatttctagttctagatccctgaggaatcgccacactgacttccacaatggttgaactagtttacagtcccaccaacagtgtaaaagtgttcctatttctccacatcctctccagcacctgttgtttcctgactttttaatgattgccattctaactggtgtgagatgatatctcatagtggttttgatttgcatttctctgatggccagtgatgatgagcattttttcatgtgttttttggctgcataaatgtcttcttttgagaagtgtctgttcatgtccttcgcccactttttgatggggttgtttgttttcttcttgtaaatttgtttgagttcattatagattctggatattagccctttgtcagatgagtaggttgcgaaaattttctcccatgttgtaggttgcctgttcactctgatggtagtttcttttgctgtgcagaagctctttagtttaattagatcccatttgtcaattttggcttttgttgccattgcttttgatgttttggacatgaagtccttgcccacgcctatgtcctgaatggtaatgcctaggttttcttctagggtttttatggttttaggtctagcgtttaaatctttaatccatcttgaattgatttttgtataaggtgtaaggaagggatccagtttcagctttctacatatggctagccagttttcccagcaccatttattaaatagggaatcctttccccattgcttgtttttctcaggtttgtcaaagatcagatagttgtagatatgcggcattatttctgagggctctgttctgttccattgatctatatctctgttttggtaccagtaccatgctgttttggttactgtagccttgtagtatagtttgaagtcaggtagtktgatgcctccagctttgttcttttggcttaggattgacttggtgatgcgggctcttttttggttccatatgaactttaaagtagttttttccaattctgtgaagaaagtcattggtagcttgatggggatggcattgaatctgtaaattaccttgggcagtatggccattttcacgatattgattcttcctacccatgagcatggaatgttcttccatttgtttgtgtcctcttttatttccttgagcagtggtttgtagttctccttgaagaggtccttcacatcccttgtaagttggattcctaggtattttattctctttgaagcaattgtgaatgggagttcactcatgatttggctctctgcttgtctgttgttggtgtataagaatgcttgtgatttttgtacattgattttgtatcctgagactttgctgaagttgcttatcagcttaaggagattttgggctgagacaatggggttttctagataaacaatcatgtcgtctgcaaacmgggacaatttgacttcctcttttcctaattgaataccctttatttccttctcctgcctgattgccctggccagaacttccaacactatgttgaataggagtggtgagagagggcatccctgtcttgtgccagttttcaaaggtaatgcttccagtttttgcccattcagtatgatattggctgtgggtttgtcatagatagctcttattattttgaaatacgtcccatcaatacctaatttattgagagtttttagcatgakgggttgttgaattttgtcaaaggctttttctgcatctattgagataatcatgtggtttttgtctttggctctgtttatatgctggattacatttattgatttgcgtatattgaaccagccttgcatcccagggatgaagcccacttgatcatggtggataagctttttgatgtgctgctggattcggtttgccagtattttattgaggatttttgcatcaatrttcatcaaggatattggtctaaaattctcttttttggttgtgtctctgcctggctttggtatcagaatgatgctggcctcataaaatgagttagggaggattccctctttttctattgattggaatagtttcagaaggaatggtaccagttcctccttgtacctctggtagaattcggctgtgaatccatctggtcctggactctttttggttggtaaactattgattattgccacaatttcagagcctgttattggtctattcagagattcaacttcttcctggtttagtcttgggagagtgtatgtgttgaggaatttatccatttcttctagattttctagtttatttgcgtagaggtgtttgtagtattctctgatggtagtttgtatttctgtgggatcggtggtgatatcccctttatcattttttattgtgtctatttgattcttctctctttttttctttattagtcttgctagcggtctatcaattttgttgatcctttcaaagaaccagctcctggattcattgattttttgaaggtttttttgtgtctctatctccttcagttctgctctgattttagttatttcttgccttctgctagcttttgaatgtgtttgctcttgcttttctagttcttttaattgtgatgttagggtgtcaattttggatctttcctgctttctcttgtgggcatttagtgctataaatttccctctacacactgctttgaatgcgtcccagagattctggtatgtggtgtctttgttctcgttggtttcaaagaacatctttatttctgccttcatttcgttatgtacccagtagtcattcaggagcaggttgttcagtttccatgtagttgagcggctttgagtgagattcttaatcctgagttctagtttgattgcactgtggtctgagagwtagtttgttataatttctgttcttttacatttgctgaggagagctttacttccaactatgtggtcaattttggaataggtgtggtgtggtgctgaaaaaaatgtatattctgttgatttggggtggagagttctgtagatgtctattaggtccgcttggtgcagagctgagttcaattcctgggtatccttgttgactttctgtctcatggatctgtctaatgttgacagtggggtgttaaagtctcccattattaatgtgtgggagtctaagtctctttgtaggtcactcaggacttgctttatgaatctgggtgctcctgtattgggtgcataaatatttaggatagttagcctctcttgttgaattgatccctttaccattatgtaatggccttctttgtctcttttgatctttgttggtttaaagtctgttttatcagagactaggattgcaacccctgcctttttttgttttccattggcttggtagatcttcctccatccttttattttgagcctatgtgtgtctctgcacgtgagatgggtttcctgaatacagcacactgatgggtcttgactttttatccaacttgccagtctgtgtcttttaattgcagaatttactccatttatatttaaagttaatattgttatgtgtgaatttgatcctgtcattatgatgttagctggtgattttgctcgttagttgatgcagtttcttcctagtctcgatggtctttacattttggcatgattttgcagcggctggtaccggttgttcctttccatgtttagcgcttccttcaggagctcttttagggcaggcctggtggtgacaaaatctctcagcatttgcttgtctataaagtattttatttctccttcacttatgaagcttagtttggctggatatgaaattctgggttgaaaattcttttctttaagaatgttgaatattggcccccagtctcttctggcttgtagggtttctgccgagagatccgctgttagtctgatgggctttcctttgagggtaacccgacctttctctctggctgcccttcacattttttccttcatttcaactttggtgaatctgacaattatgtgtcttggagttgctcttctcgaggagtatctttgtggcgttctctgtatttcctgaatctgaacgttggcctgccttgctagattggggaagttctcctggataatatcctgcagagtgttttccaacttggttccattctccacatcacttttaggtacaccaatcagacgtagatttggtcttttcacatagtcccatatttcttggaggctttgctcatttctttttattcttttttctctaaacttcccttcttgcttcatttcattcatttcatcttccattgctgataccctttcttccagttgatcgcatcggcttctgaggcttctgcattcttcacgtagttctcgagccttggttttcagctccatcagctcctttaagcacttctctgtattggttattctagttatacattcttctaaatttttttcaaagttttcaacttctttgcctttggtttgaatgtcctcccgtagctcagagtaatttgatcgtctgaagccttcttctctcagctcgtcaaaatcattctccatccagctttgttccgttgctggtgaggaactgcgttcctttggaggaggagaggcgctctgcgttttagagtttccagtttttctgttctgttttttccccatctttgtggttttatctacttttggtctttgatgatggtgatgtacagatgggttttcggtgtagatgtcctttctggttgttagttttccttctaacagacaggaccctcagctgcaggtctgttggaataccctgccgtgtgaggtgtcagtgtgcccctgctggggggtgcctcccagttaggctgctcggtggtcaggggtcagggacccacttgaggaggcagtctgcccgttctcagatctccagctgcgtgctgggagaaccactgctctcttcaaagctgtcagacagggacacttaagtctgcagaggttactgctgtctttttgtttgtctgtgccctgcccccagaggtggagcctacagaggcaggcaggcctccttgagctgtggtgggctccacccagttcgagcttccgggctgctttgtttacctaagcaagcctgggcaatggcgggcgcccttcccccagcctcgctgccgccttgcagtttgatctcagactgctgtgctagcaatcagcgagattccgtgggcgtaggaccctctgagccaggtgtgggatatagtctagtggtgcgccgttttttaagccggtctgaaaagcgcaatattcgggtgggagtgacccgattttccaggtgcgtccgtcacccctttctttgactcggaaagggaactccctgaccccttgcgcttcccaggtgaggcaatgcctcgccctgcttcggctcgygcacggtgcgcgcacacactggcctgcgcccactgtctggcactccctagtgagatgaacccggtacctcagatggaaatgcagaaatcacccgtcttctgcgtcgctcacgctgggagctgtagacaggagctgttcctattcggccatcttggctcctcccctagataaatacttcttaacttgtttggatctaacccagtaatcaaaataactgttagtttttttttttattttcacttagagacatcatgaaaaaagttatggagacactaagggttccacgaactgaaaacactgggatcctctggtgtaacaagtgaatagtgtcaaattcgatataagataaatctgtgtttaaacctggctctgccctctgtgacttcagacaatttttaaccttttggaatcttctcatctggaagtgggaatcataatagttcctaatttctagggttttatgaggacaaatggagtcaatatacgtaaagtatatgcagcaasttcttaataaatgttagcctccatggggctgctgacagatgtgtccactgaagtgcaaatttactagtgcaggaattcagtttcagcattttcatctggcagatgaagcaagagacaggcactttaaagtggccagatgctatgtgagtgctccaggtgaggacattctattctagcacctgagattttcacaatcactgtgtatatgcttttaaaccctaatcttgttaataaatggtggctgaactttattgtccaatctaataattcttttctaagaagaggcagstagctagccttcctaacgttgttctctaaggaagccctttgggaagtcaaaagacaacaaaaaagtcagatttctcatgttaaaaaaaaaccacgatagttttctctccaacaggaataattattattgatttacagtgtaatagccacaaacagctttagtgattggttaaatgtcttcacttcactggggccattaatcaatatgagcrgctatttattgctgagcaggctactacgcaataaagatgagcctgaaatgaactcccacagtagctttgacaggcaaaaattaatatttaatgttacattactagctgagttgagattgggtttcctttactctgcagctggggagctataaccagcatggccatgaaggagtgctctgaaacagtcttcacctgcagaggcttctgacctactgtgatttcagttcttgtgcatagtctgatttgggaatgagtttgagtgtcctgtattgcttgaatctgatagccacacaacatagaaatttcattaacataaatatatattgtatatataattttctttttcctttctctttctttctttctttctttctttttctttctttctttctttctttttctttctttctctctctccttccccccccycctttctttctttctttctttctttctttctttctttctttctttccttttttgagacagagtctcactctatttcccaggctggagtgcaatggtgtgatctcagctcactgtaacctccacctcctgggttcaagtgattcttctgcctcagcctcccgagtagctgggattacaggcacctgacaccatgcctggctaatttttatatttttagtagagacatggtttcaccatgttggccaggctggtctcttaactcctgacctcaagttatccgcctgccttggcctcccaaagttctgggatcacaggcttgagccaccatgcccagcctaattttctgtatggttatcataattactgctatcattggaagcttcttttttgggggggtggtagtsgggggattccccactatattatatttgaccataggccaaactagttgtaacaattaagaacaaagtcccttattatgatttaggtgtctcttattctcagctccattttgtgactatgattccaaattttaatcctatttgactgtgtggagtaaaccagtggtagagatggaattgatggagctcagaaacatgtaacggaaaagagaatcggccattttctcctattctctctctttaagtccttgtccyttttcttccttagcctgtgaaatatacttacagctggtctgtttggtttttccaagactatgcatatcaatgataatataaataatgatcaacagtcattgaatacatacgtgcaggcattgctattatcttggtaatgatcttacaatgtcagtaaattattaggcatgttttacagatgaagaaactgaagtttagagaggtttgataacttgctcaagatcacacagggcactagtggcagagagttgagatttgtctagaatgcagagtctgattagtccagttctgaacttctgggttctcaaaggggagactgctcaaatgttttatgtgaaatgatgtgcaggtcacatgtaactaactcaamttcacattaataaacaagtcatagttttgccttagaatgtcaaagcttatccatgtctgggtttaaatatcagttgtaaagtcttcaacatygagaggatgatgaatgtagtagtctctttgagcatcaatggaaaccatatttgcattattcatagtgaatactaagatgtgaaatgacagtattcctttaattacagtaatgcctctgaaacatcatattctaaaagaaaagattttwaaattactgatgaaatgtaaactccagataatcttcctcctcttagattttatttgatgtcaactacttgacaccttgcatgatgagtcagagtggatccattaaaatacgatttaattgcagacaagtcttctaaataggccttaatattgtctctcctccatttggccatgctattaaggctctgactgtggaagcasatagtacaggagaaaatattaaatatcagtttcgagttgaacatataaaacatgtgaaaaaaaccccattaacttttggggatggtcttggatgttttccacttggtctacacactatgttcctacagaattaaagacaaaagtatggcagaatgtcactgttttaggatttttgtccagctgttcccacagtgggcaccaaggacagggcaggtatcagtctctggttgcagtaattaaatattcagtgaccttcagcgctcgtgttcatagaatgttttccttttgtgttaagatgccttgttttatcagttagattgtcagtctctcctttttccttcatttttcatgtagatctgaatcaacctctcttcacctacaggtcataacatataaaccgtatacycctgatgcaccaacacatccagttactaggttgctctggctgaactgattctctttttgataactctgaagatttgtgatactgaggctcttactctactgagaagcaggaggcaatcttgatgattcccaccaggctgctgtgaggataggaatgcctcaataacataaagtgatttytccctcttcttgtttcaggttcaatggatccaaatgacttcctgagggaggcacagataatgaagaacctaagacatccaaagcttatccagctttatgctgtttgcactttagaagatccaatttatattattacagagttgatgagacatggaagtctgcaagaatatctccaaagtaagctaaagacttaatacaaggaaaaaaagaggaatttaatttagctagtcccataagtgtcaatttagcaagccttctgtaaccgaaaggatatttactatgtgtatgtctgtgagaatgaatgtcttaacactgaatggctcaactactatttaataggttatatattgtatattcaaaaggtggaaaatatttatgcagtggaagagaaaattattcacaacagatatattagggtaattgaatgtaacgtgggaaattaaagaatggatgtttagcatgatgctttgcatgatgctttatttcctacactaattgaacattatcagttatggaccaatattttctatggcacatagaattcggggacatggaatacatttggggaaaaagggagggaagtatcctatgtttattttatttgctggtatttgacaacattgtacttgttgctgtttaaaatacttccactgctaggcaacataagaattgtcagacaaaaaagcagaaatatgctattactttatttctctgtttgcttcctgtagtcagagaagactgaagggcattatgaaattttgatgtttattacaaatggataatttagtaaacaacaatacagtataatgagcattaaaatgagatgttcaaagaaggtgagatcaagtattgacaataattcgagcttgaaaaggagacttccataatttcttgaaatgtcagggtggaatgatagaatgtttagaggtaaagggaggtgagaatgatgaaacaaagatttcagaaagataagaatatcctctgatttcaggatgacttatgaagctggtaacattaagctacaaaacaagataagaataacaaagaacatamtaaggcctgttgaatgctgttaaaaacagaaatatactcagcttccttgcagaaaaatattgaatttaacatcatcagaatatgttacccaccatagaaagattaaactcagctattaaataaccccttttgccttattcccaggacaaagtgcagaagtggtcttgggtcatagctaacaaaaaatgctttataaaggtccttaataatattcacataattacatctaatggcctattccccatcctcagatctatcgacagcatttaattcaatagatgctttcttttcctggaaacatttccttcatttggctttcaggacacttcactcaatggcatttcctccttcctttcttggtggttcttttcaacctatgggatttccttcattcccagacccttcaatatcttggagttctccaagactgttcacaacgtcactagttcccttattaatttcatctaatctcattgtttaattttttatgtcctgacaattctccaaattttattccccctttacttgagaatcatacccaactgccttcttaacttctccacttgaatcttgtatcagtctgcataatgtaaatatgctgcaataactaacagtctccaaatcctcgagggcttaacacacatgtttatttcttatccatgctacattgcaaaataggttggctggtggctcagttcttttgatcaccctggcagagaaaggggatgagactaatctcaccctgattcttaaagcttctgaccagaagtgacagaagtaattctgttccctttccatttggacaaatcaagtcaaagaggatagggaagtacaattctctaaagtacttgaaaggaggaaaaaaaycattgtttgtgaacagccctaatttctactatagtagaaatgtctattagacatctcaagatgacatgccccaaactgatctccctgtattctccccagtaatctgctactcttgcagtctttccttctttgaccatagcaactcaggcctaataccttggcatcatctctacttttcatgtcccatctctaacctgctagcaaaatctcattggctggccttcaaaatatatagaggattttacctctcctcaatgctcctaccctgatccaggctgccacctgaattctgcagtagctcccggctggtcttcatcttctgcttcttgtctccttcagtttcttcttaacataacagctagagagatacagttaaaatgtaaatcagagcatgtgtaactcatgaagtcctgcatggcctggctctctattccctctcggatctcatcttctacaacttctccttgctcagtcttcgtcagccacactagccctctttactatttgtcctaccatccaggcatgcttttgcctcactcgttatttcctctgcctgaatttttttgttgttctgacatttatccacatgctcacttctcatttcctcaaaatctctacttacatgtttccatcttggtgagtgtttcactggtcaccctctgaattttaaaatttaatctctttctactgactcttaaagtattcctcttcccttgctttttattttatcttcttggctgttaagcatcttatactgtgtatcttatttatttggcttatttttagtatcctctgaatataactccacacaggcagatagtgttttctttgtttcagagttagaacagtgtctggcacataagaaagtatgggctaattaggtattgaataaatagattaagttgggaccatcctgaacctracaagattgggacttggagtcaagcttgttttgagactcttggtattagcttgaaaagatcaacttggtacatggctaacacctttgacattgaggatttttgtggcttggtgatgtggtttacttagggctaagtatgaaccctatcagcttcagggttaggccattagggtcaagtttatcggtgccttcatttgtgaggatgatgattagtagccargaggagtaatgaacaaatgctcactgcagatagccccttccccagtcaagagggttcacattcaataaagtggccttgggccgggcgcgrtggctcacgcctgtaatcccagcactttgggaggccgaggcgggcggatcacgaggtcaggagatcgagaccatcccggctaaaacggtgaaaccccgtctctactaaaaatacaaaaaattagccgggcgtagtggcgggcgcctgtagtcccagctacttgggaggctgaggcaggagaatggcgtgaacccrggaggcggagcttgcagtgagccgagatcccgccactgcactccagcctgggcgacagagcgagactccgtctcaaaaaaaaaaaaaaaaaaaaaaaaaaatggccttaaaatggatgtaccactcttaagyagcccatcatgataaatattattaagatgaaagattctttttttttctttttttaaaaaattttttattttattattattatactttaagttttagggtacatgtgcacaatgtgcaggttagttacttatgtatacatgtgccatgctggtgtgctgcatccattaactcgtcatttagcgttaggtatatctcccaatgctatccctcccccctccccccaccccacmacagtccccagagtgtgatgttccccttcttgtgtccatgtgttctcattgttcaattcccacctatgagtaagaacatgcggtgtttggttttttgtccttgcgatggtttactgagaatgatgatttctaatttcatccatgtccctgcaaaggacatgaactcatcattttttatggctgcatagtattccatggtgtatatgtgccacattttcttaatccagtctatcattgttggacatttgggttggttccaagtctttgctattgtgaatagtgccgcaataaacatacatgtgcatgtgtctttatagcagcatgatttatagtcctttgggtatatacccagtaatgggatggctgggtcaaatggtatttctagttctagatccctgaggaatcaccacactgacttccacaatggttgaactagtttacagtcccaccaagagtgtaaaagtgttcctatttctccacatcctctccagcacctgttgtttcctgactttttaatgattgccattctaactggtgtgagatggtatttcattgtggttttgatttgcatttctctgatggccagtgatggtgcgcatttttttagacctaaaaccataaaaaccctggaagaaaacctaggcattaccattcaggacataggcatgggcaacatgtctaaaacaccaaaagcaatggcaacaaaagacaaaattgacaaatgggatctaattaaactaaagagcttctgcatagcaaaagaaactaccatcagagtgaacargcaacctacaaaatgggagaaaattttcgcaacctactcatctgacaaagggctaatatccagaatctataatgaactcaaacaaatttacaagaaaaaaacaaacaaccccaccaaaaagtgggcgaaggacatgaacagacacttctcaaaagaagacatttatgcagccaaaaaaccttgagtaaaacattactcaagattcttgagtaatggaatataattgaaaatattttcttactgcaaatgtaaatcatcataggtttgtgaacttttacatcagttttgacctctgttggttgtattaaaagtatgtgttgatgtttacttaggcagtactgaggctactgcacccttcaaagtaggaratgtgtgtcactcaatttcctccagtattatgcctgtcagtgcaaacctttttctatccattgtaataggattagatgtcatatgtgatagttgaaataacatacatattttttctatataaccttttttgtagtttctcagcttagctggataatttttgtaatacatttctccaaaatgagaaagatctgtaaaaaaactttagtattgagggtaattaatgacagatagatcttattacaatttaaagaggataaatatctccatttttaaaaagtttagtttggcttgtttttcccccagtaaatacttatagaacatctattataggtcacacaacttgttacctattcctttgagtaaaaggaattcctatgaaatggggaagaataattgcaatacttacttcatatagttgttcagagtattaaattaggtgattgactggaaataaactatatgaggtagtgataggagaggatcatgtatatactttttttctttaaaaaacactgtagtaccttgtgacaggcaatttctaagtcttttataaatattaacttcattcattttgttttcaattttttttattttttaagattatacttaaattctgggatacaggtgtagaacatgcagttctgttacataggtatacacatgcaatggtgctttgctgctcccatcaacctgtcatctacattaggtatttctcctaatgctgtccctccctttgctcaacaccccctgacaggccctggtgtgtgatgttcccctccctgtgcccatgtgttcttactgttcaactctcacttatgagtgagaacatgcagtgtttggttttctgttcttgtgttagtttgctgagaatgatggtttccagcttcatccatgttcctgcaaaggacatgaactcattcytttttatggctgcatagtgttccatggtgtatatgtgccacattttctttatccagtccaacattgatgggcatctgggttggttccaagtctttgctattgtgaatagtgccacaataaacatgcatgtgcatgtgtctttatagtagaatgatttataatcctttgggtatatacccagcaatgggaytgctgggtcaaatggtattttctagttctagatccttgaggaatcgccacactgtcctccacaatggttgaactaatttacactcccaccaacagtgtaaaagcattcctctttctccacatcctctccagcatctgttgtttcctgactttttaatgatcccattctaactgacatgacatgctatctcattgtggttttggtttggatttctctagtgatgatgagctttttttcatatatttgttgactgcatgaatgtcttcttttgaaaagtgtytgttcatatcctttgcccactttttgatggtttttatttcttgtaaatttgtttaagttccctgtagattcttggtattagccctttgtcagatggatagattgcaaaaattttctcccattctgaakgttccctgttcactctgatgatggtttcttttgctgtgcaggagctcttttgtttaattagatcccatttctcaatttgggcttttgttgccattgcttttggtgttttagtcatgaagtctttgcccatgcctatgtcctgaatggtattgcctaggttttcttctagggtttttatggttttagttcttatgtttaaatctttaatccgtcttgagttaatttttgtacaaggtgtaaggaaggggtcccatttcagttttctgcatatggctagccagttttcccaacamcatttatttaatagggaatcctttccccattggttgtttttgtaaggtttgtcaaagatcagatggttgtagatgtgtggtgttatttctgaggcctctgttctgttccgttggtctagatatctgttttggtascactaccatgctgttttgtttactgtagcattgtagtatagtttgaagtcaggtagcatgatgcctccagctttgttatttttgcttaggattgtcttggctatacgggctcttttttggttccatatgaaatttaaagaagttttttctgaatcatgaagaaagtcartggtagcttgatgagaatagcattgaatctttaaattactttgggcagtatggccattttcacaatattgattctttctatctgtgagcatggaatatttttccatttgtctgtgtcctctcttatttccttgagcagtggtttgtagttctctttaaagaggtccttaacactcagtaaactaggtatggacagaacatatgtcaaaataaaaaaagctatttatgamaaacccacagccaatatcatactgactggacaaaagctggaagcattccctttgaaaactggcacaagacaaggatgccctctctcaccactcctattccacatagtattggaagttctggccaggacaatcaggcaagagaaagaaataaaggtattcaaataggaagagaggaagtcatattatcgctatttgtagatgacatgattgtatatttagaaaaccccattgtctcagcccaaaaactccttaagctgataaacaacttcagcaaagtttcaggatacaaaatcaatgtgcaaaaatcacaagcattcctatacaccaataatagaaaaacagagagccaaatcatgagcaaactcccttttgcagttgctacaaagtgaataaaatacctaggaatacaacttacaaggaaacttccttcrtttttctaaccacattatgaggtaagtattattagtcctacttcacagttgaagaaacaggtatgtagagattaggtaactcatccaaggcagaagtttggcttcatagttcatgtttttaactatattcatagcactgatgttatcttcctaayatcaatctgtattagttttctattgctgcacaaaagattaaaagattatcattgctcctatctaatcaagatraaacatggaacttgctaagctagagatacayatgaattacctacgtggaaacgactgaaggaagacaagctatgggtctggaactcaggggagaatatgcagcaagagatatagatttaacaatcataagttataagtgggagttaaaacagtaaaagtgggtgagattgctaggaaatgacagagaaacaccaatattgagggtgggcagaggaagataaacctacaagaaaactgaagaatcagccagaagaatatgagaagaaaaccactggagaaacttgtaaaacttagtggcttaaagcagcaaatgtttattatctcacagtttctgtggttaggaatccaggtgtagcttagctgggtctcctggttcaggtcctcttataaggctgcagtcagggtgttggcaagtacccagtcatctgaaggctctgatggaggtagatccacttttaaactcactcatttgactcctggcaggtgtcgcttcctcctgggctgttggactgaggaaatcagttcctttctggttgttggctgcaagatgccctttgctccttgctagagggacctttccactgggcagcttgcaacatagcagcttgctttattagagtgagcaagcgagagaacaacagggtggagattatctgtaaggcaaagtcacagcctcttataatttaatcttggaagtgatatcccacctacttctgccatattctgttgttaaacatgagtcactaggtccaggccacaattagtagaagaggctttcacaagggcttgaatatcaggaggtactggtaactgggagccattttagaagataccacatagctcacggttagtaaccaccttgtcttaatttccatacatttcctttcttattgagtgaatttgatatcaaaaggcctagctattttggctatcatagcagcaatgttttgccattatgctgcatactatttattttcatgcttacatcttgttttagactgaataatgtcagctgctataatatagaattcaaaactctctatgacttaatacaaaacaatagactttttttttgatatgggccagactgctctgctaggtggctttctctaaagggtaatacagggatttagactcatgtggctctaccattttgaaatgcatccctctagccataaagatgtgggagattttaagagccaggcttgtaagtgatgttcatcgtttttgcacacattgcattgcccagaactagtgacagggctcaactctaagggaagatggaaaatgtaatcttctgtgcgtgctcagggaaaaaagaaaggacaaaaggattggcaaggagttaatttcacctcacatcttattgagatatgctacttgccttaaaaaagtaaatatatatgtgtacacacacacacacacacacacacacacacacacactgtttaagtctttcccttaaaaaattcttttgactctatttatttcattttttattaaaaatatcatatatatagaaaacacataattatacaatattgtttaacatgtaattataaagcaaacaaataagcaaccattcagtcactgcccagatcaagcattagaatgtggccagcaccctagaaaccccctgaatactttgtcaattacaaccccacactatcccaaattttatgataactgctttcccattactttatgtttacctctaccagaaccttcttgtcttccttcttgattaggattttggaatttgccaccwcctccttctgtccccatgccctccactcatatttagccctcaaatccttatacctgatctccagtcaaactgctcttcctatccccaaaatcaccagggactcccttattatattcgacaaatgtcttagtccttttcttcatggacttacttgtagaatttgactatgatggcattttctgtttctcaaaacctttgacttgttacaagtttctccagtggttttcttctcatattcttctggctgattcttcacggttttcttgtaggtttatcttcctctgcccaccctcaatattggtgtttctctgtcatttcctagcaatctcacccacttttactgttttaactcccacttgtaacttatgatcgttaaatctatatctcttgctgcatattctcccctgagttccagacccatagcttgtcttccttcagtcatttccacataggtaattcatgtgtatctctagcttagcaagttccatgttttatcttgattagataggagcaatgataataatagataggatttattgagttctttctaggtgccaggcactgctttaagtgctttacatgaattaattcattttaattctcattttaacaacgaataccataaagtagttactattatcattgtacagatgaggaaactgaggcataggaatgttaagctgcttgcccaaggtcacaaagaaatatcaggcatatccttgatttaaagtctggccctctagcttcaaaccaggtttcctggcccctgtaatgtatatagctgcctctcaagtcagggcttgtgtctaagcktttgaccatgagtctaatggamtttatgtagtattcagcttattgagacggggatatataagagtaatattagtttgagttgatgtgagattcttttaattctccagacatctaaaaacatctgtcaacagtatggcagctaaatcctatccagggatgactcaccccatttcaaagtrgaaggagtcagtattattttgtgtacaaatataaaataggtaagtcaaatacaaatacaaatgagtcagtcaccacaaaataatgctgacccccctctactaacaacaatcaaactgattgtactatataaattttttatacttagttataaagaattagtagtgggagaaactttgcctattgaaggtatgtgcatgtctggagagatgagcaacctattctaagaataacagactaaggcagagaaataaaataatgtatcaagcttggtggtacaaatgtaatattcatactttataactatggatagacctttcatttgtgttagtgggctagtttttaaaaacaacatgatggaagaatgagaatttttcattggctcagccataaaagttagtattgttttataggctcaatgactaaaacaaattatgcagtgcttgaaagaaattcagtagcagttgagtaataatttccatgaagaaattagtcagtgacatgtggtattgaaatcatgtgaacaaaaagctcaacagcacttatcagtagacaaatgcaaatcaaaaccacaaygagataccatctctcaccagccagaatggccattattaaaaagtaaaaaaataacagatgctggcaaggttgtggagagaaaggaacacttgtacactgttcgtaggagtgtacattagttcaaccattgtggaagacagtgcagccattcctcaaatatctcaaaacagacctaccatttgaccagcaatcccattactggatatataaccaaaggaatataaattattttattataaagacacatgcacatgtatgtttcttgcagcaccattcacaatagcaaagacatggaattaacctaaatgcccatcaatggtagaatggataaagaaaatgtggtatgtatacaccatggaatactatgcagccataaaaaatgaaatcatgtcctttgcagcaacatggatggagctggaggccattatccttagcaaactaatgcaggaacagaaaagcaaataccacatgttctcacttataagtgggagctatgttcacccacatagaggggaacaacatatactgggtcctatgagagggtgaaggtagggaggaaggaaaggatcaggaaaaataactaatgggtactaggcttaatacctaggtgatgaaataatctgtgcaataacccccccatgacacaagtttacctatataacaaacctggaaatgtacccctgaacttaaaataaaagataaataaattttttaaaaaagaaaaaaggcaraatagccagactctcagataattgcagccacgtttggatcatgtgatgacttgttacttgtaatactcattcaaggaagagagggccttgccttattaacctttcacagcaaattaagttgtattaatgataaatatatatattttgctcaacagatcagtgccattgtacttaatctcactgatagctcatacattcaaaattctcagaattcactttcatagttcaaatgttctctaaggtaactttcttacttttctcttattacttagatgacactggatcaaaaatccatctgactcaacaggtagacatggcggcacaggttgcctctggaatggcctatctggagtctcggaactacattcacagagatctggctgccagaaatgtcctcgttggtgaacataatatctacaaagtagcagattttggacttgccagagtttttaaggtggatttagttttgttttaattagtttttgtaataggtcaraagtctaacagttagtagaccaatagatatactgttattctttaaaacaatgtttctccaagttctgtagtccataaactacttcagtagtccaaagccttacaaactacctgcaccttcctatttcttaatcaaggagaaacaaaataaagaaaacaatgaccaaccagattggaaagtatgtacttaagtttatagttgaattaatgatctatttttcagttagtaccagtcacctctgtttgcctctatttcctttacaaaagcagtacactttgtgcagtgttaacctaaaccactattactcactgtatgccagattaatttgcatgctgccagaattcttcagcaatcattggctttttgatttccccatttttacctcagtctgaaagatactatataggagatataatattaggtgyttttctcttaaattaattttacatttccacattgtaccctaaaaatatggacatagggcataaaacaacaaataaatgattcccttttaatcttcatgaattcatcatttttttctttttgtaaattaattagtaccccagtgagtttatatattaatttaaaacacttggatcctacttttmattattagcaagtggttacatggtaattatcaaagtcagtggcttttcaatatcatcagtaaatcaaacaatagactttgcttcctttttttttttttttttttgctcaagaccagatgtgaagccagaatcatcatgtattaattctccaaatgtagtagaatgtttctttcagtgctattcttggcacatagtaggctcttaaataatattttattaatgacttcccacatatttttcagtcttgtatgcaagattcagaatttgctactgtaattgtcagttgaactaagctcattttgaatcttttctctctaaattttgaagtgaagcagattatagatgaatgaggttagcaaaaaaaaaaaaattgctttaactcggcctgattccttaatacatkaacaggtagataatgaagacatctatgaatctagacacgaaataaagctgccggtgaagtggactgcgcccgaagccattcgtagtaataaattcagcattaagtccgatgtatggtcatttggaatccttctttatgaaatcattacttatggcaaaatgccttacagtggtgagtaattaattctgaagtggacctttctgctgcatgtcacttacttaggtgtgattttaactgctttgcccagacttagagggcagagttatgaggctgaccataccatacctgcgggagcttgatagataaaatttgatgatgataatttgcattaatgaggtggtttattgcttccctctcctttgctagtgaattgcagtcttatagacatcacttgctgcaggatttagtttaatctgtgtaacctgagaaggggatggcrgaccttaaatctttgccaaagaaattgacttacttagtaacctagagtataaatggctataagtttaagactctgacctttaacttgttttttttgttgttgttggtttcgttctgtattttcaaggtatgacaggtgcccaggtaatccagatgttggctcaaaactatagacttccgcaaccatccaactgtccacagcaattttacaacatcatgttggagtgctggaatgcagagcctaaggaacgacctacatttgagacactgcgttggaaacttgaagactattttgaaacagactcttcatattcagatgcaaataacttcataagatgaacactggagaagaatatcaaataataaagtagcaaaacaaattcaaataatcyattccaaaatacaatgttatcaaccaactgcacaatcagtttatcctgacatattcaagtgataggataaagttggccatgtattatgaaaargattatttgtgcattttattgactgggcaacactgcaggacagtcaaggtgatatataatttcctcactgcctggtaaaattaagcacactaaaccaagttatttttctttttaagagatacttacatttccatttattgtttgaaatgtcgatcaagagaatcaacagatgatagtccaatttttactcagtgactgttgtagcattttcctgtttactgattagagtggttattcattattcctcagrttgctgaatcccatcaggctgttattatgaaggaatttgattgctttgctgcacagcaggacctgtgctttgagatttttttttytcttttaaaatatcctgtaactacaatgatggtaaagccatgttaaatgacttgattgtacttggagtaattgcacatttttttctatgcataaaaaaatgatgcagctgttgagaaaaygaagtctttttcattttgcagaaggaaatgatggaatttttctgtacttcagtatgtgtcaactgagagtcatatacattagttttaatctcttaatattgagaatcaggttgcaaaayggatgagttattatctatggaaatgtgagaaatgtctaatagcccataaagtctgagaaataggtatcaaaatagtttaggaaaatgagaggagaacagtaggattgctgtggcctagacttctgagtaattaataaagaaaaagaagtaccctttggcctacagatcagagttttatttattttttattttttactttttattatagtttaagttctggggtgcatgtgcagaatgtgcagttttgttacataggtgtacaagtgccatggtggtttgctgcacccatcaacccgtcgtctacattaggcatttctcctagtgctgttcctcccctagccctccatcccctgacaggccccagtatgtgatgttcccctccttgtgtccatatgttctcattgttcagctcccacttatgagtgagaacatgctgtgtttggttttttgttcttgtgttagtttgttgagaatgatggtttccagctttatccatgtccctgtgaaggacatgaactcatccttttttatggctgcatagtattccatagtgtctatgtgccacattttctttatccagtctatcgttgatgggcatttgggttggttccaagtctttgctattgtgaatagtgccacaataaacatgcatgtgtctttatagcagaatgatttataagcctttaggtacatacccagtaatgggatcgctgagtcaaatggtatttctagttctagatccttgaggaattgctacactgtcctccacaatggttgaactaatttatactcccaccaacagagtaaaagtgtaaatgtgttcctatttctccacatcctctttggcatccaaaacagcatcctgttgtttcctgactttttaatgatcaccattctaactggtgtgagatggtatctcattgtggttttgatttggatttctctaatgatcagatgatgagctttttttcatatgtctgttggctgcataaatatcttcttttgaaatgtgtctgttcaaatccttcgcccactttttgatggggttgtttgtttttttcttttaaatttgtttatgttccttgtagattcttggtattagccctttgtcagatggatagcttgcaaaaattttctcccattctgtaggttgcctgttcactctgatgatagtttcttttgctgtctagaagctctttagtttaattagatcccatttctcaatttgggcttttgttgccattggtttttgtgttttagtcatgatgtcttttccaatgcctatgtcctgaatggtgttgcctaggttttcttctagggtttttatggttttaggtcttacatttaagtctttaatccatcttgagttaatttttgtataggtgtaaggaaggggtccagtttcagttttctgcatatggctagctagttttcccaacaccatttattaaatagggaatcctttccccattggttgtttttgtaaggtttgtcaaagatcagatggttgtagatgtgtggtgttatttctgaggcctctgttctgttctgttggtctagatatctgttttggtaccactaccatgctgttttgtttactgtagccttgtagtatagtttgaagtcaggtagcatgatgcctataactttgttctttttgcttagaattgtcttggctatgcgggctcttttttgattccatatgaagtttaaagtagttttttccaattctgtgaagaaagtcaatggtagtttgatggggatagcactgaatatataaattgccttgggcaatatggccattttcacgatattgattcttcctatccatgagcatggaatgtttttccatttatttgtgtcctctcttatttccttgagcagtggtttgtagttctccttgaagaggtcctttgcatcccttgtaagttgtaatcctagatatttcattctctttgtagcaattgtgaatgggagttcactcatgatttggctctctgtttgttattggtgtataggaatgtgtgtgatttttgcacattgattttgtatcctgagactttgctgaagttgcttatcagcttaaggagattttgggctgagatggtggggttccctatatatacaattcatatcatctgcaaacagagacaattttacttcctgttttcctatttgaataccctttatttctttctcttgcctgattgccctggccagaactttcaatactattttgaacaggagtggtgagagggggcatccttgtcttgtgccagctttcaaagggaatgcttccaggtttacccattcagtatgatattggctgtggttttgtcttaaatctgtcattttttttgagctacgttccatcaatacctagtttattgagagtttttagtatgaaggggtgttgaattttatcaaattttctgcatctattgagatcatcatgtggtttttgtcattggttctgtttatgtgatggattgtgtttattgatttgcgtatgttgaaccagccttgtgtctcagggatgaagccaacttgatcgtggtggataagctttttgatgtgctgctgcactcagtttgccagtattttattgaggatttttgcatggatgttcgtcagggatactggcctgaaattttctctctttttttttttttgttgtgtctctgccaggttttggtttcaggatgatgctggcctcataaaatgagttagggaggagtccctcttttcctattgtttggaatagtttcagaaagaatagtactagctttgtacctctttgtacctctggtagaattcggctgtgaatctatctggtcctggactttttttggttggtaggctattaattactgcctcaatttcagaacttgttattggtctatttagggattcatcttcttcctggtttagacttgggagggtgtatgtttgcaggaatttacccatttcttctagattttctagtttatttgcttagaggtatttatagtaatctctgatggtattttgtatttctgtgggatcagtggtgatctccgctttatcattttttattgtgtctatttgattctgctctcttttcttctttattagtctggctagcattctattttgttgatcttttcaaaaaatcagatcctggattcattgattttttgaaaggtttttcatgtctctatcaccttcagttctgttctgatcttagttatttcttgtcttctgctagcttttgaatttgtttgctcttgcttctctagtacttttaattgtgatattagggtatagattttagttctttcctgattcctcttgtgggcagttggtgctataaatttccctctacacactgctttaaatgtgtcccagagattctggtatgttgtgtttttgttctcattggtttcaatgaacaactttatttctgccttaattttattatttacccagtagtcattcaggagcaggttgttcagtttccaagtagttgttaggttttctgtcagttttaatcctgagttctaatttgattgcactgtggtcttagagactgtttgttatgacttccgttcttttgcatttgctgaggagtgttttacttccaattatgtgatcacttttagaataagtgcgatgaggtgctgagaagaatgtatattctgttgatttggggtagagaattctgtagatgtctgttaggtccacttggtccagagctgagttcaagttctgaatatctttgttaattttctgtctcatttatctgtctaatattgacagcgggctgttaaaatttcccactattattgtgtgggagtctaagtctctttgtagttctctaagaacttgctttatgaatctgggtgcttctgtattgggtgtatatatatttaggatagttagctattcttgttgcattgatctgtttaccattatgtaatgcccttctttgtctcttttgatctttgttgatttaaagtctgttttatcagagactaggattgcaacccctgctttttttttctgctttccgtttgcttcgtaaatattcctccatccctttatcttgagcctgtgtgtctctttgcatgtgagatgggtctcctgaatacagcacactgatgggtcttgagtctttatccaatttgccattctgtcttttacttggggcattcagcctgtttacatttaaggttagtattgttatgtgtgaatttgattctgtcatatgatgctagctggttattttgcccgaaagttgatgcaggttcttcgtatcctcgatgatctttacaatttggtatgtttttgcagtggctggtattgattgttcctctctatgtttagtgcttccttcaggagctcttttagggcaggcctggtggtaacaaaatctctcagcatttgcttgtctgtaaaggattttatttctccttcgcttatgaaactgagtttggttggatatgaaattctgggttgaaaattcttttctttaagaatgttgaatattggcccctactctattctggcttgtaaggtgtctgcagagagatcctctgttagtctgatgggcttccctttgtggctaacctgacctttctctctggctgcccttaacattttttccttcatttcaaccttggtgaatatgacgattatatgtcttggggttgctctgctcgaggagtatctttgtggcgttctctgtatttccttaatttgaatgttgacctgtcttgctaggttggggatgttctcctggataatatcctgaggagtgttttccaacttggttccattctccccgtcactttcaggtacaccaatcaaacgtagacttggtgttttcacataatcccatatttcttggaggctttgttagttccttttcactcttttttctctaatcttgtcttctcctttatttcattaagttgatcttcaatctttgatatcctttcttgtgctttatcgacttggctattgataattgtgtatgcttcatgaagttctcatgctgtatttttcagctccatcaggtcatttatgtgcttctctatacttgttattctagttagcaattcctctaatctttttacagtgttcttaacttccttgcattgggttagaacatgctcctttagcttggaggagtttgttattacccaccttctgaggcctacttctatccatccgtcaaactcattctccatccagttttattcccttgctggcaaggagttgtgatcctttggaggagaagaggcattctgtttttttgaattttcagctgttttgcgctggtttctcctcatcttcctggatttatctacttttggtctttgatcctgctgatgttcggatggggtctctgagtggacatactattcctttctgtttgttagttttccttctaagagttagtgccctctgctgcaggtctgctggagtttgctggaggtccactccagatgctgtttgccttggtgtcacgagtggaggctgcagaacagcaaagattgctgcctgttctttcctctggaagcttcgtcccagaggggcacccactggatgccagccagagctctcctgtatgaggtgtctgttggcccctactgggagatatctcccaatcaggataaacgagggtcagggacccacttgaggaggcagtctgactcttaccagagctcgagcactgtgctgggaaatccactactctcttcagagctgtccggcagagatatttaagtctgctgaagctgctcccatatccaccccttcccacaggtgctctgtcccagggagatggggttttatctattagtccctgactgccttttttttagagttgccctgcccagagaggaggaatctagagaggcagtctggccagagtggccttgctgagctgaggtggtgggctctacccaattcgaactcccaggcagctttgtttagactgtgagggtaaaatgcctactcaagcttcagcaatggcagacggccctcctccctccaagctcgagtgtcccaggtcgacctcagactgctgtgcttgcaatgaggatttcaagccagtgaatcttagcttgctgggctccgtgggggtgggacccgccaagctagaccacttggctccctggcttcagccccccttccaggggagtgaatggttctgccttgctggcattccaggcaccactggggtatggaaaataaaactcctgcagctagttcagtgtctgcccaaatggctgcccagttttgtgcttgacacccagggccccagtggcgtaggcaccggagggaatctcc

SEQ ID NO: 97700 - DNA, 165223 bp, Homo sapiens
  misc_feature (1)...(165223): n = A,T,C or G
tcactgaagccttgacctcacagggtgaatgtgatcctcctacctcagtgtctcaagtagccgagaccacaggcgcccgaaaccacaccagattaagtttttttattttttgtagacaaggggtttcaccatgttgtccaagctggtttggaactcctgggctcaagtgacccactcaagtgcggtaagccaccatgcccggccccaccataattaaaaagtggtttttttttttttaaagtgggggttacagcatgttaaaaagtgacttgggccgggtgtggtggctcacgcctgtaatcccagcactttgtgaggccgaggcgggcggatgacgaggtcaagagatccagaccatcctggccaacatggtgaaacctcgtttctactaaaaatacaaaaattagctgggtatggtggtgcacgcctgtagtcccacctactcaggaggctgaggcagaagaatcacttgaacccaggaggcggaggttacagtgagccaagatcctgcaactgcactccagcctagggcaacagagcaagacagtgtctcaaaaaaaaaagtgacttgaaggtgtttctctgccaagtcatccctgccccagggatataaggtttaaagttaaggtagcaaggtgtctccacctaactccaactacccaagagtctcaaaaccttccccttcctgctcagtgttcttttatttccttttcaagaaatgtgaactgctatagccagaaacatgttccttcagcagtgtttgcagatggatctcatgaaagttcagaaaagggtggttcacttcaagcgggagacagtggagttcctccactataaggcgaagtttgcaaagtcccactagtttgctctgagaacatgagacccttaacctctgggtcatgtgtttgaggtccattttggtgcaggcatcacctgatgctaaaaaaggatcattgtttagtgtggggttcttaacttgggatgcttacatccccttcccctacctcaagaggtccttgggtagaattcaatgggatccatgaatatgaatgacaaaataaacaaaacaatctttattttcactaacatctaactgaaatttagcacctccttttattataaatgtaggaagcaaaccacagtattattactactactgctactattactactactacctaggaatttatcatcaataaaaattatattttcatatcctattatagttatctcaaaatactgagattgcagacgtctcaaaacatcatttatactcaccactactttgaagtaaggcagtattaaatcctccacaaatcttcctatgtcagtaaagaagcattatcttgatatatcacaaatctggttttttaatattttgattatacttcaatataattttgcttcctttgtaatggtttgtattttgttttattcacttaaaaataaaaatactctgcccggcacgatggctcacacttgtaatcccagcactttgggaggcaaggccgaggcaggcagatcgcttgagcccatgagttcgagatcagcctgggcaacttggtgaaaccccatctctacaaaaaatataaaacaattagccaggcatggtggcatgcacctgtagaccccagctacttaggaggctgaggtgggagaatcaactgaacctggggagactgaggctgcagtaagccacgatcgcgctactgtgctgcagtctgggcaacagagtaagaccatgtctcaaatttttaaaaatatatattctgagaaggggctccacagtttgcacaaatgagtagcaaaggagccgtgacaaaagaatccctgtaacttgacaacaacaacaacaacaaataccctccttgctcataagttcccacaaaggtatttattttattttgcttagggtggtgataaatcatccttcaaaacatgcacacattcatttgtgagcttaaactctcctcaatttctgatgctggtcatttgcagatcattagacccagaagtgatttttagagaccaggaatagtttcaactaaagaattcgttgggattctcttggacttttcagtaacatgggccaataaaattcctttttcacttggagtaatccaagtaaggtttttgtcatttgtacccaattgggctctgactaacacggaacccctctatattggttgaggctgttgaggattagaggaaggtgggagaccatctgggtggctcatatctgcatcacgttggattgtgtcctaataccaacaaaacattgataacacacctatcattcgaacagtttccaagtgaggtacttgtaaatatgttgtttcatctaatcctcacaacaggctcttcaggtatgtattattcccaacctttgtggatgaaacaaaaaaggactagaaatttgtatttgtatctaatctaaactccctcaatttgtattcattctgctaagaattcctcctaccagacaaacccactctgggaactccaagtcattctttaagactcaattcggctaccacccctctatggagcctccctcccttcatcttcccctcccaagtacagcccctcaggttaaagacacctgcacatccctccatcacaacacctgacacattgtgctgtctgcttactcctgtataccacccctcccagactatgtctttcccaagggcaaaaatattttgtatctcaagtacaatgtctgaggcaaagcaagcacataataaatgtttgatgtgaataaatttattggtcaccagctacatgctggctttaaatcaagtgctagaatacaaaagtgactcacagttcagagcaaataaacaagaattcattgaatgctacatagtcctaggcattgcagatacaggtaaaacacaggtctgacttaaagaagcttactctctagttggaggccgttgacatgtaaacggaaaatttcactagaatttaatatatatattctagaattatctatgggaaaggagcacttaataggtggagaagagtggtagggatggggtgtcaagaaaggtttctgaagatgccatctggactgaatcatatcacaagagaaagagtagcatatttaaatcccgagtgagtagagagagtgaacaaaatcagagaacaacctgagcgtagaaacctagggaataggccaggcgcagtggctcacgcctgtaatcccagcaccttgggaggccgaggagggtggatcacctgagatcagaagttcgagaccagcctggccaagatggtgaaacctcatctctactaaaaatataaaaattagccaggtgtggtggtgcatgcctgtcatcccagctactcaggaggctaaggcaggcgaattgcttgaacctgggaggcagaggttgcagtgagctgattgcgccactgcactccagcctaggcgacagagtaagactccgtctcaaaaaaaaaaaaaaaaaaaaaagaagaagaaaaaagaaagaaagaaagaagaaagaaacctaggggatagtcaatgtgcagcccatgaaggaacttccaaaaagtgtgagtagaatcaggagagtaagcaaggccaagggaggaagaactttacaagagtacaaaatcagcactgccaaatgcagcagaaaggccaaataagattagaccagagtgtattccatgaatttagcaactggcaagtccctagtaactttggcaagagcaattctactggagtagtggagggggcagaagcagtgaaatggcgagtaaaccggaggtgagaatgagaaatagtgaatgcagaaagcttttacaaaggttggctgagagaagagcaatagggcaatggctaaagggtgatgaagttttaagaacttttttttttagtcttaactaattctttccttcccaccccacactactcccaaatggacaaatttccatctgggcacctaaaattcccactctgctgtaagctccttaaggacaactcttgggtctgcatcatccttttagtccacacatttctctgaacatggtattcaacaggatctgttgaatgactgactgaataaatgaatgaatgaatgaaatgcaaattcagcacaggtggtaacagggaaatgatctactgggatacagctattgtctgttcttctttcatgggaatttgcgcttgtctgaaaattcaggaccacaaagtaaacaaatccaggcaatcttctctcactgatgcttataaatgtttggcccaggaaggcagatgtagatagagcccagtttagattttggagcctggaaaacagatcttcaagatcaagggctgttcattcttcattctcaggagctgttcaagttcttgggattggcagatctatattggactcttagtgctgccattatagtttttgtaaattatttaacctacctaagcttcagcgtcctcgttggcaacttgaagatacccataatagcatctaccttatagggctgcaggaggataaatgagacccagaaatgaagcgcttaccatagtgcttggcaaatagtactcaatgtcaacaaaataagataaataaagtactattaaaatgaataaaaatatccatttcaggggatgcgttccagaagaattgggcataagtcaaatctcacttaaaatatagaaagaaaacttggtcctcagaactccttagaaatgttttacaaaagtaagtgaataattagccccaacttatcaatccactttttttttcttttttttttttttttgagacggagtctcgctctgtcgccgaggctagagtgcagtggcgggatctcagctcactgcaagctccgcctcccgggttcacgccattctcctgcctcagcctcccgagtagctgagactacaggcgcccgccaccacgcctggctaattttttttttttttttttttttttggattttttagtagagacgtggtttcaccgtgttagccagaatgggctcgatctcctgacctcaggtgatccaccaccctcagcctcccaaagtgctgggattacaggcgtgagccaccatgcccggccccacatttccatatatcagatttactgaaaaactttttttttttaatttcccctatccgagtggacccgcccaatcaagtcagttaactttccttggccgggggcggaaccaaggtgttgcggtaatttcctggcctgccacgactgcttgcttgcgtaagggcgtctttgggtatgttgccattctaatgaaaattcagctccagccccgtcggtggaacagatcccgggcaccactgggcagagactagatgtttcaaacgcctgccccccagcaagcaggccgcgcaaagggcaggagttcggaaccaaggcaaactagggggcggggagaaaagattggcacccgcctgctgagatctgccaacctgacgccccagggggatgggtgctctcgccacccttgccccacagtgtcgggctccgagccagcgggaagcgccagtcctagccgagaatagcagaggagcgggcgggatgcgagggggctctgggcgaggcggcggcagtctaacctttcctgcttaaggcgacagcactctgcgccgtaatcgtatcttccaaggctgcaaggttagggcaaatgtcagacgcctcgggaggggcgggggacggggagagggaaggcagcggctagagacggagagtcgggcgtgaccttgggaggctccgcgcccgcacctccccgcgccccgggagtcaggcgagcaggtctgccgggtcccgtggccactttccccagcccggcgacctccgtcgggcctccaggccagaagagcgagcgcgaaggagagggaggagcgggaggtggaaaccgaggcggcagcgcgcggaagcggccggccccgagcgagggagggcgccgcgggccgcacgtcgcacacgcgccagggtgcacagcggcgcggggccgcgcatcccttaccccgttggcggcagcgatgcgagcgatgagctggatggcctccttcatgtagaaccggccgtccccgcccaccaccagcgtggcctcctgccgctgcgccggctccacggtggagatgatactctggatgaagttctccgcgtagttggcgctgctctggaacaccttcacccgcttccgcagcccgctcgtgcccggcttctggtcctggtacgcctgggtcttaactgtcacgatcttcaccatggtggcgacttgctgccgggggtcagagcggcggacttggctggcggaggggcggccggctgaggctgcagctgctctggggtgagggcacggcgggtgggggctacgccgcactctaggccggcgtttggccctcctccttaaagggacaggggacagggccctccctccgcgccagcccacctcctggcaggtccggcgggaggggaaaggggagcgccggtctctaggcctcctgtgaaatgggtggagccttactgatttactctccccttcggaatcctatccactgtaaaaagaggcccgcaactcctcctctaagtgttggggcagaggttggggtaggaacccggtcatagggcaaggacgtgaggcagggtggaaaaaagtacagggtagaatgatttccagtggtttggcgaatgcatcgtgtgtaaatagctttctggaaacctgttgggagggtcagaagtgccagccccagctcgatttcatgagtcgtaattctttctatttctccctaaatgtgagggcatttgagttccgtaaaggagtcgactccaaatgtttcctgctgcaccacacacttgactaccattggtgacggtgacttagctatgacttgctgagtgtagcgtttctaaaccttactaaactctgggttttatttttcccctttttatgcttacaaaactgaaattcaaagaataaaatgccttgtctcattgccacacagctaagtccatgcgggaggccaattcaggtggtctggctccaaaaccagggctcttcccatgatttgcccgctgtgacaccaggttggcaactaggaaatgtacaagcaggacttgacaaatgtaggagcaaatatatggtaaggataagtatgaacaccatcaaaattagccagttactcatgtaatagaaataaagtgaggagatcaacaaacaaggactgacatggctggaaaagtttcacgggggatagcaaggtcaaccaaggggatttgattattaagtaggaatcttyagtctttcttgcttttcggtttagtatctcccttaatttgatgagagtgrttgtctcctctgttcaagaaacctgtcattttggtaaagtggcaaaaaacttggctttacaagrtgtgtgctcttgggaaagttagttaatgtccgtgggcatcaatttccttactgtaaaataaacatatcacctactttggaatatttttgcaagatttaatggggttttgtatgtcagaaattctcagtcatggatacacagtagaatcctactgtgacccatgctcacagtagaattacttgaggtggtttctaaatgacccagtccaaacaaattcaatcataatcagctgttagaagtaaatcatctagcctggtgcctgaaacatagaggccttcaaaaatattagctccccttccccaattccaaaaccagagcatatcattcacctgtgaattatattcttttggtagttaattggtatgtcttgatcaagcagggaggcgaacagacccataagagtgcagactctcacaaaccaagtgttgatatacatgctcatatagtacatgctatgtagatacagtgtgttgatgtagtcactatagatgagtttcggtggcaaatattatgtgaaaacggaaccctggactgctagtaatgagttctaatatttgcacaggagtttacagagcagtgtaatcttgtgaattaaataatataatcaagcccattttatagacgagagaattgaggattggatggtgaatgtaatcaaggttatctaactccacaaaatgaaaatatagcatagattcactgagccttcaaaatacctaccttagagttgtatggtttagatagwsaatatacagctcctaccacagtgctaataagtaagtcatcaataaatgataacttgtaaagtcacgggcccaaattcagatctcatgccctttctatattcttcagtatctttggaaatatgatggagcttttcatttaagaggaattgatctatacttctctcaccccagaagttgtaacaattagctttaactgcataacacaccagtctaaatctgagtggcttaagacaacccccattcatgattatagttcatgattctatgagttaactggcagttctgctgttctggacagggttactgtggccccttatacagacctaacatgatccccatgttccttgcctcctgataatcatgcctttatgcaatccccttgtattacagattgagtatcccttatccgaaatgtttggtaccagaaatgtttcagattttagattgttccggattttggaatgtttgcattacaatggttgtgcatcccaaatccaaaaatcccaaattcagaatgttccaatgagcacttcctttgagtgtcatgttggcactcaaaaagttttggattttggagcattttgggtttgggatttttggatttgggatactcaacccgtacttttctactgctgtatgacaaattaccacaaactcaacagctgaaaacaacacccatttatgatgtcacaattctatagataagaagtcccaattctatagatcaaaaggtttggccaggttcaatcctggtaatcacggatatataacagcttataaacatcaaggagaaagtattttgaccttcattamattctttttaaggcaagcatacctgtttaaactgatttgtctatagccagttggtttaatttcattgaattcttcccagagcctcaagataagaacccacccaagcttggtgcgttcttatctggagcctctgggaagaacaccttgatttgaagtcaagagccaagctggcttcttatctggaggctctgggaagaatttctttcaagtgttaaagataaataaaaatagaggctccagtttagatattttaagtccaaccacccatagccaggtagccaaaacttaagtcatccttatttccctgaaacacttgctctagacataaacaaaacacaaaatgtccttgacagtgtgagtcaatgaaattaaaccaatcagctatagacaaatcagcttaacagctctactcgccttaaaaagaatgtaacgaaggtcaaaatacttcttcctcaatgtttataagctgtactgtaactgctgtgagctgggcttcttgccacttttggttagatgtcttccagtttgtaaactgttctttgtatgcatgctaaacttttaaaaatttttaaagtttgatctgattttaacacagcgcattcagattgctggcaggatctatttccttgcagttgtaggattgaggtccccatttcttagattagacctacctggataatctccctttgtaacgtgttcataggagtaatgtatcatcgtattcacaggttctacccacgttcaaaaattgacttgcagagatttccaagttgtagtatttatgaaaagcaagagaaggagtcttattcccctgtgggtagcactgaaatcgggaaagaagccattggaaatataccaagatatgcaacaatgattaccactgagttgcaagatagggcaatgtttattttctttatattttatctggattttccaggttttctatagggaatttgtattatttttaaaatgataagtacatattatgtattttccttttctttgaaataccttttaagtggtaatccttacttttttttttttttttttttttttggagacagtctcactccatcacccaggctggagtgcagtggcacgatcttggctcacttccacctccacctctggggttcaagcaatgctcgtgtctcagcctcccaagtagttggaattacaggcacatgccactatgcccagctaatttttgtatttttagtagagatggcgtttcgccatgttggccatgctggtctggaactcctgacctcaagtgatctgccttcctcggcctcccaaagtgctgcaattacagacatgagccgccacacccggccctcattatttcattaatgaattattctttaccatttagatgtattcgttcgtgtattgattcattaactctataaatatgttttgaacttgtactaaatgacagctctttgaaaggtgtttgatgaataagacaaaatagtctcggccgggcgcggtggctcacgcctataatcctagcactttgggaggccaaggtgggcggatcatgaggtcaggagatcgagatcatcctggctaacagggtaaaaacccatctctactaaaaatacaaaaaattagccaggtgtcgtggcaggtgcctgtagtcccagctactcaggaggctgaggcaggaggatggcgtgaacccgggaggcggakcttgcagtgagccaggatcgcaccactgcactccagcctgggcaacagagcgagactccgtctcaaaaaaaaaaaaaaagcaaaatagtctctggtctcacagatcttgcaatatgttgcaggagacagatactgaataataaatcataattgtgataagtgcaacaaagaagtataggtgctgttagattgtaaatagaaggatctatcattggagagagtcatggacaatatcctggagaaagtgctatgtaagctgagggataaaacaatgagtaatagtacctggccaggtgaaaagagaggaggagcatttcattccagaaagaacgttaagggaagtttaaagtaagaaggaatctagtgtcatcaataacttgaaaaaagacagttagtgtaactggagtataaaaacctcggggtggaatggtaggtctgatcatattgggccttgtaggggatgtcaggtgttgagatctttatcataacagcagtgaacaaacaaaagcattttgttttcattgtggcaagacatacgtaatgaaatttaccattttaatgatttttaagtgtacattcagtggcactaagtacattcacattgttgtgcaaccattgtaccatccatctccagaacattttcatcttcgcaaactgaaactctgtacccatgaaacagtaactccccattccctcctccctcctacccctgaaaaccactattctgtctctatgaattttactattctcaagtacaatcatatttatccttcatttgcattccaattgcaatgatttaaagaaatgtatttactataggatagcaatctttgatgactgcaacaaataatcaatggtatgtatgtgaaatttataataaaaaagatgtatggagtttataatgaaaatactggatggtgaagtgggtgatatagtggcattaacatttaacagttattagttacatggcttatatagaaaccaattatcaaagtgagaaatattgaaaagtaattcattaacaacatatagacaaagccttagcaggcacctatttggcatacaataaaagcatgtatcatgttattgttaaaaacaaaacagctctatatctatgtatcctcatcttcctgtctggtggtgtcaagtaatggtggaataatctatattgaggaatattgaggatgtctmcagtttaggactagaatgtcctaaactagtctctaactagagactagtctctcagttaacagagctctaatagagtaagtcagttgtaaataatcttctataagaatgtacagttatttgtaactggaaaataattgacaattccatatcaacccaaattaatgctgaacaatattgcaaatgtcattttagttcatttatgcagtctaaatcataggttcttcttgactgcagattcagtttattaaatcctgatctatttgtaatttgctgaaatgactagttcctacatatggaagcaatatgaaaccgatgtccgtttgtatccataagttattcaggtgtttaaaacttttacttgaataaaagttaatagatatctgcatgctgtgattctgaagtttgttcctgtgccaaaataataatagtttctgaattcatgtttcagtgtcaagtggttattcatgaggctatgtgtgaaaaggattgatatatgtgataaattggactttttccttagaattcatttttggaatcttctataaaggatatcagtctgaattaatttatatgaatatttgatatgcaaatattaatatttcaaatggcaaaagataagatttttaaaaatacagattgtgaaggacatttttcaagagataatgaatgtcttcatttttccatttcatcagtattcttgattccttgttagatgctgtggtaggttaaataatggctcctaaaagttatacatttcctaatccccagaatctgtgagtgttaccttatatggcataaatgagtttgcagatataattaagaatcttgagatggaaagattatcctggattgtccaagagggctctaaatgcaattacaagtgtccttagaagacagagaaagggggacatttgactgcaaaagaggagaaggccaaggaggcagattggagtgatgtagtcacgagccaaggaatgctggcagacaccaaaagctggatgagacaaaaaatgcagtctcctttaaaactttccaaggaagcaccaccctgtcgtcaccttgattttggcccagttatactgattttgaaattctggcctccagaactgtgagaaaataaatttctgttgttttaagctaccaagtttgtggtaatttgttacagcacttatagaaaactaatacagattgatatggtttggctgtgtccccaccctaatmtcatcttgtagttcccataatccccacatgtcatgggagggacctggtgggaggtaattgaatcataggggcagttaaccccatgctgctgttcttgtgatagtgagtgagttctcacaagacctgatggttttataaggggcttcccccttctgctgggcactcattctctctcttgccgccctgtgaaaaggtgccttctgccatgattttaagtttcctgaggcctccccagccatgcagaactgtgagtcaattaaacctattttctttatgawttacccagtttcaggtatttcttcatagcagcatgagaacagactaatacacagatgctttaattttatggagggctatgagccacaaaacttatggcttgatcctctggaggcctaaagcatgatttcaggtgacagcaagagacagaataaggaaaaaaaaaaaaaaaggctatcctaaggctctacaatcaataaacaccagagaaatatatatcaagtgtagcacgagtgaaggaaggaatcaagaaaatcacggaggtaaatatctccaaattattatcttgcttaaattatctgaaaaactaaggtcaaaaatgtttttttccttgaattgtctaggaaacatagttctttgtttattcactatgtagaattgctgcagtgtactgggagtgttctgtatgccaccttgagattctgaacgcagtctatcagaactagtttagaattggctggtattagcaatttttcctcatgacagaactgtttttcttttttcccttgatatcacttccctggatatgattcttaggttctgttatttttcttaattttgaaaccttctttgaaatacttttattcataccttcacttactctccctttcacccatctgttccttttcaaaccacctatcaaatttttactaagcacacagtacaggatagtcagttaggtcccagattagccaaccaaaataagatccctgcactccagaacattaaaatagggaaatctagacatgtacacaaattaataaaatatacraagtataagctacaaaaaggtactgatttttaaagctaatattaaaaagcaagatcttaataatctaagcttctaccttaagaaactaggaaaagaacaagtaatcccagggtaagcagaaagaaggaatgaataaaggtaagagcagaaatcaacaaaattaaaaacaaaaaaagagaaaatcaataaaactaaataaaatcaataaaacttttctttgaaaagatcaataaaaatgacaaacctccagcaagaccaacagagaagacacattttattaatatcagaaatgaaaaagggatatcactacagactgcattgacaattttaaaaaattctatgcacataaatttgacaacttagataaaatggaccaaatgctcaaaaactacaaactaccaaaactcaaccaagaataggtaaactgaatatcctgtagctgttaaagaaattgaatttgtattaaaaaaaaaaaaacctcttccaaaataaatcttcatgcctagatgtttctaatgagaaattcaagtgaacatttaaagaaataacaccaattttacagtcttttccagaaaacgagaaagcattcccaactcatcttatgaggccagaattactctgatacccaaacaagacaaagacatttccaattaagaaaactacagaccaacatccattttatgcagtcacaaaaatgctcaacaatgtacagttgaccctgaaataatatgggggttatgaatgccaaccacccccacaagtggaaaatctatccataacttttgactccccccaaacttaactactaatagcctatgttgaccagaagccttatggaacataaacaataaagttagctagagaaaggaaaatgttatttgttaccataagagaacatatatttactgttcattaagtgaaagtggatcatcataagtcttcatcctcattatctccatgttgaatagaaggtggaagaagagaagttggtcttgctgtctcaagagtagcagaagcagaagaggcaggcacacttggtgtaacttggaaatacactgtaatttttttcttttttcaagacaagatcttgctccattgcccaggctggattgyggtggtgcaatcatagctcactgcagcctcgaactcctgggctcaagtgatcctctggcctcagcctcatgagtagccgggactacaggtgtgtgccaccatgcccagctaattttattttttgtagagacaatgtcttaccatgttgcccaggctgatcttgaactcctgtcctcaagcaatccttccacctcagcctcccaaagtgctgagatataggcatgagccaccacacccggctacactgtaatttttgtctgacttttttgctttctcatttctctaaaaatgtttctatacagtacaatccatcttccactgtttgctttagtttccatgttgcaaaagaagtcaaaagtgatcttgaataatcagaacccttatgccagactgtctcatgtcattttgtttcctggcactgcttcttctatgtcttcttccacatcatttggcactggttcagaatcactcaactctctcctgttgtcttaactcctctggtgtggtgtcttgaatttctccaagatccatatcttaaaacctttcacctcccactttttttttttttttttttttggccatatccacgtctttcatttctttgattaggtctgtcataaattctgtgaaatgatgcacaacatctggacacagttttctccatcaggaatttattgtttcaggtttgatgactttcatggctttttctgtagcataatcaatggtattatctttatagacttttatgatgtccttttgttattgttgttttaatctttcagtcttttatttttatatagttttcttttctaaaaggccatctcggcttcatatcatggtttctctctattgggggttctcatccatagcgttgacattcctttccacagagtacctcccacgtgaaatgagacttaaaggccctcatgacctccaatctataggttgaattaggaaccttgttttggggagcaagtagacctcattgacaccttcagtgttgaatcatggggttccgtgtggccagggacattgtgccagatcaaaaaaactgtaaaaggtggtcgcttactggcaaagtacttcctgacttcagcgacaaagcattgatggaaccaatctagaaaaagggttctcattgtccagaccttcttgttgtacaaccaaaagactggcagctggtgtttatcttttcccttcaaggctgcggagggtagggcattgaagggggagagtttagcacctttatagataagggcaatcttgatcataaatgtgactgcattcataaaatggtagagtttgttatcccttcctgccttaaatcctggtgcttgcttcccttacttactaataaatgtcttctgtggcatgtttttccagaatagggcacattagtctgcattaaaaacctgttcaggcagatatcattcctcctcaatgattttcttaatagtatctgagaactcatctgatccttctttgctggcagaagctgcttctcctgttatcttgacactttttaagtcaaacctctttcaaaaattatcaaaccatcctttgctggcactaaacttttgagcttaatatccttaaacttccttttgcatggctgggtgcggtggctcacgcctgtaatcccagcactttgggaggccgaggtgggtggattacctgaggtcagaagttcgagaccagcctggccaacatggtgaaaccccatctttaccaagaatacaaaaattagctgggcatggtggcatacacccgtagtcccagctactcgagaggctgaggcagaattgcttaaacccagaaggcagaggttgcagtgagctgagatggcaccactgcattccagcctgggaggcagagcgagactgcatctcaaaaaaacccaaaaaacttccttttgctttgtcatataatgacttcacttttttaaaaatcctgttaatttacaggtatgacttccttatagcaatcctgtacccacataaaagctgcatttccaatatgagatgaaaaggtattttgcaaaaagggcaaggttctcatgcctgctggcatagctgcagcaacggtgttatgaatttccttttctgtttttacaatggtccttatgttttcttaatttatcttgaaatggcaggcaaccacatctgcaaacctcaatccacaatgcatatcaagcaattcaactttttcttgtaatgtcatkactttgctatgcttcttaggagcacttccggcatcactaatgtcactagtggcattttgaatgggtcccatagtgttagacaaggtttacaatattccattaaatacaatgaaaaatacataagaactatgagatcatttctttactttgatatgcaatttactggagagacaagctgctctcacagtttagcatcacagcatgcrgtgttttcagtggatactcacaacacttgagtttactgcaatagcagcaggaggtagctatgaaattattacaatactgcaatatgtactacagttaattttatacagttatgatttaatactgcatatttacgtttgtttacgtttgtctcgactatgaatggcaccatgtgtagtctgtgtttatgtgcctaaattttgataaattttaactttttataatagattttatgtatgtgtagattttatgtagtaaatgataaaacaggccactatctacatatattttatgcattcatgacatacctaactttttcttgcttttttggttatttctaggctatgcagtgagttttttcaaaatgtcacaaatctccaaaaaattttccaatttatttattgaaaaaatccacatataagtggacccatgaagttcaaacccaatgttgttcaagggtcaactgtattagcaaactgacatccaaaatatataaaaagaataacatatcacaattaagtggaatttatcctagaaatgaaaggctggttcaaatttgaaaatcagtcaggtttcagatcagaaaataaggtaccatattaacagtctaaagaagaaaamccaaccatacaaccacatcaattgaagtagaaaaaaatatttgacaacattgagcatccacccttttttttttttttttttttttaagagacgggattcttgaatgctcaggctcaagtgatcctcctgcatgagcctcctgagtagctaggaccacagccagaagccactgctcctggctcatcatccattcttaataaaaactctcagcaaactaaagagaagtaacttctataacctaattaagggcatctacaaaaacatccacagctaacataaaatagtggtaaaagactgaatgctttccccactaagattgtgagcaaggaaaggatatccactgtcattgktcttatttgatatcttaatgggmagtcttagccaatgcaataaggcaagaaaaaagacataaaaggcatatggataggaaagaaagaaatgaaactgtccccatttgcagattacatgcttttctaagtagaaaatcccaagggatatataaaacacaataaaaaaaaaccttcctaggacaaataaatgagtttaacaagggtctcaggatataaagccaacatataaaaatcaatcatattgttacatattagcaatgcacagctgaaaacaaaaatacaaacagctcataaaaataaaatatttaggtataaatctaataaaggatatataggagctgtatgctgaaaactacaaaatgctgatcaaagaaataaaacctacataagtggagagcaatactatgttcatgaattggaagagtcaacataataaacatgccagttccccccaaatgatcaatacagttaacacaataccagttaaaatcccagcaggatttattttttgtagatataaacaagccagttctaaaatttatatgaaaagggaargaaactaaaatagctaagatgattctggaaaagaacartaccaytggggaaatcatgttacctgaatataagacttacaatgaagctactgtmatcaggacaatgtagtattagtgaagggaaagacacatcgatcaatggaacagaatagagttcagaaatagactcatgcaaagatatggttctatatgaccagtgaatttttcaacaaaggtacaagagcaatttaatggagaaaggataatcttttcaaccgatgatattggaataactgacatccatatgaaaaaaaatggacctcaacctaaacctcagaactcatacaaaaattaactcaaaatgcatcacacatataaatgtatgaagtaaaactatacaacttttagaagaaagcagaagaaaaatctttgtgacctggggttagacaacgacttctaacttgacaccaaatgcataatccattaaatgaaaaactgattaattggacttcatcaaaatgtaaaactttcactmtctatacgatccagttaagagaacaaaaagactatctacagaagagaagaaaatactttcaaataacatatccaataaaagrcatatccagaatttataaagaatcaaatggtaagaaaatgaaactcaaaactcaacagtaagaaaacaaataacctaatttcaaatgggcaaaaggcttgaagaagcacaccatcaaaaagtatactatgtatgcagatgacaagcctatgaaaagttgttcaacatcattagccattagggaaatacaaactaaaatcacaatgagataccactgcacatctattataatggctaaaataaaaaacgcagacaataccgagtactgataaggttgcagaataactggaattctcctacattgctgctggaagtgcaaaatggtacagccaatctggaaaacactttggcggtttcttaaaaagtcaaacatatatttaccatatgatccagcagtactacctgtgggtatctactatagaggaataaaaacttatgttcatgtaaaaatctgtagatgaactttatagcagttctattaatagttaccaaaaactggaaaccacccagcagatgaatgcataaactgtaatacaatcatataataaaatactactcagcaataaagggaactattgatacatacaatttggatgattgtcaaaggcattatgctgaataaaaggattcagtctcaaaaggttacatactgcatgattccacttatacaacattctcaaaaacaaaactatagtgatgagaatagaatagtggtttccaggggataggagtatgcacaggggtaaggtcatggggatgtgactataagaaataacgtgagggagttttttagtgatgggactgctctgtatcctgattgtggtggtggttatatgaatctatacatgtgttacattaatagaactgtgaaagcttccccccaacccaccaaaaaagggtcaaatttactgtatgattttttttttatctgaaataaaaaccccacaggaaaaaagtactcgttttaaaatagaagttcaagaagtagaacagtttcttctgggctgagaaaaaaattaaaggtttcatgaaggatgaggtatttaaaaaatgtatgttacaggtacagactgtaatacttgttcacaatctgtcttctctgatagactatgtataatgagggcaggagcagcgtctggcttgttcacctctatataagcaataattaaagcagtactttgcacacattagggactcaatttatatatgattgatctattgcttgtgaggccgggcgcagtggctcacgcctgtaatcccagcactttgggaggccgaggcgggcagatcacgaggtcaggaaatcgagaccgtcctggctaacacggtaaaaccccatctctactaaaagtacaaaaaattagccgggcgtggtggtgggcgcctgtagtcccagctactcgggaggctgaggcaggagaacagtgttaacccgggaggcggagcttgcagtgagctgagattgcgccactgcactccagcctggatgacagagcgagactgtctcaaaaaaaaaaaaaaaatgtatgttagaggtacagcctgtaatacttgttcacaatctatcttctctgacagactatrtataatgagggcaggagcaatgtctggcttgttcacctctatataagcaataattaaagcagtactttgcacacattagggactcaatttatatatgattgatctattgcttatgatattaataggcaaagatacaataacattctaggaaaagtgaaaaacattagaaaataccttaaattttcatttcctctcctctttctaaatccctcctatctcttcaaggtcacttaaagttcagttacagaatcaggttcccctgattcttccagcccacattcatttttccaacttgtccaaacttgctctaacactgtcaaacttaatctaacattttagtgtagtactacttagtattttaaagactatgcctcatttcctttaatagttattaaaatgtgtcctctttttatattatttaaattttaaaatacattatattacatgagtaaaaacaaatcaaagcactacttagcttcaaactaaacttcattccttcagtcctccaacagattttcatctactttcatctacatcctctaaattggtcaagccttcccctcctcttctgtttccatattcacatcattagtttaatgcttaatgactggcatttattaagatttaatattattccctaacaggttaacatgtaactcatttccttagctttcttgtcctgaggacagagatgacacctactacttatttattttaactaattaatatgtaatagatacatgctaattggatgtccctgtgtactattccctagcctagtctactcctatttttacttctctactaagaaaaaacttttttttcaaaagccaattctggatacttttgtaatggatatttaaaaaggcagagagaaatttactttttagtaattccgcatactatatcagaaattgccagaaagcttacaatactggcattctggaacgatttcattttcataacatgctgacattagcctgaatcagataactgaacttaagctggccttgaatttaacttgcttactcttgtattcaattggaaaggtaagaatacaattaagaatatgtattaaatgttgaatatttatcaactgtgtctaaaagaagttgaaaaatatttaatttttgagaaatggaaccatactccaactcctttatcatatgtaagtcttttttgttaaatattcatatatatttttagaaatgtattgggtgaaaaaaaaaaagtactcttttttttttgagtcttactctgtcacccaggctggagtcagtggcagatctcagctcactgcaacctcagcctcctgggttcaaacgattctcctgccttagcctcccaagtagctggaactacagatgcacaccaccacacctggctgatttttgtatttttagtacagatggggtttcaccatattggccaggctggttcgaactcctgattttgtgatccgcctgcctcggcctctcaaaatgctgggattacaggcatgagacacagcacccggccaagagcacttattattatttatttatttatttgagacagagtctctctctgtcacccaggctggagtgcagtggggtgatctcagctcactgcaaactctgcctcccgggttcaagtgattctcctgcctcagcctcccgagtagctgggattattacagatgcccgccaccacgcccagctaatttttttttttttaattttatttttagtagagacggggctttcaccaggttggccaggctggtctcgaactcctgacctcaggtgatccacccacctcagcctcccaaagtgctgggattacaggcgtgagccactgcacctggacaagagtacttattattaaagtactttgttattttttgtttttttgttgttgttgtttttgagacagtctcactcatgtcgccygggctggaatgcaatgatgcgatctcagctcactgaaacctctgcctccagggttcaagcgattctcctgcctcagtctcccaagtagctgggattacaggcgtccgccagcacacctagctaatttttatatttttagtagagacagagtttcaccatgttggccaggctggtctcgaactcctgacctcaggtgatctgccagcctcggcctcccaagtgctgagatgacaggcgtgagccaccgtgtcaggcctacccctcagactttcaataatgattcctagagttcctggctcacacattacctcaccacatgaatctcatctatatcctctraatcaggtccactatttgctttatttttcctcaaatcattacagttcttttttcccccagaaattaagctaggctgagcatcaaagataggctttataagactacgtaaagatagcagggctaactttgaatgctcttaaacttgcaaactcatgaagactcattaggagaagaagacttagtatccccattataaattagaatatgttctctaataagaatgggtgttggctgggggcagtgtctcatgcctgtaatctcagcactttgagaggccaaggcaccaaatcgcttgaccccaggaattttagagcagcctgggcaacatggcaaaaccccacctctacaaaaaaaaaatatgaaaacsagctgggtgtggtagcgtatgcctgtagtaccagctactcggaaggctgagatggaagaatcacctgagcccagaaaaacaaggctgcagtgagctgagagcaccactgcagtccagcctgagtgacagagcaagactctgtctcaaaaaaaatgggtgttatatgcctgaatatgcatatagccatagtgtccaatacagtttgccaaaagcagtcttagaagtcataaaggacctaacacagtgcagagaaatataatactatccatctctctaataaataaaataatatgctcaccctctggtggccaaaatgggaaatacacatccattttcttggattatatccaaaatattagtgtagtatataatatattaagtttctgcttcatatttaacctaaaccaaaaagattttaaaaggccactgacttttttaaaaaaaagtctaccccaatatctaatataaaatcaataaaattactaaatatagtaatttaagaatatgtcatgactcatatatatataacagtacttgatacttaaactttaaatttgttttaaaatattagaactataaaactttaaagttggaaggagttacagtgatcatgtaagtctataatttaaaactgcatgttagataattagtttttttaatttgctaatgaaataaaaacatctgggtaaacagaactgaatagtaatgagacttaatttttatatttctagttttaatttataaatatgctaaagaattcagaaatattcatacatgtaaattcattttaattttccactcattttatccaactatccttccaagagagaatatagtatatactttctgccccgctccactacctctcagcaagctgaactcrctgccttaactcgagacctcgctctcgcaaaaggactaygcgtcaatatttatactgactgtaaatatgccttccatatcttgcaccaccatgctgttatatgggcagaaagaaatttcctcactatgcaagggtcctccatcattaatgcctctttaacaaaaactcttctcaaagccgctttacttccaaaggaagctggagtcattcactgcaaaggccatcaaaaggcatcagatcccatcgctcaagacaatgcttatgctgataaggtagctaaaaaagcagccatcaaaaggcatcagatcccattgctcaggacaatgcttatgctgataagatagctaaaaaaagcagctagtgttccaatttctatccctcatggcagttttcttccttctcatctggctactcccacctactccctcactgaaacttccacctatctcttcccacacaaggcaagtggttcttggaccaaagaaaatacctccttccagtctcacaagcccattctattctgtcatcatttcataacctcttccatgtaggttacaagccattaagccygcctcatagaacctctcatttcctttccatcatgggactctaccctcaaggaaatcacttctcagtgttccagctgcaattctactacctctcagggattgttcaggccccctcccttccctacacatcaagctcggggatttgccccagcccaggactggcaaattgactttactcacatgcctccagtcaggaaactaaaatacctcttggtcggggtagacactttcattggatgggtagaggcctttcccacagggtctaagaaggccaccgcggtcatttcttcgcttctgtcagacataattccttggtttggccttcccacctctatacaatccgataactgaccggcctttattagtcaaatcacccaagcagtttctcaggctcttggtattcagcaaactgatggtcttttaaaaaacacctcaccaagctcagccaccaacttaaaaaggactggacaatccttttaccactttcccttctcagaattcaggcctgtcctgggaatgctacagggtacagcccatttgagctcctgtatggatgctcctttttagtaggcctcagtctcattccagacaccagaccaacttggactgtgccccaaaaaacttgtcatccctactrtcttctgtytagtcatactcctattcaccgttctctactcataaatgccctmctcttgtttacactgccggtttacacagtttctccaagccatcacagctgatgtctcctggtgctatccccaaacggccactcttaactccctcttaaagtaaacaaataatctttgctggctgggctatgctgaacctccttgggcactctctaattggatgtcctgggtcctcccaattcttagtcctttaatacctgtttttctccttctcttattccgtttagtttttcaattcatacagaactgtatccaggccatcagcaataattctataagacaaatgtttcttctaacaaccccacaatatcaccccttaccataaaatcttccttcagcttaatctctcccactctaggttcccacgccacccctaatcccactcgaagcagccctgagaaatatcacccggcattatctctccataccacccccaaaaattttcgccgccccaacacttcaacactattttgttttatttttcttattaatataagaagacaggaatgtcaggcctctgagcccaagctaagccatcatatcccccgtgacctgcacgtacacatcgagatggccggttcctgccttaactgatgacattccaccacaaaagaagtgaaaatggcctgttcctgccttaactgatgacattaccttgtgaaattccttctcctggctcaaaagctcccccactgagcaccttgtgactcccgcccctgcccgccagagaacaaacccctttgactgtaattttcctttacctacccacgtcctataaaatggccccacccctatctccctttgctgactctcttttcggactcagcccacctgcacccaggtgaaataaacagccttattgctgagaaaaaaaaaaagaaaaagatttcctactaaataagaacaccacacaatgaaagcattatttataktttaataataaagtacataccatggacataaaatgaaaatgcatataaattgaatagattattatttaggtacatcagttaagtagcatttagytgtttaataaataacagactaaatctgaaataattcttagtttggtaagttctaagtataattatttaagaaataagagaatatatacaataatatatccattcttgtcgttcattcaaaggcattacatgttgacaaacctgcamataaaaatagaaagcttttactctctttttatatattgttacttttggctaatttttaaacaggacaacatttctaggccttgtataagaatatccctgtacagataaaattctacaatatttgtccttagcagagactagcaatctatgatctgaggtctaacaggataatccagtctaaattctaccctaacatagtagctgtcagttggtgtgtgtgaatgtgggtaaagaagagtggtggaaagaggagaaaatatcctttccttgctaaacctagagcgttttctaaaatcttaattggagaaacagaaaagataatctctttatcctgttctggaatgttttaggattttatggacagtatggagaaagaaagggtaagaataggaagctttttcctttctcccttcacttgcccagtaggtagctctattgatctgtccctgcctttgaacccctggctaaatcagaaacccagagttctgctaacaccagaactacagctttttctagctcttgacttacttgcttatttaaaactcagaggcattgtccctctcaggatactttagaaaatcttaataatgcagataaaagcattttgggttatcaaaattattgttactattaatactttacatttctatatgatgtaaaaagtactttcatgtacatacatcattttatttttatccttactttaactttgtgaagtacataaaactagtgatattatctttttttttttttttttttttttgagacagagtctcactcttgtcgctcaggctggagtgcaatggcgtgatctcagctcactgcaacctccacctcccaggttcagattctcctgcctcagcctcccgagtagctggrattacaggcgtctgccaccatgtccggctaatttttgtatttttgtagagatggggtttcaccatgttggctaggctggtcttgaactcctgacctcaggtgatccacccacctcggcctcccaaagtgctgggattacaggcgtgagccaccgtgcccggcctagtgatattatcytaattttacatttagagagactggaacatagaaataaatgaacttcccatagtcactcaaccaaacagtgacagaactggattagaaccaaagtctcctgtctctgagtatagaatgatactgatacaaatatcatacttaaaataattttccactccattttatatttacattttactcatagcattaatagcaaatttttttcaaagayataaaacaaaaggctttaattagaaaataatacattaccattgtagatttgggtcccacttctactgcaaatatgttgagtcctctgttgtttatgcagtttttacttagctcattgctgatgtgaataatcactttctcatctgactattaaaaaaagatttcataagctgctattcctttctttaataattacagacaaatataagcctcagaataaaccctgaaattctgttttaacatcatatagtgcactacaaattcatacaaattggctacttctttcaactttgttactttttctcattgattttctttccaatctgtcaccatttatataaactttttcttttaaatgtgacttaaacttacttaccttttaatcttcattcccagggtattatggacactagggtcacattatttcatccttgacttatgatagcaatagtgtctatttcttttgttgttatctctagttttttcaacttccattcattttaatactaccttccaactaatatgtctaaaacatctttttactccttcattgacaatatataaacaaatatatttattatcaactttgtatcaggcattgttttagggtctaggtgcactgagataaaagatagaattactgactcctagctcacactctaggggagacagacaaataaaatgacaattacaaaacactttgctgagtcttgtaacagaggtatttagaaggatctatagaaacacagaagatgaacattagctcggactggggtttcaagaaagactttatggaagaagtgacaactgagataaaagacaatggcctctaggatggatagggagcaagggaaagcagaatgacactgataaatggagaaaatgcaggaataaaaatattcccctactaagaatctgcgatcataccctaatgactataaagggggtagtataatgttagactacctgaatttatttgtcaactcttctactacttagctgtgtaatcatttgcaagttatttaactgctctgtgcttcagtttcctgtttgtaaaatgagaatagcacttatgtcatagggttgttgtgagaagtaaatgctctaatatatgtaaatgcctggcaaacaataaggtctaaaatgttcacattattatcacattttggtgaagagagttgaattttccttgaggaaaaaggaggcagagaattgagaactaataggtggtagcagaacagaggggttggggtaacgtagtaactcccttcacctttttaaccctaataaaacatagagggcagaaagggaaccatgatgcatcttaggaatcaccctctgaggcatgattggtccatttgaaaactgcaatctactaggtggggacccaagcttagttaatcaagtctaaactcctctatctcgttttcaagataacatatataatttggatccattctgtatgttatttacctcctaatcctcctccaaataaagctgtctattgctgcaaagcagatattctcactctttcctttatacttcatatatacccttcgccttgtttcgccttacactgtttcccctgcttctaaaggctgtctgtctgcatatctaaatcctagtcatccttcagtgctyaaatcccatatcacagttcccttgcccctcgtaacaaatccttccccaacytctatggtccaaattaacaacaactacaagagaaacagaataaaacccctattgcacacacaaacagtactacattatgtaacgtttaattattctctgatgtctttcaagagtattaattttgtctttccaattatagcccataaactccttgaacgcagagatcaagttttacactttctggttgctcctattgtgactaaaatagttacataatatattctcaggttgactaaaaacgctgccacatcttaagtattttaagaaatttatggcaggcataaaaatatgtctcacgtaggacctaaaagaaataagtcaacagtactgagcacctagccatcttatataaagttttatgaaaatttataatttctagagaactggatatttctgactaagaatttatgctcgtattctcttgacctgtaatatcaatagtattaatagcagggaagagagccaaaggtagaaataatcagcttgatgaaagcaggtcttgggacagtagaatacatttagttatattaaataataataatttataggatctctgcaacgttagtgtaaaacgctgggttgaaatttttcctttgcttataatatttctttaaaacatgatatmtattattaaaatagctatgtatacataaaaacttttagaaacaaactaaataawatactttgtacccagattgtgctctatattcactaatatccaaatgtttaattttcctaatattttaagagaaaaaattggaaacctttaaaaatcatataaaaattaccactcccagtttgagttagaaacctgaggagaaaaaataattatgcattataaacattattaatgtgatgggatacttaattaccacatacgaatagagtaaggaataagatgaaatatattagtaagctttgtagcaaaatgaggaaaaccacctcataattgataccttgttttcaataactgacgttatccaggtgtcacaactgtaagtatgcacgattatattttcatagccatccattactttggcatcaccgttgctaagaacagatttacaaatggccttctcaagttgtccactacatgcctccatatggacagctttaatttttggcttgcatttttctgcatagatatcaatgacaaatggacatgcctgataggaaaaaaaaatcttgtttcagccttttgatagaattttaaataaattattaatatgttaccatataagaagatatgctataccttctagcttgtccttctaataaacttttagaggaaaattttagtactatgaattgagtaataagcaagcatgaaatcctgactttttggtagcatattaactgataatgttcatagaaaataaaagaaaataataacctctagcaaatcagtaatataccaccttctttaaaccataataccatctcttcatttggttcaatgctaacaaataccatgttatttaattttcttttctaaagtgagggttacagaaagaattcatcaaaggtttctacagaaattattacatttacaattgaagcttactgcatggatacagagcactgactaaacgtttagtctaaaaacacctttaaaatatgagacttaaaaatattttctgcattccgaatgaaatttttctaatatctaccttagtctttttaccacagcctacaatgtggtaaaaagccaatgtggtaaagagcctttgcctctccatccaacctggtctcctgtgtctctatgcaacagctatcctgatctttcagatcctagagcaaatgaagcccttcatacgtagtgttctctccactgggaagattatccttatgtattttcacataggtaccttgtcttcctgcttcaggttaaagcttaagtgccacctctgcagagggatctgctctggccccccaatctccctcactcccccactgttctctgttctctacttcagcctttgagttgtttcaaaacacctttgaaataattttttttttttggagatggagttttgctcttgtcgcccaggctggagtgcagttgggtgatctcagttcactgcaacttctgcttcccgggttcaagtgattctcctgcctcagcctcccaagtagctgcgattacaggtgaccaccaccacacccagctaagttttgtatttttagtagagacaaggtttcaccatgttgaccacactggtcttgaactcctgaactcaggtgatctacctgccttggcctcccaaagtgctgggattacaggcgtgagccactgcacctggccgatataattttattttaattaattaatcattctccttcatgaaatataaatttcataagggcaggaactttgactattttattcatctttgtatcctcagtgcctctttcctgcagttatcacatagtaggtattcaataagtatttgttgaataactgaataaattcacaaattggtggtcatcttttaagaaaataaaagaaagaagtctgaagttaattttagtagactataaacagaaatttgtgttttaaaaaatattttaataatataaaataaataaatataaaataaaataattataaaatatttgtataataaaaatattttaatcacttcaacctttggcaataataaatttgcctttttaagagaaatagtagaatgaaaaatcattggactaaaaagtagaagacctgggtttatttttcatacacatcacctttgtaaaaatttttaaagattatttataataattatgagtatggcatttttaaaggtttatttgttcagtactggtaaattctggtaatattctgccattttttaagtcatgrytatcagttttattcaaccaaagaggatcaatatttgaatattcactgaaagcaaaacatcttaaaaggtccatgttaaaacatattctctaattttttttctttttttttacacttttaagttcaggggtacatgtgcagatttgttacacaggtaaacgtgtgtcataggagtttgttgtaagattatttcatcacccaggtagtaagcccagtacccattcgttatttttcctgatcctctccctcctcgtactcttcaccctctgataggctctagtgtgtgttgttcccctttatgtgtccatgtgttctcatcatttagctcccgcttataaatgagaacatgtggcatttggttttcagttcctgcattagtttgctaaggataatggcttccagctccatccatgtccctgcaaaggacatgacctcattcttttttatggctgtatagtatcccatggtgtatatttaccactttttctttatcctgttttccactgatgggcatttaggttaattccatgtctttgctactgtgaatagtgctgcaatgaacatacatgtgtatgtgtctttataaaacaatttacattcctttaggtgtatatccagtaataggattgctggattgaatggtatttgtctttaggtctttgaggaatcaccatactgtcttccacaatggttgaactcatgtacactcccaccaacagtgtataagcattcctttttctccacaatctcaacagcatcttttattttttgactttttaataatagccatttggacaggtgtgaaatgtggttttgatttgcatttctctaatgatcagtgatgtcgaactttttttcatatgattgttggctgcaggtatatcttcttttaaagcgtctgttcatttgcccattttttaatggaatttttttcttgtaaatttaagttacttatagatattggatattagacctttgtcagatgcatagtttgcaacaattttctcccattctgtaggttgtctgtttactttgttgatagtttcttttgctgcacagaagctctttaattagatcccatttrtcaatttttgcttttgttgcaattgcttgtggcatcttcaccatgaaatctttccccatgcctatatcttgaatggtattgcctaggttgtctctcagagtttttacacttttgggttttacatttcagtctttatcttaaaatttttttkttgttgttgtttttttttttgagacggagtctcgcactctcgcccaggctggagtgcagtgatgccatcttggctcactgcaagctctgtctcccgggttcacaccattctcctgcctcagcctcccgagtagctgggactacaggcrcctgccaccatgcccagctaattttttgtatttttagtamagacggggtttcaccaggatgaagccaggatgttagccaggatgtcttgatctcctgaccttgtgatccacccgcctcagcctcccaaagtgctgggattacaggcrtgagccatcacacccagccctagttaatttttgtatatggtgtaaggaaggggtccagtttcaatcttctgcatatggctagccagttatcccagcaaccatttattgaatagagaatccttttcccattatttgtttttgtcagatttgtcaaagatcaaacaggtgtaggtgtgcagtcttatttctgagtgctctattctgttccattggtctatatgtttgttcttgtaccagtaccatgctgttttggttactgtagccctgtagtatagtttgaaattaggtagcatgatgcctccagctttgttctttttgcgtaggattgccttggctattcgggctctttttttggttccatatgaattttaaaattttttttctagttctgtaaagaatgccaatggtagtttagtgggaatatcattgaatctataaattgctttgggcagtatgaccattttaacgatattgattcttcctatccatgagcatcaaatgtttttccatttgtttgtgtcatctctgatttctttgagcagtagtttgtagttctccttgtagagattgctggcctcccttgttcactgtactcctaggtgttttattctttttgtggcaattatgaatgggagttctttcgtgaattggctcttgacttgactattgttggtgtataggaatactagtgatttttgcacattctaaaatttttaaattaaaatcttatcacatctaaaagaactgccctatagttttattttttcttttcatgggcttgatcttttatttacttattttctttatcctactaacttaatataggaagcaaacaacaagcaagaaaactattaactgtaaattattcattgtaaaattattaacaatatatgtgataaggaagayggggaagactgcaataataaaacctagattatgggatgttacttaaatttagcacaatatttagctctcaactacctgttaacmyatacaaaagggaaataaaaagttatgtagtgcttaaactctaaaaaagaaagtaaattttcccagttctgaatctagaaagaaattaatatcatgaaattctattttaaaaaggaaaacagaaaaaaaaggggggcaaaactaaacatgtaagtttyacttctcaaattcagtaaaagagcaactattcaattacagtatataggggcaatgcccttataaagaagttatattgctctttaacagaggatcttcataggctgatacagggaatgtgtaatcagtaattctacagcctaaattagagaatttaataaggaaaaataaagaaataagtaataagaatktaataagaaacaataaagaaatttagtaagaaaaaagattttaaatctgttcaactgatgaggaacagctccacttcaattaacacacttatgttaggcaaccagtgtcagctcctcagttttgaaagtcaggcaatcagagatggattcacatcagtaaatacactgcttagtgccaaccaatcaacagtctcatccaagtaaccatgcttccccagatagtattaactcatttatgcctctaaaagccaggcaatccttgaattccatacctccccaaaaccctatataaatgagcattctgctcttagccgagagactgtgcctgatcagcatagctctcctttatagtaagcaatcaattcagctttgtctttttatttcagttactgagtggcagtctcatcatctattgatactttccaatgtatactgtattttttttaccttttgaatttaaatgatacaaataacctactcaataaataaatgaaatttaaattaaattaaatgttagctcagaaatccttcttgcttatagtttcaaaggtaaatgacatcagtaactgtggtaaaaagtcttaaattgctcttaactaatttccctaataagcaacaacatgggtagcacaatcaatattgttcctagattagatgctgattttacacatggttaaaatgtgggagtcactgactgttaggctcaagtaggatataaatagttaccataactattcacctcctatttctaaaaatggggaaagaatagagaacctctcaccaaacaggttaatgaaggttttgaatgatgtcaaaactaggaattaaaccaaagtctaaatgtatctaaaataaaatttgtcaaagttagtattgccctcctaagttgattcaagtatggaaaaaggacaaatactatttttaattttaagagtataaacaaatgtactgttatgtaacttgtggcctgaaactgaaactcttaaattctatattttaaatctgacataaaatatagaaattagcctgggtaaaacagtgagacccccatctctacaaaaaaaaaaaaagttaaaaaattagctgggcgtgggggcatgcacctgtagtcctagctactcaggaggctgaggcaggaggcttacttgagcccaggaggttgaagctgcagtgagctatgattgtgccactgcactccagccagggtgacagagtaagaccttgtctcaaattaaaaaaaaaaaaagttttakatatatatatatatatatatatatatatatataaattaagaaggcctaatttttaaatttttattacccctatggtttattacgagccctgttcaacttctatacctatcatgttaatgataataatgatgataatagctgatacatacacaatgctttgtatgagccagccactgttccaagtgttttacaagtattaaccccaaaagtaccctttataaaaagaccagaaatccaagttctaatgcagacacaktctccttattctaagagagcctttaaactgttaagacaaagtgtttccctatagaaatgagactttagtaactcaaactgccttttccaattttaatttttttaataccaaatttttttcctgcatattatatgcttagactcttttgtctttgaattattttaatgttggcagtaactaaatttcaggtgagaacaagaacttgtataaactaacagaaacatgttgttgcacccaggattcattcatatactaaagttcaaagatttgggtgcccaattcgaaagttatatgtcaggaaaatgttcataaagtaaaatattatgtacattaaacccattggcaaaagtttaagaatactttacctctgtcaactccagagctttattgtagcccatagagtgtagagttacccaaaggtcacaaggatctccttctcgatcattagcttccattagattcaaatccataaatccttgtcttgttagttcattcctctttgtatcaaaattctctgtttaaacaaccaaaagttktttcttacataatttaaaaattcataactttaataaaatgtctatgatatattattattcatagatatttattttaaaagaggcctatgaatctatgagcaggataaaagtggaataaaaatggctcaaaacattattgagagctattcttctagtttcccataactcagcatagatatatcgtagtacacaatttcatttttcaaaaaatcctaaagttataaatagtgcaaatatattctaaaattagaggaaactgtaatawttctgggtaaattccaatctgcctggttatttagagcatacgttgttatatatttcaaagaattaaaatgcttcatatgtatttgccacttaaagccagcagaaactggatgaatttgatataatactccccaaactactgagtttcagaaagaaaaaygggaatagtgtcatatttaaggagattactatatgcctgattcctctaattttagctaaattgtccccaagtcttgaaagactgacagataatggggagcactttggaatccatgaatcaactacattttcccaggtaagtctatgcctgttttaacactatttatgagcaaaactaaatttacctagaagtatctagacatgcataattcctgaatttgtctgtaacatggataataagtcgttatttattatggatattttgttagctatcctacaacagggaagattttatttcctaacttccatctataatatatccaagggaaatgggtagtcttatttgagatggcatctcttttgtgtgcattattgtgagaaaagcagcagagacataactgtgtaaaaccggttgactgattaatagcttaaaacatttagaagccgggcacggtggctcacgcctgtaatcccagcactttgggaggccaaggcaggtggatagcctgagctcaggagttcaagaccagcctggccaacatggtgaaaccccatctctactaaaaatacaaaaaataaaattagcccggcatgctggcatgcacctgtagtcccagccacttgggaggctgaggcagagaatcacttgaacctgggaggcggaggttgcagtgagctgagatcgtgccactgtactacagcctgggtgacagagygagactcagtctcaaaaaaaaaaaaaaaaaaaaagttaagagtttaaagttattcataactttttcaaggggaaaaaataaatgcagattaaattcaatcatgaagagaaatggtagccacaaaaatcgaggttagagctactatgtagaaacgatgaaaaaaatatttgacatataatacaaatacattaagaaacctatctagatactgtactatagagactatcaaaaacraatctactttttaaaacttaaaattctcaatcctcattaatttttaaaaaattaacacttgggccaggcgcagtggctcacgcctgtaatcccagcactttgggaggctgaggcgggcagatcaygaggtcaggagatcgagaccatcctggttaacatggtgaaaccccatctctactaaaaatacaaaaaattagccgggcgtggtggcgggtacctgtagtcccagctactcgggaggctgaggcagaatggcgtgaacccgggaggtgaagcttgcagtgagccaagatcacgccactgccctccagcctaggcaacagagcaagattccatctcaaaaaaaaaaaaattattaacacttgactccaagacttactataaagccacagcaatcaagacagtgtggtaatggtgaaataatgatgaatagatcaatggaacagaatagagagcccagaaatagaccgacataaatatattcaactgatatttgacaaaggagcaaaggcaattcaatggagaaaggatagtcctttgtaaatgatattgtaatggtggatacatgatgttacatatttgtcaaaacccatagaactgtacaagacaagagtgaaccctccaggggtttgagaccagcctgggcaacatggtgaaactcatctcaacaaaaaaatacaaaaattagccaggtgtggtggcacacacctgtagtcctagctactcaggaggctaaggtgagaggatcgcttgagcctggaggcaggggttgcagtgagttgagattgcaccactacactccgtcctaggctaacagtgactcaaacaaacaaacaaaaagactgaacctaatgtaaactatgaactttagttaatgattatgtatcaataattcactcatcaattgtaacaaaggtatcatacaaatgcaagatgttaataatagggaaaacttgtgggtgaggaggaatatatggaagatttctattttttttttttttttttttttttgagacagagtctcactctgtcacccaggctggagtgcagcagcatgattttggctcactgcaacctccacctcccaagctcaagtgattctcctgcctcagcctcccaagtagctgggattataggtacctgccaccacacttggataatttttgtatttttagtacaagtggggtttcaccatgttggccaagctggtcttgaattamtgacctcaagtgatccacccacctcagcctcccaaagtgctgggattacaggccaatttttttttttttttctttttaagagacaatttgctctgttgtccaggctggtcttgaaatcctggcctcaagtaatcctactgccttagccttccagagtgctaggattataggcatgagccacagcacccagcctgttttttctgtaaacctaaaattgctctaaaaataaagtttattaggaggcagtgcttgcagtgagccragatcacgccactgcactccagcctgggcaacagtgtgagactccatctcaaaaaaataaataaataaataaacaaaataaagcttattaataaacaaaataaaaataaagcatctttaagtgtaaaaaaagtttattaaaataatcttacagataaacagtacattttcttattattcaggggaaacattaaaaccttaaaagctctcatttctttgcaatattattaatgttggtaaagtagacattcctccaaatcatttttcaagtcaataactcttggagactttttgatagcattgagttcaaagttctggagcctatctgtgaaactttcttgctgtgtagccttggtcaggttacttaacctctaattctatttcctgatttataaagtgagaataataaagtactacttcatagagttggtgtgtagaagtgcatagatcagcagctggtacatggtagatggtaagctatcaaaaaatgttaaccgtcaactctgccaattcaattaaaattttaaattagaattttacttatcacaaactttaccatcagaaagccacaaattcactcttatggaatgttctctagtgccaattaaaagattatatcattaaagttacaagataattacatcttcctataggtaatactctattatgtatattatgaattttattaatcacagtttaatattataaatcaatatacatgtattgctgttgattatattaactttcagctaaaatagaaatactgaaagattcctttatataaataatatacttctctaccctacttgctgtctaggtaaacagactcccaacctggctcactttgccaagcttagaccattttaagacccacatatagctatcccagtgaaagcatacgtgagttaatctctcttgactgaattctggtctcctcatacctcttgttctgtgatctatagttggctatggctttttggttttccctcgaccttggggtctttggcttaaatatgcaagtatgtcttcccagactccttctaagtgataactgactttgcctcattctcagtgattttctttgtccatcttggcatttttggcttcaatatttccataaatggactttttaaattcaactcaaatacgaaaagcactgaagaatgtttaacatgtataatataagcaacttcctggaaaccttaatttgtgagtaaaactctagctttttggctttttgctgccctctcctggtcacagtttgtggttcttgaccacttcaggcccagtggtatcaagygcaaggacaagttttttgtcttctaaaccccgaagagtagagaatcaaaactaaaattatgattaagtaattcacactttcttttaacttgagtattataccaactatcggtttaagaaaaataaatgtttaagtttttatgatctacaaacaatactactttcaaactgtcctaaatgctataataatatttcatgcagaagtttgacttctcatttcttagagatgaaaaggtgctatatatatatttttatacatctgttaaggaaaagaaaagtgcttacctctgcagacagcccaagcatcttcatcacatttctcaccacttgttctcaattcaaaaaaattatattcttcaaggctaagaagaccatttccatctaaatcaattacttcaaatatatctgataaagtagacctaaaattataaaaatagctagttatttcttgtcactaaggcaactacgctgaagaagggttttttttttttttttgagacggagtctcactctgtcacccaggctggagtgcagtggcgtgatctcggctcactgcaagcaccgcctcctgggttcacgccattctcctgcctcagcctcccgagtagctgggactataggcgcccgccaccacacctggctaatttttttttttttttgtatttttagtagagatggggtttctctactaaaaattttagccaggatggtcttgatctcctgacctcgtgatccgcccgcctcagcctcccaaagtgctgggattacaggcgtgaaccaccgcgcctggctgaagaagggttctatgaggataacattcaaaaggaagtaatatagcgttacacaatttctgtaaactataaagttaatgtaaccaaatacagttttggctcagtccagtattacatgagataaaaaagcttctagaacaaccacagtatctcaacacacagtaagaactcaatgaatagtagtagttcccttcttttttcctttctccaatctactttcttcttcctctctaccaatagggagaaattgtcgatgtttgactgaagttgacttgccaaatgtgtagaacccacaagtaaatgaaaatcccagatctgcaaatggaggaacattttcagatgcctagagaatgagctgttttgttttgatatatatatttatggtgtacaatgtgattttttgatatatgtagacaatgtgaaatgactaaagctaattaacatagccattatctcatatatttatcatctttttttctagtgggaacatttaatatctattctcttagcaattttcaaggatacaatatataactataatcaccatattgtcaacagatctcctgaacttattcctcttatcaaactgaaattttgtatcctttcaccaacatatccccaacccccccactacttccagctgctataaccactcttctactctctgtttctatgggtttgactttttaagatcccacatataaggctggatgtggtggctcacacctataatcccagcactttgaaaggttgaggcaggatgctcgcttgaggccaggagtttgagaccaccctgggcaacatagcgagactcccatctctttaaaaaaattagccaggcatgctggcaagcccctgtaatcccagctactgctactcaagaggctgagctgggaggatcacctgagcccaggattctgaggcttcagtgagcaatgattgtgacagtgtactccagcctgggtaacagagcaaaactctgtctctatttaaaaaaaaaaaaagttcccacatataagtgagatcatgcagtatttatctttctgtgcctggcttatttaacttagcagaacatcctccaagttcatacaggttgttcacaagagttgaattggtgaattagaatctgaggatgggggtgggagctggccaaagggagtaacacaggctattaatatctatccagtctagatgttataattctaacattaataaacaaaacttacttaaattcctttgtaaggaataattcccctgtttcatctctatatacaagttgggcttcatctgttactggttttatttttttcctcagcytacagccagttgtggaaggaattaaccagtaaattccaggtcctagttcaccagtccatccaaacaccttttctcaaaacaatgaaataaaacaatcatcagtcttaatcttttcatcttttaatttaaagcttttaatatttcttctgaaagggacacattagaaatgatttttaaatcaatatttacaaattctattatagtcctatcagtctttttacaggtttcaaattctttttgttaatggtaatcccattatgagatcattagatacagcagttctttatatatttttgaaacaaatgcctaaaactgtaataggtaagttatatatcttctaaatcttccccaacaatcttcaaaaatatctgtgatgcaaataccttcaacaggaagcaaagataaatcgtagggtaattttttaatgcaaatactgagctcctttgaaaaaaagtaataatattctagattatggtttcctaatttgattcaaatatatgatatctaaatcagatttcaatgacataaaataaaaattaaatatattttgaaatggtttactatttgtataaattaatcacatttgtaagagctcaattatgtggatgaaagcactggaacttcactttttttaatgtaatatggactataaaataagacacagaatcccaaataaaccagctttatatgaaattctgtttcctatcaaatgttggatatttatcatgggtaccagaacatttgtayaggaaaacattttattctccagttctataaagaaagcaggctgggcatggcggttcacgcctgtaatcccagcactttgggaggccaaggtgggtggatcatttgatgtcaggagtttgagaacagcctggtaaacttggtgaaaccccacctctactaaaaatacaaaaattagctgggcatggtggcgggcgcctataatcccagctacttgggaggctgaggcaggagaatcacttgaaccyggaggtggaggttgcagggagctgagatcgtgccattgtactctagcctgagtgatagaacgagactctgtctcaaaaacaaaaaaacaaaagaaagaaagaaagcaaatggtatctctctatgtacctcctaagagctttttggagcccaaaggtttcctataaaagctagcagctgtctctgttaaatatattaaatctaaacaattcttagttgtgtgtaatagctaagtgcccttcagcacagactaacccaagagaatcctttcacgtattatgtccaaaaattccttttaaaacccaggtataaggccagacacggtggctcatacctatcatcccagcactttgggaagccaaggtggaaagattgcttgaagctaggaattggagaccagcctggacaacatagcgagatcctatctctaaaaataacaacaataataataatgcatctatagtcccagctacttgagatgctaaggcaggaagatcattttcacccaggagttcaaggttacagggaattgcatcactgcactccagcctgggcagcagagtgagaccctatctctaaataaataaacaaacagacaaacaaaaaccaacttaggtatattttaggtcattctggagactcatatatgaaataatgttgctcatctaagttctgggtttagttccatttctgccctggcaactcagagaaatcataatcttcttaaggtcaccaggtcctattttgatacaagaagaaatccaatataaccgaaagtcatttttaagactaaatgttggccaggctggtggctcaagcctgtaatcccagcactttgggaggccaaggcaggcggatcatgaggtcaagagatcgagaccatcctggccaacatgatgaaaccctgtctttacgaaaaatacaaaaattagctgggcatggtggcacacgcctgtagtcccagctacttgagaggctgaggcaggagaatcacttgaacccgggaggcggasgttgcagtgagcaagatcgcaccactgcactccagcctggcgacagagcaagactccgtctcaaaacaaacaaacaaacaaacaaaaatgaaatgtttaccaaatccatcctttgaaaagcataacctttgaaattggctagatgtagactcaggagtgaaaaaccagatcttgctgcttcctaatatatattatcccatgatccttccttatctccacacataaccttgcactgccactgtggatgacaaatggaaagttttttcatgggcacaaaactcatctataagaaaataattgtgaaagtataaatacaaataaaaaatcctttgtaaatacaacatattacagataaacagaagcctataaagaggtaaatagaaactcatgcaaactctattataattttgctatatactaatttttttacacatgcaatctcataagagagtaattttacccaaaacaaagtggaaacagctactgttttagacaatgctttatcttgaacttaactttgtagtcagttctgaagaagagtttagtcaaaacattaacttcagccaattttatttgtttcttgcctattcttgtctgtaaggaagcctacaaaaaagacttttatataacattctatcagggaaatgtttgtgtgtcattgagcctatataaagattaaatatgataytgtagtaagcccttaaatagcattatttctgttttgtgtagcagatgtattttgtagtcctcataaaataaatagccacatttatgtattggcttcacatatttggcctctgagtaaatatactattagaaaagatcagaacaaccccatgggcaacatataaaaacatttaaaagcattttttcatatcaatctatttttgaaccctataaaataagtcaagcctgaggatagtaatcttaagtttttctgttttgcrgtagtagtataagtaagacaaacgtctacagcagcttttccaaagtcttgaattgcttgcatttagggaaaaaaaatgtactggcatcaaccttttttattgagtatatcaaatgttcacacatgaggcatcagggcatttagaaaagatgaaagtaaggtacaatattatacaacttaaaaggtataagccaagactcaagactgccaaccaatcctcaattctttatttaaatttttttttagagacagggtctggttatgttgcccaggctgaagtacagtggctattcacaggtamgatcatagaataatayggctttgaactcctgggctcaagtaatcctcctgcttcagtttcccaagtagcagggacttcaggtgcatgccaccatgcccagctcctcccatccttaattcttaagaaatcgcagcaaacaagaaaaaatccttataattatttaatttaatttaatatgattaaattaaaaacatataatatctatagtgtttaagtgctgtttataccttaattggaaggtatatgaaagcttaaaaaataaaatacagaaacatactttccccaaactgcagttcatactatatttaaaaattaaacattagaaaataaatatgtatacttctctatttcgtagttcggtaaaacacacaagctgtagatttgcttgactctcattttccttgagaatatacaaggcagtatcaacggataaccaaggggatggttttcctacaaacaaaaaaaaaagcccaaacaccttaaaataagcaatcactatctattctttcctatataaaaaataagttactagtttcttcttggatattttctttagaaatacatattccatgtttttttttttcaagacggagtctcacttggtcacccagsctggaatgcagtggtgcgatcttggttcactgcaacctccacctcccgggttcaagcgattctccygcttcagcctcctgagtagctgagactacaggcatgtgccaccacacccagctaatttttgtatttttagtagagacggggtttcaccacattggccaggatggtctcgatctcctgacctcatgatccacctgcctgggcctcccaaagtgttgggattacaggcgtgagccaccacacccggcccatattccatttttatgtgtaaacatgatagcatttgcaataaggcacaaacctaaatacagcaaccttgtgagaaacattttctatatactcactttctaaaaatcataacttttcttgaactcatcaaaagctgaggttgcagggcaaccaattagcctgaaatccaaggaaaaacagagattttcagaaaaaaaagaggatttaagtactggcttacctgtggtggagcacacgaggaagagatgccagacatctatgtgctgacaaccccaaaatttatatctttaggatctttcctctgaatgttagacccatataactgtgtatttaacatttctacctagatttctatttccaaaactggacttccctagtctttttttaaaacgctgcccatctcagttaatggtaactcagtctttccagttgctcaggtcaaaaatcttggaatcttctttaactcttttcttttctcacataccaagaccaatccttaggaaatcctatggttctgccttcaaaatatacccagaatctctactaccccatctcccaccaacatcctggttcaaagcattgccagtcctcttctagaattctacaataatgtcccagctggattccttgctttctcctgcgtatccttccatctactttctttttttttttttaatgtttcaaatctatttttaatgttgcttgtcgaacattaacattttcacaattccagaaatgacattaataaaaatataaacaaattgatataaaaatctgtgtagactaagctagaatttacaaactcttaataaaaggtgtatctaagtttctcaattatgggacaacaaataatagacttcattgcttcatactaaaatggtatttttgactaatcacaaggaaacttaaactactgtatagttataatcataggtattcagtccaaagaggaaaaaagttttagtagtactatgagaacctgtatctctgaaaatgttagctccataagtgtaagcactcccaaagattrtaagataataaaatgtggaaacaggcaaactatggggcgatttaaagtttctaccacttcctaaagattttcttcaatagaatcattcgtgctaagtggataaaagttacaaattacaaaagaaagatacagaatacatccaataacaaattaatcagactaaggaatatttagtgtaaaactggcttaaaattttttgtcagaagaatttctcaacatctaaccctatagcaaataatacaaataacaaggaaattcttcaagcagttggcatttcttcaaaacacaagggtccaactataagaaaaatatcacattattcaaagtcctacagaattagaggagaatctgtactactcatgttttttgcataaattccatgatttataaataaataaacccaaaatataaattataaacatttaatttcagtataatgtagacaaaaacagcagctaacttgtcatctttcacagtaattttaacataaaaggtttaaatatttattttgccaatatatttttcattgcatataggcttaaaaaaaagacaatggaagttataagtaatcccttgacatgtgtaaaataaaattttttagtagatgggaatgtattgatgatagtctcttatttcttctcccagatatgcaagcgatatatctaaatacttactagagccaaatctgtctcaaaagtttaggtcatttttttttcctttttgatagtattcaaygagaaataacactttaaataaaactttttccatgaggaaggtacagtaattatccacctcctggatactctcctgtagtcctctgagtaagctccaaactcaatccatactccaagtaacagacttaagatgttcaatattggaactctttggcatcaactaaaaaagaaaccttggtaaaagcagaatttacaaacattttgttccttgcagtacacctttcaaaagacatcttcatcaaataggtaagaaaggtaagaattgctgaggtaagtagwggtctcttttattatggtcttcattctatcattattaaaccttaatctcatgtcctgttccaaagcattatgtgagtattcaatcaaagaagtgaggctgttctccagaattggttctctgctacaggtcaaaaccgactgcgccagccttggcgaagckccgcctactgccctttgctccaagtaatttttggcgatttttaaagtaatttttccggcggagtcatagtggcsctatactcttggataggttatcctgtctcttccgctagattgatgagatcaggtatcactcgaaaatggcgccgaaaagtgctgaggctcctcattcaaattcgttagagccaaccctgccttctacctactttcaatacagtaacctaactgctcttgttaaaatataaatcagattatgtcctgccttctactcaaaaccctctaatggagcagagttgggagaatattgctcctttcctaacaataagaaaaagttaatgaactacaaaatcataacttttcttgatcccatcagagctggggttacaggacaactataagcttaaaatccaaggaaagacagatctttcccaggagagacgagatgcaagcactggcttacctgtggtggagcagaacaggaagagatgtcaggtaccatacaagtggaagaagaagaaagagggcagaagaaatatttgaagaaataaggcagaggattttctaaaaataatgaaaggcaacaagccacatatccaagaagctcagagaaccccaagcaggattaataccaaaaaacaaaaaaacccaggcaacagcatcaacaacaaaaacaaaaactacctagacacacagtcaaactgctgaaaatgaaagattaagataaaatcttgaccttatatatggagaataaaactcacaaaaaacgagggggaaacctcatttctctgatcaaaagcccaagtcctaattatggcaaaaagaaacctcttcctgattttgtccttgtttctccctggtttcatctcctacaactctctcctcacttactccatttgagacactctagcctctgttcttttaacaccagtacactctcacagagcctctgcacagagtattctgtctacctggaatactctgccacctcctccactcttcacccatcccttccagcaccatacacccacaaggcttactcccttgccttctgtggaagacagcaaaaatggctgtccccctcagtatctacagccttttgcaatgtgactttgcagcttttccatcaagagatcaagtctatttccccagcctatgaatctggacttgccttgtgactttctgtgagcaacagaatataacgaagtaacattgtgctggttctgagcccaaacctcaggagatcctattgtgccaagagaacaggtccaggctagtttactgaaggattattaaagatcatatgaggctgagtcaagttgtcccagatgggacttcatacgtaagaaagaacycagccaagattagcaaagccagccaccagctaacctgtagctaaccataactgtgtgagcaagccctatagagaaaaaacaagcctggctcagactaagaactaacagatctactgattcatgagtgaacaaatgtttaattgttttaagccactgagttttggggtagttttttatgtagcagttggtaactcatacatctctttcaaagtctttattcatatgacaccttcttaatgaagcatatactaaccactccatttcaatggcaacccacattccctcagcactcactaaccccctttccctctgattttcccataacacttatcactttcctacataccatgtcatttactatttattatgtttattatgtattgtttccctcactaaaatttaagttgacgagggcagggatttttgtctttttttaactctaatgtatcctaaacacctaaaytgatgtctggtatataaggccctcgataactatttgataaataaatgaataaaggaatcttgttaataagaatacagagaattaacaactacactgaatttgcagggytatcttgattcctctctctgaaaaataactattgttattgtcatttaaaagtatcatctgccaaacattataygtatcccacaagagatgcagtgaaaactttcaaaatctctactttaggagggaaaaagaatggggaggtgggaatcctttagtaagaaaatgcttgtatgtaaacattataaaagaaaaataaatattgatttagaacagccaacattaaaaaaggttatctagggaaatcacccttatagatagatatctttcattgcttaaaaattacataaccattttagacactagaaaagtatttttatctagaatattaccatgaatacaaagattattaataaatattgtctaagtcacagacaaagggttttgaaggtatttaaaaatactttcagcttcatattgttccaaattatccccttgcagtacttctctttgacatattaattttaaaaattgacaaatggaaaaagctaagattaattagcaaataaaaacttagttctggctgggcayggtggctcacacctataatcccagccctttgagaggccgaagcgggtggatcacctgaggtcaggagtttgagaccagattggccaacatggtgaaaccctgtctctactaaaaatacaaaaagattaggcgggcgaggtggtgtgcacctgtagtcccagctactcggggaggctgaggcaggagaatcacttgaatccaggaggcggaggttgcagtgagccaagatcgagccactgcactccagcctgggcaacagagggagactccgtctcaaaaaaaaaaaaagttagttctatatcatgaggaaaccagttaacattttttttcttttattttcttctatcttagctgtagaaaagtttggaaaaagttcttatttttaataaaacatgctttaaacatataaagcaatctacttgcttttcatatgattaacacagttcatgtataagccaacactttcttgaaatgtaaccataaattcttacttaggcagattattttcttccctaactaggactatggaatacttacataagtactttcaaggagggtacaaattgacattttaaaaatatacaaaaaacttaaacttgccttcaacttgactcaggtttaatggcttaattgttagataaaccatggacctctgagctatwtgcatcctgyactgatgactaatgatttcaccatcttcttctaagaagaagcaaccttttgattgcatgtgttgccagtcctgaaatgaaggaaaaaattatttcaaacaatatttattaaatgtttccagtatgcatagtaatgaggagaaaacacagggggatataaaagaaatgtcaaatataatcattgctctccaggaatgtgcaacatagttaggaggtagaaaacagacataacaaaatcctattatacacagggcatggtggctcacgcctgtaatcccagcactttgggaggccaacgtgggcggatcatctgaccaacatggagaaaccctgtctctactaaaaatacaaaattagccgggcgtggtggcacatgcctgtaatcccagctactcaggagactgaggcaggagaattgcgtgaacctgggaggcagaggatgcagtgagccgagatcgcgccattgtactccagcttggcaacaagagggaaactccgtctcaaaaaaatccaattataattggcagtaatatatggttaacacaaaaagataattatacatggaaaataatttactataatctaagttcctaaaatagtgcctaacacattggctcaacaaatatttactgtctaattgattggggttgggggactgatgtaaactgagtgtgcaactgatgaattatatcatgaagaatagatagcatttcaataatgaaaagttaggaaaagatataaggtaaagaagaagtaagaaaaataaagttggctgggcacggtggctcacatctgtaatcccagcactttgggaggctgaggtgggtggatcatgagrtcaggagttcaagaccaggctggccaacatggtgaaaccctgtctctactaaaaatacaaaatttagctgggcatgatgatgagtgcatgtaattccagctactcgggaggctgaggcaggagaatcacttgaaccagggaggcagaggttgcagtgagccgagatcacaccattgcactctagcctgggcaacagggcaagacaccgtctcaaaaaaaaaaaaaaagaaagaaaagaaaaatgaagtattgaaaaaagtaataaataaatatgttgctgtaatagaatgagattagtgctaggagcacagtaagaaggaagaattaaggattgctaaaagaaatatattgaaagaaaaaatgactttaaatgtaagagcaaaataattgcttcaagtgtagataactagaagcatgctgaataaaagtttcacagctggccgggagcggtggctcacgcctgtaatcccagccctttgggaggccaaggcgtgtggatcacaaggtcaggagttcaagaccagcctggccaacatggtgaaaccccgtctttactaataatacaaaaattagccgggcacggtggcgtgcgcctgtagtcccagctagtcaggaggctgaggcaggagaattgcttgaatccgggaggcagaggttgcagtgagccaagatcatgccactgcactccagcctgggtgacagagtgagactctgtctcaaaaaaagaagtttcacagctacagaacaatgccgatgaatataaaatatcacttttgagaaagacttttctatattggctttaccatttcttggtctagccaaatcccttcttgtctgaattcatatatgggatctcataactagaaatgagtaaaacttggccagccacagtggctcacacctgtaaccccaacactttgggaggccaaggcgggtggatcactggaggtcagaatttcaagaccagactggccaacattggcaaaacaccatctctactaaaaatacaaaaatagttgggcgtggtggcgcacacctgtaatcccagctactccgaaggctgaggcaggagaatcgcttgaacctgggagatggaggttgcagtgagccrtgatcatgccactacactccagcctgggagacagagtgagcctctgtctcaaaaaaaaaaaaaaaagaaaaaagaaaaaaagaaaagaaaagaataaaacttgaaaatggcatcttggacacaaagtagaagattctttattgaagttatgagaaaattgtgtcattaccatagctatgtgcaaaaatgcttttcactttattagtaggcttgcctacctgaaatgtaagtaagmatatttaaataataagttcaaggctttaataatattgataactactgaaaaggtgtatgctagctgtataataataacatcataaatgttttctaattcattatagaaagatttattatatcactgcaaaggcaaaaataatttacattgagatcggtttcatgctcacatttttaagagaagactaaattatcctaacatacttacatctcatttttctattttatgtcacaattattttcatattttattaaaaatctctataattctaatgccctacttagattttcatgtaatcctttctaatactgaccttatgtagaaacctattttttacattttaataaacactgctttatgttctgcttttaaaaattaattttatatccaaaatattttgctgttgaaaaygaataaagctagaggactcagactttctgatttcaaaacttactacaaagatacagtaatcaaaagggtgtggtactagcatgaaaacagacatacagaacaatagaacagaatggatagcccataaataaatccttgcctatatggtctaatgattttcaaaaagggtgccaagatcattcattgagggcaaggacagtcttttcaacaaatgaggctgggaaaactgaatatccatctgcaaaagaataaatttgggctcttatcttatgcaacacataaaaattaactcaacctgaagacctaaatatgctaaaattataaaactctaagaagaaaacatagggggaaagctgacgctggatctggcaatggtttctcagatatgacaacaaaagcacaagcaacaatcaaataaattggaattcatcaaaattaaaaacttttgtgcatcaaaggacactaccaacaraatgaaaaggcarttcatgaaatgggagaaattatttgcaaatcacatatccaaaaagggattaatatatagagcatataaagaactcctacaattcaacaacaaaacaaaccaccagattttttaaatgggcaaaggaatcatcaaatgatcacctctctaaagaagatatatagaaggccaataagcaaatgaagagatgctcaacatcactaatcattaaggaaagacaaatcataacctcaatgagataccaccttacacccattaggatacctattatcaaaaaaacagaaaacgacaagtattggtatgtggagaaattggaacccttgtgcattgttgataggaacataaaatgcataaaatggtgaagcattgtgaataatagtatggtaatttctcaaaaaagcaaatctagaattctatatgacctagcaattccagcttctaggtatagaaccagaagaattaaaagcagagactcaaacaggtatgtatgccaatgttcatagcattactgctcacaatagccaaaaggtagaaacaaccctaatgtcaattgacagaaaaatagataaacaaaacatggtaaatacatacaagggaatattattcagtcttaaaaaggagtaaaattctggcacatgctatacatgaatgagtcttgaagacattatgctaagtgaaatcagccagacacaaaaggacaaatattgtatgattccacttatatgaggtttaagtgaatttgaccacttcaaattcagagagacagaaagtagaatggtggttgccaggggctgtggggagggggaaatggggagtcattgtttaatgaatagagttccagatgaaaaagtcctggagatgtatggtggtggtattgatggttgtacaacagtgtgaatgtacttagtgatacagaactgtatacctaaaaatgagtaaaatggtacattttatgttttgtatattttaccacaggaaaaaccattttgctatgcaatattcaaaatttcaatttaaatggttctatgattaaaaattgtgttggggctgggcatggtggctcactcctggaatcccagcactttgggaggccaaggtgggtgcatcacctgaggtcaagagttcaagaccagcctggccaacatggtgaaaccccatctctactaaaaatacaaaaattagccgggtgttgtggtgggcacctgtaatcccagcctcaggaggctgaggtaggagaattccttgaaaccgggaggcggaggttgcagtgagctgagatygtgccactgtactccagcctgggtaacacggcaaaactccgtttcaaaaaaaaaacaaaaacattgagttggtataccattatttagttaactatttctaaaatgttagacatttaggtcatttctaatttcttatcacaatattaatagaatactgttttgtctaaatgcttttcttctgatgaataatttccttgagaacttctaggcaaaaatgtatgtatatttttaaagctattgacatgtgttcccatagtgctttataaaacagtactgccaattttacaataccaccaatggtatataatgtaataattttaccattatttggttagtattgttttataaaaaaattgggtgatgtgggatgatttcataagcaaggtgtgggtacataaagcattcattatggtattccatatatttgtatatgcctcaagtatttgatagtaaaaatggtattgtagtaacttttgcattaatttgaatttctctgattattaataccaaggctgaacatttccctcatgtgtttattatttattttgtataaattacccattctcctattctcataactctgttgcagacttagcatttttcttacatattttaataaattcttttgactattttagatattaaccactctgtgagtgttaatgaatgtattttctctatttccttttattttcattttggttatttctcaatttatacaagttttctatttttatctttatcttttctttggaaatttcttcttaaactkcattttaagattttatcattataaactgaactatactcaagctttcagtcagtcattaatcacctgcactgtcacacctttggggtatacaagatatgtgtatttttaattctaagaaattaagatgtgaccttaacttactgaaatttatcttgttaagtatattgcccatgacagaaagaagtcattatatataatatttcaacaacatcactatgaggcagtatggggtagatatgaattaagtcattttaataaacagaaaaattgaggtagccagagattatatgggttcagagttttataaggagtttgtagcaatattaggtctagagtccaagacatttggcctctacatttagamcaagtttctaaaagaaaatgtactcagggtacgaattcaaattttttattatctgtgatacaatgaggttcaaagttgggcttgtggcagaagttgaagttcaactttttttttttttttttttttttgagatggagtctcactctgtcacccaggctggagtgcagtggcgccatctcggcccactgccacctccacctcccaggtttaagcaattctcctgcctcagcctcccgagtagctgggattacaggggcctgccaccacacccagctaattttttgtatttttagtagagatggggtttcactatgttggccaggctggtctcaaactcctgacctcaagtgatccgcccacctcggcctcccaaagtgctgggattacaggcgtgagccactgcgcctggcccaagttcaactattaatgatgartaatgatacacagactttcatttagcttccctgtaaatctcttggatgggcatatatatggactaacaacagatgctggcattacctcagacccaattgcccttaacataatcaacatgaccttggatggtgatgactgctaaagaatagaaatgaaagaaatgttatacagcatttagacaagttacactttgagacagtttgaattatgattctgacattaaatggaaaacatttaaatgctttcaatcagttttgattatagcatcagatggaatttcatccaatatattttatattttttatatttacctatttggaatggtaaaggataatactttagaattacagacttataaaagtagaagaaatctaaaaagcagtctagtccagacttctcttttgattgacaaaaaagtctgaaaaataaagtgatatatgtgaacagctatagttctcaaytgactgcagaactagaaccaaaagctaggtctccttactttctctccagtgtgtaagttatattctaagttctgttctatttcacatttaaatatctgcagtgattttttaagccagtttttaaaataaactttatgaatatattacaataaagtatggtaaggcattatcaatcgggattccatacttttaagggttaagataaacttaattatttggttttcttactttaaaaatgtagaatttagtagctgcaaaatttcttaaatttgtactgtaatcatcagcacagcagccctacccccagctttaaaaaaatggttaaattaagctttaaaagataatgtactttgcctggtacactggtagtaaacataatttgtgccatttaggaaactcaaagatttcggaagaatttttcaatgtgctgatgctacctctggggcagtgccacagattaacaggacatagctttataaaatttaactggggaacaagttaaacatttttattataagtctttcctaagtaccatgtctagaaaataatgctataatagaagagaatttgtgagtttctttggaaagacagccaaactacatactataacattaaatatggattaatatagctggaaaatggtagaacaacagttattaaagtaagacaaataccacattatttatatcaaccaaacttcagtgtaatatacagatcaatttgaattctaaataacttcactaggagaacttatagctcctactgttcaaaaggaaacattcaacttaagatctgccagagttattaaacatacaatgcttactcaacttaaaatttcttttcaaggctgggtgcggtggctcacgcctgtaatccccagcactttgggaggctgaggtgggcagatcacgaggtcaggagttcaagaccacctggccaatgtggtgaaaccctgtctctactaaaactacaaaaattagccagcgtggtggtgcacacctgtagccccagctactcaggaggctgaggcaggagaatcactcgaactcgggaggcggaggttgcagtgagccaagatggtgccactgcactccagcctgggcaatagagtgagactccatctcaaaaaaaaaagaaaaagaaaaaaaaataccctttcaaacaaatagactttcaatcatacaaagctttttctctaggacctagactaaaatgttatgaactaaaagaaaaaattactgacaaattggctggctcattcaaataaatcagtttgaaaggattatagattaagctgacagtttgagtattaagagaaaaatgaaagaaggttgagttttgaaaataattttagaataagagtaagaaattccatgtatgatataattttttgacattataaagcagaaataaaataatagcttgtaattcttatatagggcatgaggtggtgctgtattctaccaattcaggtaaattcatataagtgcaaactgaactgttatttcctttatttgtcatatacaaattttacttattttcattcataatatataacgaaatgctgaaaagtacaaaaccaaatactaaagcaaaaaattcttgttatcaaaacaaatacatcagtatagtcmcatttttcttggaacactgtagtgaatgaaaatgatttgttttaacatacaaattctgtattattaaaattttcagtgagaaagaattattaagcagtagatctgccatagatttagtcagaggaggaactcatcactatcattatcatcactactgctttttataaagatttcctatgtcacatacttattaggaagctatttgctttggggtatgataagacaggtaggtaaccagttgttgcactttttgttattaaagaattgtaaactatacatacttaaaaaataaaaggttaaatagataatttatggagggtaaaattgatgtggcctgaaatctaattgacaggttgaactgatcaacattttgaaaatgtgagaaacttataagaaaattattatctggagctttcacaaaaaacagataatgaaccatttggaatttcaaatgtttttatttgtattgccatatatagacatacacataacatataaatggtatacaatgtagatgctatatatgttttgacatttataatatataggttgtacaacatgtgtgtgatgtgtgtgcatatgttgtactatatatgaataaaacataaatgtaggcatactctaagaatctgaatataggaagtattgcatctctggagtttacaactgatagtttggggcttactctaattctagacatgactggtcttagcaaggaaggtgaagctattcctctctgaaaggaaaattcctgacattccttgaccatcacagaayctaagtaaatggatagaattcgggattttaaaaagaataataatgcagtaactaagtatggccaatggaaagtaatatgcgtatagtacctgtaaggatcttattttccttttgtaattcaagtcctttaccaattgtgtggttttgtggtttaaaacatggcttacccttatctatcacaacaattttctaatttctgaaaagtccctccttctctgtcccaattccatacttttctgttccacatgaagttgagatacccaaacttgtttaaaataaatttaaagtatctggaaaattaatttaacaatcctttcagtaatttattctgtacattcacaaccaagtacttttcagaatggttataaaacctcaggaatatatgaaatttatgaaataaaaaaagaaaacttcaagtattacwgttcttttagaatttgtctagcaggttctctgtttttccagaaaaccacccaggaagaaacaagacttaaagaaaaatgtggccaggcgtggtggctcacatctgtaatcccagcactttggggggccaaggcagacggatcacttgaggtcaggagctcgagaccagcctggccaacatggtgaaacctcgtctccactaaaaacacaaaaattatccaggcatggtggcatgctcctgtaatgccagctacttgggtagctgagggaggagaatcacttgaacctggaaggtggaggttgcactgagccaagatcccacctgcattccagcctgggtgacagagtgaaactcttgtcttaaaaaaaatgcataaataaataaagaaaagaaaaatgtaaacaaagaactgaatgctgctgaataacaaaagagtcacttacttaaaaaaataataatttcagctcatctaagaaatagatagcaagcaacagtgggcaatatcaagatccgaaacaggatattaaaaggtaagatatacagagctatcaattatttccaaaagacattacattttatatgaaactcacagtattaaaaagttgacagtatgcccttttcttttaatcattaaattatcttwgtaccttttacctaattcccaattatcatccacaccattccctgctcttgacttacatacaaaactttagtctctttgttaaataatcgttatgacttacagactaattttggcatttttctattacacctgcccctatcgtattacattaagtactatcctaggccaagttatcatcactttatatttggaaaactctatcggcctcttagatggtgtctctgaggtctctatatataacacaacagtagattaacttttcttaaactatactttcatcatgtcgttcccatacaagcatccagttatttcttcgttctataataatattaatactagtatttattaatgtcctttgtatataataaatagtattaacattattaacactattctttattaatgtccttggcattgtgctaaatgctttacatatgtttacatacgatttaaatctttccaaagcacactaaatataattactccctatttataggtaagaaaactgaaactctgaagggctgctgacaaattcacccaagatcacacagttattaagtgataaagctaagattcaagcccaggtagatctctacccaaaactctagatcactaatctaatcaacatctagaacactggcacacagtagtcattcaataaatatttgttgaataaatgaatgaataaatactatgctatagtgtagcatataccaaggtagtccttggtatactgttaatagtcaaatgaaaatttatatttttaaattcaagctcatattttacactaagcaaaataactggcacacattacatgcttagtgaatatttgttgaattgaactaaattttaaaaattatattggtatgagcccaactaatgacacagagacaaagtcttactataacttaacataatccacattaatatttatttatatctctctttacagtggctaaaattacatttatttgtgcttttgaatcaggtaaaccataattatttaactaagttaattttattaataattaatttagttgcaaaatacaaaaaggttccattggtggaaagtaatattgttggaacactaaatattgtgtatgaacatgttggacatgcacaccaaattgcttagggtgtatagattcctaaacagtctgaacaaaattccttggagataatgttttaaaattttaatatagaacaaatgtcactctctagcaatttaaagatataagggacttcagagttcaataacaaatacagagttgttatttgaaacaaaaatgtggctcttgagagcaatcagttcagttttctaacagcagttatagtatgtggtcataaccattttttccccttttacagaggtctctagrtgcacatttttaatgtatcctagcagtttccagttaatgttttatatttctgtaactattattttctgttgaaagaaaactagtaaaggttgagtctagaaagggaaaacaaagaaagaagatcaatattaacactctacaaatattgacttagcaaagtgactttgttgtcattctctcacaggaattgaaattgaatgaatgatttatttatatgaaacacctatggtgaatatttgttaaacaaaacaaaaaatttgcttcccaaagtatataacttgataatctactcatcaggttataaaacttgagtgttaccattttcaaactgaagaccttataataatattcatcatttttaatttaaaagtattacactagcttacaggtagaaattacacagaaaaacctcaaattacttcataaactttactggttccctgtagacactgcacagttattaataaacttaatgtcaaatttttttcagaaaaagtcatctgttaacttaaaatactrtacctttattaaatttggctccrttaactttgagtttcggttaccattagcccccatggtaactrtgaaggaaacagatgttttgaacttcctggttgctgacagtaaagaactcctggtgtcacctgcaacaagtaatgattatttggtctgacattatgaaaagttgtcaataggagttttttccaaacacagtgcagtataaaagatctactgtattactttgattctctttgttctccctattgaaataaagtcagaagttttatatttatcaggctttaatgatccctaatttatgggcttctaataagaattcttatttcaatatgtcacctttcagtctgaaattttagttttaataaaatataatgagcatagctaagtcaagttccataataaaattttacttcaatmgatttttacagctgaaagagtctagaaatagtagctaacaaaagttagattctcatttgttttatcactgataagctgaaatggaaggaaaaatttatctgaatatgactcttcatttctgatcaagaaattcttagtgttaaaagtaaatacctttatttaagaatgtttctggatcagtttttcttgtgattttaggtgatggttttggtactggtgatgggtccctttcaggggacccttcgatgtggtttccaaactggtgacgcatcaatttactgtcaacytctagtttttctagtgtagtcttgagacattgctcgttggttgtcatatataatttacaaaactacaggaaaaaaaaagtccartgggtaaaacattcartcatacactggggaagaggagaaagcaaatgcacattagtaggcaaggaacagactgatagatggaatatatttcctattgatggttacgcattttattkttttgaatcagattgaccagcctcaagtgacctagtgaaatgtagccgtgattcaatgaggagttcatactctgtgtgaaaataaaatgttacacaaggagaggtgatttattattatttttttacaagatgtgtaggcttgcatttgttcaaaataatttttatgattcttccaccccagaaaaagtacatttctgagtagagtctctatgtttatgtgtgtatctgtccgtgtgtgtgagcacacatgttttttaacttggttatattattttaatgtagtcatcagattgcaattatgggactggaaaaattaaatttcatgcacaatatttaaggatgtcattgccaatattaaaaagatgcatccctttaaaaataatttgctgacatgttaattagttgacatgttaactgatttaattgtttcacaatgtatacatatatcaaaacattgcatgtacactgtaatgtcaattataccttaataaagctggggaaaaataaaaacacttttccaacacagtatgtaaatttacatcaatgtgagcttatgtaccttgatgtagtcaaatttgccatcagcatttacatcagccaaatttattatggcatttacttcttctcgagtcatcttctcacctctctgaaaaaaaaaaacaagatttattttaaagcaacatgattactcctttgttattcatggggacagtggaagcacattttaatcttttccacaagtaagtctgaatgtattgcttcattataaatcatgagtattatatataaagaaagaatgaggcggctatataaatttcacaattttattaaattttgtgaaagtgtgctgaatttcagtttactaaatagtaactaacaattgaatagtatagagtcagttataactgctattgagtttaggggaatgatattttctaacattgtatcaaaaaacagaatggattcctaatcccatttatatttggttttccttttacttatcacatatggaactatcactgattttcaaagagttctgaacaggaaccaattaaataggagaacaaggggatggtaacataagctcgattttatactttatcttttatttacaaagaacatttcatccagaaggattcctaagtacgttataaataacatgtaagtaattcatttaacctctcaatgaaatacttatttttaatgtggactttggtagtcaaagctagattccaagctgttttagaaaatatgcacattacaaaacagttttacagatcttacctttgttagaaatttataaaggtcagtgtgtaaaatacagccatcatcatttacatctaattgcttaaawgattttagtagttctgcttttgaagtaggtttttccttccttaaaattatacaaaaatcatcaaaattcagtttggcagtttgaggagtccaatacttattaatggtcttttgggatggatttcttcctgcatgctgaagagctgcccaacaagacaagtattatttgtgattgtaacacctggaatttgtacttaagcgcatttttttcttcaaatcattatgtattatgatatttacaaaacactatacatataccagtacattactttggtgttgacttatctagtgataccaagataggcctgactttgaaaaacaaaaatatttatgccaccacctaaacattctttaattattaataccagaattaaatagattttccttattctgacagtttggttctcaacctacatggtttaaataactaacaatatctgattacttaagagcttctaaaagcttctaaaggaaatacaagattaaaaacaaccatccacttaattgtttgggggacaaaaggataacacaaaaagtataaattagtactttttctggctaaataaataccttaatgactattcagccataaagaaggaggaaatcctgtcatctgcaacaacatggatgaacctggaggacaacatgttaagtgaaataagctagacgctgaagacaaatacagcgtatctcacttgtgtggaatcttaaaaaaaaagttaatatcctagaagtagagaatagatcagtggttaccagagactgggaaggggaacttaagtactatctaagtactctgggggtaggggaggatggggagaggttggtcaatgggtacaaagttacaatcagatagtgggaaataggttctgctattctattgcacagtatggtgactatagttagcattaaggtactgtatattacaaaacagctagaagagaggcttttgaatggtctcaccacaaagaaaagataaatgcatgcagcgacggatatactaactaccttgatttgatcattatacaacatataaatgtattgaaatgtcaaattgtaccccataaatacatacaatgtgtgaatttaaaaaacaaatatcttaatgaaatgagaaaatcattcatttaagaataccaatgtcaataaggcacgatatctaaaatgttcatctttgctaggtactaagctttcaaaaacattaatcatgttccaaatgtcaaatatatgcacataaagtatccctttgcaggcatggtcctgctaaaaatcaagaatgtcaatatactgtgagagaagattattatagagatgctatggtcaaactactcttcatttttaaccatatccttctatctatgaagagcaaagaagtacatgtgagaaaagctttgtatatttatgtatgtcatatcactctaaaataaaatggttaaagcaactgcagatattttgaacagttgaatagaagtaacttggtaatttgcaaataaatctctgcatactgaaatataacattttctaaaatgaaccaatgataaatttcctaagcaccacagaaggaattaacataattttaaaagatacaattgtcctgaattgtactgccaaattctattacaaaatcttatattggatagttccaactatctttatagaaattcacaagatctgcgcatcaccaatcagcatcaaaaaatgataatctggatattgtacaatttaatgtaataaggaccagtaagtataaaacaatttcactaaagaaatatcctcatggaaatagaaaccagatcagggtaataaatacagatataagtgagtcagttatattgaacattattgtgcacaagtatagtatagggtgatttttgttcatcaatacaaactttttagttccaaagaaattttatattctagactggcgtggtggctcacacctgtaatttgggtttacaattatactttgggtggccgaggtgggcaggtcacctgaggtcaggagttcaagaccagcctggccaacatggtgaaaccctgtctctactaaaaatacaaaaattagccgggcctggtggcctgcgcctgtaatcccagctacttgggaggctgaggcaggagaatcgcttgaacctgggaggcggagactgcagtaagccgagattgagccactgtgctccagcctgggtgacagaggaagactgcatctcaaaaaaagaaattttattttattattattattattttttgagatggagtttggctcttgttgcccaggctggagtgcaatggtgtaatctcggctcactgcaacctctgcctcccgggttcaagcgattctcctgcctcagcctcccgagtaactgggattacaggcatgcaccaccacccccagctaattttgtatttttagtagagacgtggtttctccacgttggtcaggctggtctcaaactcccgacctcaggtgatccgcacgtctcggcctcccaaagtgctgggattataggcatgagccaccgcgcctggcaagaaattttataatctaaataggaagtctacatctgactgtaaaattgctatctatggccataactcatgggttataacatattaaaaatccataaataaaattctcttctcctctagattatgccagtgactttcagagctaacagaagttgtagttgtggtaaccgccatcttccatatacctataaaggctttgtggaaattcattgcattggagataatataaatgtttttattcccacagttttattttggatgtcgacaaaagccctgattaccatgctgccctagcaacaacaggtaagtaagtattttgcctagtgtgtaaatgaactattccttaattcagctgtttacagaatcaaagaaatggcaatatgtgttttaggattccaaccccagccagctcctaccctttaaaagctgggaatacaagtagatgtaaatgaagttgtaattttttttttgcctctaaaatatttttattttaaaaaggcttagtgtgcaaagatgtttatcatattgctacactactgctactaataataaaggaaacaatgttcaaagaatcaaggagtggttaactgaatcatggtacatatacagaacrcatttacacaactactaaattatttttatgacaatgaatattatataaaatttcctgcaaaatttcttccttattgttaagcctaaagtgccttttttctaaggttcttttttttaaatctttaatttttggagatacatagtaggtgtataatatgagattttttgatacaggtatgcaataattacatcagggtaaatagggtatctgttgcctcaagcatttatcctttgtttcaaacaatccaattatactctaattattttaaaatgtacacttaaatgattttttttactagtgtcaccctgttgtgctagctaaatactaggtcttattctttctatttttctattttctattttctccccctacccccactacctttctcagcctctggtaaccatcattttactctctatctccatgagttcaattgttttaatttttagctcccacagataagaaagaatgtgtgatgtttgcctttctgtgccaggcttatttcacttaacatgatgacctccagttctatccatgttrttgcaaatgacaggatctcattcttttttatgatagctgaatggtastccactgtgtatatgtaccactttttttatttttatccattcatctattgatgaactcttacgttgcttccaaatttgggctattgtgaatagtgctgcagtaaacatgggagtgcagatatctcttcaatatgctgatttccttttggatatataccaagcagtaggatgctagatcctatggtagctgtatttttagttttttgagaagcctccaaactgttctccacagtggttgtactaatatacattcctaccaacagtgtaagagggttcccttttctccacatccttgccagcatttgaagtccacatgaaagaaaattatatcttctgttcagttttgagaaaaaaggtatgtaactttttctcacaagtggtagcttagcatatgcttgctgctatctttagtaacaaagaaaatattgttttaaaaaatgtactggtaattagamaagaacaactttctcagaataaaattaattatgccaaaacatgtactcagtaagcagatgtccccatagctaagaaattgatacaatctatttcctactaactttaatctctaggtttagaattagctggatctaatgattaagtttgatgatagtaaaaatatcacgtagctgtagatrtttaaattttgacaccatgatatggatcttttgccagggtttactttaaagttctgacatgcatctataatgcctgtattatttataaattgacaaaaaaggaacttaaagctatagtaatgctaccgctgtctctgaccttaaaatggaaatgcacdtaagtggcagaaggatatagatgaaaggtgtagcaagaagcagcagctctagttcatgttactcctttttaaaaaatagtttatctaaaatcaattattacaacgttaagagagtattccaccctaaaaccaaaagtgtatataacactgaagagacaaacactgtatagttatcctcccagataatttcataagattgatagcaccttagtaatacatacacattgattcacaaactaaatgccatagtagtggaaggcatgttaaacttttaaacttagcagattccttctcttagtatattttcaaaacagtaacaaaaaaaaactcggattattttagaaatwatggcaaattagaagtaattttaatttattggccaggcgtggtggctcacgcctataatgccagcactttgggaggccgaggcaggcagatcacctgaggtcaggagctcgagaccagcctggccaacatggcaaaaccccgtctctactaaaaatacaaaaattagccaggcatggtggcgtgcaactgtaatctcagctacccaggaggctgaggcaggagaatcgctggaacccaggaggcagaggctgcagtgaatcaagatcgtgccactgcactccagcctggaagacagagcaagactccrtctcaaaaaaaaaaaaatttattggatgtctgcctaaacatttaatgtatatgaattaaacacaaatacttaaaattcaaaatagagcattttagtaattttaaaattatgtaaatcaaaattaaacatgactttaaaagtcagtcatgtgcatttgcatttaaactactttacaaataatgtattttatttagacatcaaataaattttaatcttgtcaattcttgtattcctcaaaatacatttcctcaaatagatcttattggatacaaactcaagacactgctgcacaaatatgtcagggttttggtttaagaaaattcattataaaattggcaaaataactcagtttctctacccataaagttattagccttgatgaaactgacatgagtagtcagtgttatctagtactgttgtttactactctctcatgactaaagatgtccaaatcatttgatactcctggaaagaaccaaatttggtggttttggggacctttgtaatgagaggaatttttaaatgtgataaaggacagaagcaataaaagacaaaacaaaaaataaaaataagaaataaaaaaaccccaactcaattctcttttaaaagttcacttatctctcagtacttcactttttcagacattccacccatttttacacatcctttacactttcctcagtatgggtcaaattcaggctagtgacttaagaggccaaaagcgttttaattttattatgataaatcttaaagcaccaaaatgagaattaaaagtatcttaagcaagtagtaattgatagaagctttcaattacccatctagtttgtataaacattgaaagttttattttgtagttcctagaatatgtaactatatgatatgacataatagcttactgtagttccattgctcaagcttcactaagaaactgggatgattcaacaaggtaattctaatttcagtctttyggacctatttattaactttcaacaaaaaggtgaaagatttaaaaattttaaaaatttacctaagtaaagttgatctttagaaataatgttttccaagctgcttttgaagacagttaagtaggcagctctacaattcatataaaatatttcctcttcagttagtggaawtttctttgttcgaggactctctgaaggtgttgatttctgactggagaaagttgcrtcgcttcgtggactgatcgccattctattggaaaataatttaaaaatgtgtttgtcaatgtgagtcactaaaacacaaatgtcaccatgtctttcaaatacagggaggagaatcaagattttatacgtagaagaaaatttataacatatatgaaaagatcaagatattaaaagttttatatgtggaagtaaaagacgaatactatagttgtatatggacgtattatatattaaacaagaataagcctttggcagttaatttctaattttagatatatacatatgtatatatataattgttcaaatatgtgataatagccaaaagaacaaagatatacacaagagaagaatcactgaacaaaggaagagcacacatctattctctcaaaatacgaaagtcagatgacagtcttcatcaggtttttaagaggagcaaatcagttaatacatgtgaagcatatacaatattgcttgacacgtagtaagtgctaaataaactgcagataatgagaaactccagaataatgagaatcgggatatgagtggtagytgacacccatcttccacagcaggatcaacaagatcatttcattaacatctcaataatgcagccccacatttcaaatagctatattttaaaagtcttatttatagcattatcatagttttactgtgttcctttattaataacaatatttggggtttgtatagcacctctgtayataagagcttaaagaactgtcatacatcttgtcttatccctrttacagcggtcaggtatttttttgtccgttttacagatgaggaaattgaggggtagcaatgtcacccagctagcagtaagtggcaaaaagccgtaaatttcacgaacagtttcttctttgttaatgtggatatagtactgaacaatggttactatggggtattagattctactggtggtctaacagcttccartattactctacccagctttgacttctaaaaatagatctccaacctaataaattgaatatttcaagttcaataataagatracacaggtagggtccccttcaggactcattgcattcctactcaggaggcctaaatcacttgcaccttttcgaattatatagatcatttacacttgggaaagaaagataataattgcttatcatggatgaagtaccctatttataatacgcaggccgcctgcctgacactttcatattacaccagatttagaaggaccccacagggatgtggtgtcacagtctggttactgcaaattggtaatactataattaagcatcagagttctaaacacatatgtgtgcatgcatctcctcacaaatgtgaaagaaaactgtttcaagaagtaagggagaatgaatttcactttgcaataagcaattttaaaatataagtatattttaggatcgtcctcaaatattctttccaaacaaggcaactccctcacatggaaatcccaaggcagaaatgtgccagaattttattcttttcctttctgtgacgagaaaccaaactaaagcttaaataaacatataattgcaccccccgcaggcttggaaacctcccttacttaaaactccggcccgagactgagacaggggcctagagagtacattgcagcaaacrgctccataaataaccagccacacaatagcaagaaaaataaactgttaacaagcgcctaaggcttctacagggccaagtgaaaacagaaagccgtccagtcaccgtccctacacagtgaaataccgtcacaggtaatctcggrcaccatctctctatttttgtattcctctggaaataaaaccgcatttacatgtacattttaggtacatacatggaccaaatgtttatgacagagaagtagacaaagcagaggaaggagaagcagctgcacagagagggacagagggagcgaagagayagagacagcgagctgtttgctacctaattctarctcacaaacaaggaagcgcagccaattctcttcggcgattcagcgttcctctcaccgcagctggacagatctcggcctttctctaatcaccatggcaactgcacctcaccgccaccggaaataagatgcagagcccttctccaaacgatccggctagaaatctaggaagcgctgatccggagcgcacagagacagctgtgttgctcctctatcgcgggggtggtatggccagagtagtgagagaaggtgctctgttacaccagcaggaaataggtgctgtcctgggcctagaactccccgctcgctcctttgctcgcgcacacccggatccttcgtcgyggggaggatgtttccgcccggccgcggtgggcttgacgcaacgtccagcgcgygcttttcatkccttggcktttcctttggcggattttctgttttcggaagttgctgggttcgttttattcagcggcagtggtgctttcccgaatctcagaatgccgtaggtatctcctccccaggtattgctgttttgggggccctctgcaagaagagaagatattatgtggcccagtagcctttctcgttttcctattttttcggagtatgaacttgtctcctctgtccacaggcaattcccttcgcttggtaccctcaactctacgtctcctccagcggtactcatacgatagtcctccttcgctttctgtttctacgatgcttttgacagatttcgtaaactgtgggctgtatttaggtgatgtctaacttgaaataacataaataaggttgacacacaggatgggacagagtagataaaaacacgccttcgtagtttgtcagtcccttgccttcattaatgtggcgcgttcgtgtaaacccgtgggagaactcatggactgagtgggtctagatacctggattccagataagactctttcactgttgggcaagtcacttatcgaccctgagcttcgtttttttttacttacacaaataagtttgtactgcatgatctctaaattcccatctatgaccaataatctgattattgagaatgaccatagtgggaataggcattgtgctagataagattcatctgtttttcatatccttcatccatcctatattgagatgcataaaatagttgctaccctatagaaacttaaaaaagccattaaaggttgggggagtggggtggatatcaaacacctgtaatttctccttggccgtccttgtcctcaggttgatttargtaccccctctagtgtaacctgttccttagtttatttcaggattaagtaaaatgcaaagtaacacagctggggaaatttttgtatcaaataggaattgacatgaaaggggaaagctgtacagaaatgataacctatatttattgaatcttgaattacaatgtgggtgctgtattaatcaatttatctacgttttttcattgaatcctaaaatactttaggggatgggggctgctattatctttacagataaagaaacccatcacctaatagggtgttcaacacagctgccaataaatgcatgttttactgatgcccttaaaagttatggattattgaggaggttttcctttccccagaattaagcaaagagacttgtttccctactcttgcattagaaaaatcatccagttctcaaataaacaaagctgcaaagataatgtcacacaatcacacacacaaaatccctaagaatacagtgaaaacagaggtgtatttgccaaacaagtggtaatacctcctgaactgtgtgtatctgtgtataggagtggggaaccaaaaaactatgaaaagtggaactttttttttctttttttgaggcagagtctggctctgttgcccaggctggagtgcagtgctgtgatcacagctcactgcagcctctacctcctgggctcccacatgccaccatgcctaatttttttattttgtaaagacagtgtctccctgtgttgcccagcctggtcttgaagtcctgggcttaagtgatccttccacctcagcctcccaatgtgctgggactataggagttagccactgtgtcaggcctaaaagtggacctttttgacaactgtcttcctaacatatgcacacaagatgttatattaggcttttagataagtatattctggtaataaatacacaaccttaaagttgaggttaacatctcacatatatagctaatatatatgtgaaactagcaattactttgctaattttctaagttttagcaaagtgatttaagactaaatcaacagttaagtaatgcataaaacgtaatggcatgttagtagagaatctccatcattgttagtaaattaagtgtttttttttttttttaatgtggttactggtgaggtcataaatgagtggtgcaaatagttatcttggcaagttacatatgcrggtggattcatttttaagtgatgttgaaatggtgactatttggtatgtatttggaagactaaatgtgtaatataacttatgggagggtgtgatctatcttttttctaatttcttagaaccttgagcggaaaaaacttcaatacaacaatgagtagttgtgaaaatatatatggtccaaatgaatctaaaataaataagaaacagcaaatgttcagtgacaatagagcggatggatgaatcttaacataatgagtgaaataaccaatttgtatgagactacatttgttatccttataaaacttaagaacacgcaaaaataagctacttatggttatatatgtatatgataagattattgttaaaaggcagagaaatgataaatacagagaaatgataaatacagtttaatagatgccttttgggggaagcmaatagatgcatgtatacccagtcatattggtaatgatctagttcttaaattatgtggtgagtttatgcgtgcttattttctaatgttttataacttgcacagcttacattttttcattagtatccattattcattagtattacatttattcatttagtatgtactacttaaaatgttttttaaaaggatttagagattacctatcttaagtcctccctaagtgtagctttctctgccttctctttgatcctttggaggaaacagatgaattagataaatgctgctgttggtttcattaggctaatcatcttcccttccaatcttgctcctctttctgtgtacattctgaaattagtggcacagtcatttctctatctaggttgaaaccttcactttttaaagatttgaagtggaaaaatcatggactttggagtaagacaaaccaggatttgaatcttgagtctgttaaccagctgtgtgctccttagattgttactcagtgtcctcattgataaaatagttgctcaataagtatttattaattdgataaagttgctactttggaaagatttcattctatgtagacagatacatgtctttttagtagctcttgctgtaagtaatcaaatcccattctagaccttttttcttcttctaccttttctttataaagcttcctttaaaaagtaccatttgtttagtcttgctaattagtgtacatcatcatgctaattcagccaaagatactctctaccagagttaactttattctgttccaagctatgactgaactaaagctataaagttggaatagcattagtgttgtagaaaaactattcgtaacagtaacagtgggggccattctgctgctgtatttatagtctgagagttttctgagagaactttaaaatgtgctatattttttccaagataagggaaaatgaatataaacatattctggatctttattgtgcctatatgctgtaatcattttgatgctactgccaggtacaatgatttttattttgtgggttgattataaagaagtaggtgggtggaatgatgtgtcaggccaagtaaaagttaaccattaaataaacatcctttgaattatagtagatattcaaagttatataatttcttttataaataaagtgtcctgcattttaaaagaagattggtgaaatttttagtacttgatataagaaaaatatgaaatttaaatgcaattctttcctgcttgtaaaagtcagtaaagtctaatagaggaaggtataatagagcctttttggctgagcgtggtggctctcacctgtctatttaacttagaattttttgacttcataatagtgtgaaagcartatgcattcagtagaaactactttaagtacccatacaaccattcttttctttactttcagcacaatattcaataaattacatgagatgttcaacactttattttaaaagagattttgggttagatgatttacccaactataagttaatttaagagttctcaacatgtttaagctgtgatgttcagtaggttaaatgtgtgaaatgcattttcaactaacattttcaatttacaatgggtttgttgtaacataatcctgttgtaagtcaaggagcatctatatattttttgcttgcaacttcttaaaaaggtgagaatgtttaaagcaaaaattaaacactattatggggttatatgtagacataatatatatgataccagtggcacaaagtgtagagggagttgactataatgttgcaagattcttctcttttacatgaagtagtactgtattattataactctagatagactgtggtatgttaaaaaggcatactgtaatccccagagtaacctctgaaaatgcagagaggcatacctaaaaaacaaatagaggaattgaaatgatatatttaaaaataatgttaattcaaaagaaggcaggtaaaaaagaacaaaggaacaaaaacagatgggacaaatagaaaacaactatctaaatggtagccccaaccagataattacaagtttaagtgcagtaaagacatcagtgaaaaaggtagagaatattataaggctagatttttttttaaagcaagtcctaactctttactgtctataagcaacaaagttgaaagttaaaaaaaaaaaagaaagaaaagaaagggaaaggtagatataacagtctaacaggagagaaaacaaatgatcaatatccagaatgaaagggtaaattgtacttagatgaaagagaacataaactatcaatatccaaaatgaaagagcagaataccactaaagatgctatagatattgaaagaggtaatatcattaaagcctttattccagtaaacttgacaacttatacaaaattgacaaattccttgaaaaatacaacttagcatgatggcataagatgatacagaaaatctgcataattaaggaaatagaatttgttactaagaatcttcccacaaagacccagacgatttcattggttgattgtacagagaacatacccattcgtgagaaaataaaaccctcagcaaactaggaataggaggcaacttctcatttctttgaaaaacctatagataatatatttagtatcgaaaacttttttaagattaggaaaaaggcaagaacgtgccctctcaccacttctattcaaaaaagcacacacagaaaaacacccatagtgttaaaaaggaaaaagtggggccaggcccagtggctcatgccggtaatcccatcactttgggaggctgagacaggcagattgcttgagcccagtagttcaagattagcctgggcaatatggcaaaacgctgtctctatgaaaaaatatgaaaattaacaaggtgtgacgttacgtgcctgtagtcccagctacttgggaggctgaggcaggaggatcacttgagccgaggaagtcaaggctgcagtgagctgtgattgtgtcacttgcattccagcctggatgaccctgtctcaagacaaacaaaaacaacaacaacaaaaaaggaaaaagtaaaattaatgattcaacaatgacatcatgtatgaagaaaatcctaaaaaatctataaaacaattttcagaacaatttagcaaggatgtaggatgcaaaatcagtgtacaaagatcaatatatttctatatttcaggaataaacacctggaaattgaagtttaagatttttcatttataattacataaaaacatataataatttagcataagacatgcaagacctctacagtgaaaattacaaaatgttccttagagaaattaaagatgaagataaatgagagtatttttatttattttttatttatttttatttatttttatttttttattattatactttaagttttagggtacatgtgcacaatgtgcaggttagttacatatatatacatgtgccatgctggtgagagtatttttaastgataaatgtggtattattaaaatgttagttctcaccaatgtttagatttaatgcaatccctgtcataatcctaacaaacatttctttttaagttttgctcyttttttatttctactgtttaaaatggatcttttttaaaaaaagttaagtggatgaaaacttgtataatagtatttggtattatctttatcttttctgttttatatttcatttttcatgtaatctaattttccttctttgtactttctttttttgagtatgatcatttatacctaacttatttgtttttattttttatagactcagggtgtatatgtgcagatttgttacaaggatatattgcataatggtgaggtttgagctcgtaggtgcccatcacacaaatagtgaacattgtacccgaaagataatttttcaaccctcaccttcctcccatacttcctccttttgaagtctcagtgtctattatttccctctgtatgttcatatgtacccattgtttagctcccactaatagatgagaacatgtggtatttgcttttctttttttttcttttttcttttttttttttttttcatgaaacaaggtcttactctgtcacccaggctggactgcagtggcatgaacatggctcactgcaaccttcacctcctgggctcaagtgatcctcctgcctcagccttccaagtagctgggactacaggtgtacaccaccacactggcctaatttttaatttttttgtaaagacagagtctcattatgttgcccatgttgatctcaaacaatcctcatgccttagcctcctaaaatgctgagatcacaggtgtgagcactgccacacccagttgattttctttgctttcctttcctcttttttctcttgttttctttcttttctttccttttcccttcccccccccttctcccccaccttcccttcccccgctccgcttcccttcccctcccctctcctcttttttttttttttttttttgagacatggtcttgctctgtcacccaggctagagtgcagtggtgcagtttgctcaccacaacctctgcctcccaggctcactctggactcaagcaatctgctcagctcagcctcccaaagtgttgggattacaggtgtgagccaccatgcctggcctaattttctgcttctgagttattccagttaagataatgatttccagctctattcatgttgttgcagaacaacacggtatcattcttttttatggctgcatagtgttccatggtgtatatataccacatttctttatccagtcatccattgatggacacaagatgattccatgactttgctgttgtgaatagtgctacaataaatgtacaagtacatttgtctttttgatataatgatttattttcctttgatagatacccagtagtgcggtggttgctgggtagttcyttttttttttttttttttttttttaagttggagtcttgctctgttgtccaaactggagtgcagtggtgcaatcttggctcactgcaacctccgcctcccgagttcaagtgattctcctgtctcagcctcctgagtagctgggactacaagcatgcaccaccatgcctggctaatttttgtatttttagtaaagatggggtttcaccatattgatcaggctggtcttgaactcctgaccttgtaatctgcccacctcagcctcccaaagtcctgggattacaggcgtgaaccatcgtgcctggcgttgaatggtagttctatttttagttcttcaagcaaacattttttagaaattgaaaactgatttcaaaatttgtatggaaaggcaagtgacttgcagtagccaaaacaattttgaaaaaaaagaatgaagttggagtatgtacactaactagacatggcataaagtgttggtaatgaactcaatgtggtttgggcatatagagaaataggtaaatagaatagaatagaaagtccagaaatagacccacaaaggtaccaaagcagctcagtggggataacagaagattttcttcccaagtggtgctggcatacccagtggggaaaaaaacaaaacaccttgaccttcaccttatattacatacaaaaattaatttgagatacattttagtcctaaatgtaaaaaggaaagtttctggagggaaatatttgagaatatttttacagtctgaagtaggtgaaatttcaggcaagacgcggaaagcaataattataaaagaaaaaatgataaattatgcttcatctaacttttaaacttttgctcatcaagagataccgttaaaaaaagtaaattttctgtttttcttttttttttttttttgagacagagtctcgctctgtcaccaggctggagtgcagtggcacgatcttggctcactgcaacctccgtctcctgggttcaagcgattctcctgtctcagcctcccgagtagcggggactacaggtgtgcaccaccacacccagctaatttttgtatttttaggagagatgggcttttaccatgttgaccaggatggtctcagtctcttgaccttgtggtctgcccaccttggcctcccaaagtgatgggattagaggtgtgagccaccatgcccagccaaaaaaagtaaattttcaaacaactgactgggagaaagtatgtaacagatatatatcagacaaaggatttatatttaggataagaaagaactcttactaatcaacagtagaaagacaaaaatgttattaaaataatggcccaaagatttgaaccaatagttaataaaagaagatacacaaatgaaccataacatgttgctagacattttggcagtttcttatgaaattaaataaatatacacctacccaatgatctagcacctctacttctaggtatttatttatccaagaaaactgaatgcagtatagctaaggaaaacaaaacaaaacaaaaaaacttgtaaaaggtgttcttggaagctttactcataatggctaaaaactaaaaccaagtgtccatcaacaggaaaacaaataaatggcttattaagatagaatattaattaaaaataaatgatctactgatgtgcaacaacctgggtgaatctaacagttatgctgagcagagaaaatagacacaagtacatactgtatagttctatttatatgaaattctagaataggcaaaagtaatctatgctggaaaaaattagaaaagtagttgtgtatggtatagattatggacttggagggagcctgaggtaccctcctcatatgattcaaatattccatatcttgatatggatgtgagtttcagggatatagtacatgtttgttaaaactcgcatctatacacttaatatttgtgctgcttgctatatgtaaattttacattaaaaatattaggcaaatactgaacttgagtaagagatttgctttccatggtagtatgtgttagcacttctgaaactagtttttatgtgttctaggcttggtcaaatgagtaagtgtattgtggatgatgggagccagtttctcacctttggatggaggaatttcaaatttcttgacttggcattggagatgtcaatatgaaatcatagtttttaaaaatatacatattaaagatagaggtagatagaaatgtttttgtgtgtgtgtgtgatgtgtgttccagctctgtcctctgagagagactgtaagcgatgacgtaagtaacagtgaacacatttagtgcccagattttggtgtctaaataccattgtccactaaaaagagctaggtctcattggagaaaaagctgattccaaagctggtgcagagaaaactttttgtgtatgctggaaaggtaggaagtgctcaaagcgttatgggtacataggttaaacaggagccagggtgaaggggaagaatggtcccattgccaaatttgggacagttaaacatcaaaataaataatgataggaatggcttaaaatccattggctaacataaaaatctgtgacactgtagtgatataaatgaataaaggaaggagaactgaaaggcttttcttggaatgtaatgctaactaataaatataaaaggaatgatcattagtggctctttataagatttcttatttactacattggagaaaactggaagataatatcttaatggtcaaaatttatatcactgatattacaatacatcaagatcaagtgcctcaagttatgctctcagaaggatgcaacatcacttctgtgatatttatgccaaatatgcataacctaatcatggggaaatatcagataggcccaaattgagggatagtctacaaaaataaaaataaaaatggcctgcagtcttgaaaaatgtccaggtcaaggaaaacaaaaggtttacatttaaggagtcacatggaatgtgaatttggccattgcctttcatcaaaggatttctaagaatctcacaagcatactcagtaatactctaaacactcctgtgaagttgtagctggcaatattatcatctctattatagtgtggagtaaatggaagcactgaaatactcagtgatatttttatcttccactcagaaatttcttactactttacaggcctgtgttattatcaactttatgaagcttagtgagattatgtgatttgcccaaccttagggaagaatttggcatagcatgaaggctccctgagtcttaactgctttactaagtttattctttaccccccattcttcccctcagtcctgttattcaaaattgtatttaaactaatgttttaaaagttctataagagaagctcaaatcataaaattttgtgattttctgaggtgtcattcctggttttttattaggaatcaaatgatagggttttttttycctagaataatttctttaatactgtaactgatgttagtcartaacattgtgtaataaaactcatctgctttttctgttctgatgaaccagagaatcctattcaggatactaccatatgttaagctaaatagaaaagaggtcartcttagagaataatataattatacaaacatagttactctctctataaaattgcatgtcamatgctttctatctttttaaaattctcaacagcagtatttctggtagcaaccagaattttgatcccagtgaatctaaacctagtatacctagaaatataatataacttgtaaattacgggcataggtggaaatttgggtaagttggaagttagaagtcatccacagagaggttacctgtaaaagggaggtaattaggacacaataagtagatatcctttaaaaaaattatctatttttaaattgtgctaaattatatataacaaaatttactattttaatcattttttaggtgtccaattcagtgacattaagaatgtttaccttgttgtgcaaccatcaccaccattcatttctagaattttttttcatcttgtaaaactgaaagtctgtacccattaaacagtaatttcccattcctcactccctctagcccctggcaaccaccattctattttttgtctccatgaacttgactactctcctatgagtggaataatacaatatttgtccttttgtgactggcttattttacttagcataatgtcttcaaggttcatccatgttgtagcacatgtcaaatttcatttcttttttttaaagctgaataagattttgttttatatatatatcacattttgtttatcggttcatctgtcagtggatatttgggttgcttttctaccttttggctattgtgagcartgctgctgtgaacattggtgtacaaatatctgtttgtgtcccagctttcaattatttttggaagtggaatcatggaatcatatggtaattctatttttaattctttgaggaactgccatactgttttccatagctgctaaaccattttacattcccaccagcagtacacagggattctagtttctctacatcctcaccaacacttattttctgtttgttttttttgttttgtttggttttttaatagtagccatcctaataggttgtgaagtaatatttcattgtggttctgatttgcatttccctaatgattagagatgttgagcatcttttcatgtgcttattggtcattagtatatcactttggagaagtgtatattcaagtcctttgtccaattttgtgtgcccacttttttaaaccaagatagtagccacaggagctgcttataactttacagaactaccagatagatatcacttttgttagctaatactggtaacaaaagagtaaatattttaggaaaatatcccatatatctaatcaaattttacctattcttccttcatatgtttcatccgtctcttctattcctactaacagtaaagtaatcaatttagtatattctcgtcattgtgttgtaaaagagtggttgggcccagttctaatataatattaagaatagatggtcataaactctgtagtgggtttgctcttctcttcccttctttaattyccttcccctcaattccataaagatttattatgcacagggcctgagatctgagtttctctccctcaagatgtgtgacaataggcaagttgcacaaactgttttccctattggctgaactaagtgatttcttagatttcttctagtcttgtctattatatcttttaaggattcttttaagtattataacttttggttattagatgtccgaattatctgaatagtacactaccctcagtaaataatatttttagattgtcaccaaacataaagtgggagatgacagcctattttaactcagcttactttcttgtttactattttttacgtatttccttgggtttcttagatcaacctggggcctaatctgtaaactttttaaaagcaaacatttagttactttgtctaagaattaaccattgataacaaagcaatattttgaacagttaatatcaggatggaatatgtctccttctaaaagatactattgcatcttaatagcatttagaaacaaaggataagaaatgctgtactgtttaactttagttttttaatttctattttctttttcttttttttttgagacagttttgctcccgttgcccaggctggagtgcaatggcacgatttccgttcactgcaacatctgcttcccgcgttcaagcgattctcctgcctcagccttgggagtagttgggattacaggcacgcaccaccacgctaggctaatattttgtatttttagtacagacagggtttcaccatgttaggctggtctcgaactcctgacgtcaggtgatccacccacctcagccttccaaagtactgagattacaggcacgagccaccacgcctggtgtaatttctatttttgaagtgttataaataccagaacatcttacatacccaaatagggcaatatgtattccaaagctaaatataaattttaaaaaattatctgcattttagtttgtttgtacctctgttttcttcttgcctcattgggaaatcagattaaattgatattaagtagatttctaaaagcataaataattctttaaaccagtttaatctcaagaaataatgttgtgatagggtaatgtggatatagtagcaaaataatcttttagatagattaaatttctgtactgtatatttactgttcaatgattttcttagattgaccatctcttctattttttcttattcctgtcctttgtaaatcaatagttacttacgaatagtcattttctaagatcaatacaaacttttgggggatttctgtaatataacatagtacaatctttttgctttatgctctaattctttaatattttaattctatttctatttctcaagaatcaggaagatacttttaacactgcatttgtcactgaaaaaactagttttaatttatattgacctttttctcctttgaacatttagtctgcattcaataaaatgttgatgactgctctttagaagacagctgtatgaaataaagtattataaatattcagcttccctttctaagcattgtcaccaacagctgggcatccagtttagcagaacagattttgcacacagagagcctggcatattcctgaatcagtttagtgaaggaaacaaaaaatagtttcttatggattggggacttataaagacatagagcatctgttcctcagttaagtcatagtctggttgcactgaatcatgtttaaagctagaataatgtgcaaaactttttttcaccatgctcatacctttaacacctagtgcactgtttctgtactgtactttcaacatctccactgaaagtgtataaattattttgctcttatatatgatattgtaatagtggtattttaaagcagacaaacatactaacttttttataagagtttttataatataggactgatgtttaaattgtayggtagtccttgtatatataactgcatatattttttaaagaaactcatttaaatatttaattatgatcccatttagagatatgcaattagaatcaaacctgtcatcataaataattgctttcttcatatggtattctgctttaatacataatataaaaattggttggtagaactaagaatctttgtttatatatcttcccttaattattgggctactttaaataaagcgtgtcaaatctaaaatttctttaaattttttgtttgtagygttaaaagatcactgaagttggatggtctrttagaagaaaatgtaagtatttgcttaaaagtttgtcattgaataagattgtgttttcagtttttaactactgatttatctcgttaaatattaaaattatcttgataattttaattatatcacagtgtgatataattgtgattggtacaccattttctgcatataagatattttagtttttgtgaatctaatatgtggaagttcctggccagcttgaggtgttcagttaagaagcaaattaattatttaaaaaccttaatgaaataatttagtagaaattaattcactatttgtggaaaaaaatagtctgccacttaaatgtacaagaaacaatatgggacaatggcagtacttttaatctgcatactataatctgctaaaatgaaatgaaaacattagtagcatttttatatcaaaaatgtaattaccttcctcagctatgctggcatggattaaacagcataatactaacactgtaataaattgcaccacagttatcacaatgaaaattaaattgtactgttgccattactttttgtaaattgagttgtagcacattcccagtgccagcatatcatgacatatgttagtttattatcttttcataccaactatggatctagatagaaacactaatactgagatacttatgacctcagtaatcttaaatgcaggtaaattggtgagaaagtaaattaaaacaaatmgctagtcaataagtaggctcctccaaattcacatatgaatgccatttcartaaatgggttttatatggaatttttctttggaagacacactggtatttaacaaaacagaaatttaccatttagaaaacttgctacatgctttttaaaaatttttaaacaaaggtggcaaagtactgcaatgacacttaaaaaatcattaacagtataattagcaatttagaataccattatccaacttgttctgtgcagaatgcagctgtgactgtaattctgcatctgtttctttggtcagaatggttttttggtagatgagtagtccagcttgaaatgaaatactgttctttcctaccccaaagctgttctttgggagatggtmacattgtttaaatggaaaagaatgaccgtttcagaacccgttctcttcatgaagtaaattgtcatcatggcaggccttctttgtattttttcttcagatgaagatgtgtcaaggtagccagtgccacagctgacatcctgtattagaaaaatacattgttatgtttggcccagttctgtacctttcaacagaacttaaattgatttaagcttgtaccaactgatttagtagtaccagttgatttagcttggtactacatgaccacatctgcccgaaggaggttcctagcatactagcttgggcatttctatttcctgaccagtttctggtattttcagctttgtcctcttgccttatcatttgtttgaagctctgtatttacatcttagagctaacagcttttgttctgttctggtgttaagtctgggcttctctccatggctacatacacacttcatctactctagtaacaacttagccctgaagcaacctggctcccaattatatactcacatggcctatggccccattgaggctgccttagcccatgcaaaaggaaattggacattcaaaatatatacctacaattttaggagtacttaattgttgtgaagctatattggaactagtagtaactttgtggtcattttaccttaccaatatgttgctgaagggggaaggctctggtttctaagggaaagagatggcccttatatgccagttggttgaagtggagcctgttcatcctaagcaatggccatatccagagatatttggaactcctaactcccagtgttcctaatgcagctacagatcttcatggagattaatgcttcatgatgtttgggcaaggttcaaatgccatttgcttatggctcttgatatggtttcctgtgtcctcacccaaatctcatcttaaattgtactcccgtaattcccacctgttgtgggagggacccagtgggagataatttggatcatgggggtggtttctcccatactgtcctcgtggtagtgaataaggctcactagacctgatggttttatcaggggtttccacttttgcatcttgcttattttctcttgccactgccaattaagaagtgccttttgggcaggggttgcaatcctagtctctgataaaacagactttaaaccaacaaagatcaaaagagacaaagaaggtcattacataatggtaaagggatcaattcaacaagaagagctaactatcctaaatatatatgcacccaatacaggagcacccacattcataaagcaagtccttagagacctagaaagagacttagactcccacacaataaaaatgggagactttaacaacccactgtcaacattagacagatcaacgagacagaaagttaacaaggatatccaggaattgaactcagttctgcaccaggcggacctaatagacatctacagaactctccaccccaaatcaacagaatatacattcttctcagcaccacaccacacttattccaaaattgaccacatagttggaagtaaagcactcctcagcaaatgtaaaagaacagaaattataacaaactgtctgtcagaccacagtgcaatcaaactagaactcaggattaagaaactcactcaaaaccgctcaactacatggaaactgaacaacctgctcctgaatgactactgggtatataatgaaatgaaggcagaaataaagatgttctttgaaaccaacgagaacaaagatacaacataccagaatctctgggacacattcaaagcagtgtgtagagggaaatttatagcactaaatgcccacaagagaaagcaggaaagatctaaaattgacaccccctaacatcacaattaaaagaactagagaagcaagagcaaacacattcaaaagctagcagaaggcaagaaatacctaagatcagagcagaactgaaggaaatagagacacaaaaaacccttcaaaaaatcaatgaatccagtagctggttttttgagaagatcaacaaaattgatggactgctagcaagactaataaagaagaaaagagagaagaatcaaatagatgcaataaaaaatgataaaggggatatcaccaccgatcccacagaaatacaaactaccatcagagaatactataaacacctctacgcaaataaactagaaaatctagaagaaatggataaattcctcgacacatacaccctcccaagactaaaccaggaagaatttgamcctccgaatagaccaataacaggctgtgaaattgaggcaataattattagcttaccaaccaaaaaaagtccaggaccagatggattcacagccgaattctaccagaggtacaaggaggagctggtgccattccttctgaaactattccaatcaatagaaaaagagggaatcctccctgatgcattttatgagcccagcatcatcctgataccaaagcctggcagagacacagcaaaaaaagagaattttagaccaatatccctgatgaacatcgatgcaaaaatcctcaataaaatactggcaaaccgaatccagcagcacatcaaaaagcttatccaccatgatcaagtgggcctcatccctgggatgcaaggctggttcaacatatgcaaatcaataaatgtaatccagcatataaacagaaccaacgacaaaaaccacatgattatctcaatagatgtggaaaaggcctttgacaaaattcaacaaccttcatgctaaaaactctcaataaattaggtatcgatgggacgtatctcaaaataataagagctatctatgacaaacccacagccaatatcacactgaatgggcaaaaactgtgaacattccctttgaaaactggcacaaggcaaggatgccctctctcaccactcctattcaacatagtgttggaagttctggccagggcaatcaggcaggagaaggaaataaagggtattcagttaggaaaaaaggaagtcaaactgtccctgtttgcagatgacatgattgtatatctagaaaaccccatcgtctcagcccaaaatctccttaagctgataggcaacttcagcaaagtctcaggatacaaaatcaatgtacaaaaatcacaagcattcttatacaccaataacagacaaacagagccaaatcatgagtgaactcccattcacaattgcttcaaagagaataaaatacctaggaatccaacttacaagggatgtgaaggacctctttaaggagaactacaaaccactgctcaatgaaataaaagaggatacaaagaaatggaagaacattccatgctcatgggtaggaagaatcaatattgtgaaaatggccatactgcccaaggtaatttatagattcaatgccatccccatcaagctaccaatgactttcttcacagaattggaaaaaactactttaaagttcatatggaaccaaaaaagagcctgcatcgccaagtcaatcctaagccaaaagaacaaagccagaggcatcacgctacctgacttcaaactatactacaaggctacagtaaccaaaacagcatggtactggtaccaaaagagaggtatagacgaattgaacagaacagagccctcagaaataatgctgcatatctacaaccatctgatctttgacaaacctgacaaaaacgagaaatggggaaacgattccctatttaataaatggtgctgggaaaactggctagccatacgtagaaagctgaaactggatcccttccttacaccttataaaaaaattaattcaagatggattaaagacttaaatgttagacctaaaaccataaaaaccctagaagaaaacctaggcaataccattcaggacataggcatgggcaaggacttcatgtctaaaacaccaaaagcaatgggcaacaaaagacaaaattgacaaatgggatctaattaaactaaagagcttctgcacagcagaagaaactaccatcagagtgaacaggcaacctacagaatgggagaaaatttttgcaatctactcatctgacaaagggctaatatccagaatctacaatgaactcaaacaaatttacaagaaaaaaacaaccccatcaaaaagtgggcaaaggatatgaacagacacttctcaaaagaagacatttatgcagccaaaagacacatgaaaaaatgctcatcatcactggccatcagagaaatgcaratcaaaaccacaatgagatatcatctcacaccagttagaatggcaatcattaaaaagtcaggaaacaacaggtgctggagaggatgtggagaaataggaacacttttacagtgttggtgggactgtaaactagttcaaccattgtggaagtcagtgtggcgattcctcagggatctagaactagaaataccatttgacccagcaatcccattactgggtatataccccaaaggattataaatcatgctgctataaagacacatgcacacgtatgtttattgcagcactattcacaatagcaaagacttggaaccaagccaaatgtccaacaacgatagactggattaagaaaatgtgtcacatatgcaccatggaatactatgcagccataaaaaatgatgagttcatgtcctttgtagggacatggatgaagctggaaaccatcattctcagcaaatatcgcaaggacaraaaaccaaacaccgcgtgttctcactcgtaggtgggaattgaacaacgagaacacatggacacagtaaggggaacatcacacaccagggcctgttgtggggtggggggaggggagagggatagcattaggagatatacctaatgttaaatgacgagttaatggttgcagcacatcaacacggcacatgtatacatatgtaactaacctgcacgttgtgcacatgtaccctaaaacttaaagtattaaaaaaaaaaaaaaaagaagtgccttttgcctcccgccatgattctgaggccttcccagccttgkggaactgtaagtgcaattaaacctctttttcctcccagtctcaggtatgtctttatcagcagcatgaaaacagactaatatacctcttctaatgarggaagcagagatatggaccataccctgtgttcttcctataatatacgggatgtrtactgccagtaccacaatttgctaaacctcacaaattgttgggtgttgtaaggaggtgaagaaagttccaatttataatcatctactgtatttggcctgcttgagttgttgctctccaagcattgttcctaggtagattttcaggaatgaagatgaattatatattacaaactgttgccgatggcagtccagatgaatttatatggacaactggctacctggccatataccaagccagcttgacccagtctttttcaggccacttcagagagagaatagaagatgctacggttgggaagagaagagcatacttcttaccaaggccagctcaataggcttcctgccagaggagtagtggtgcaggttttgttggggaggtttgctgatttatatatagatatccagtcaagggtactccataacttattagtaagacacttttttttttttttcgagacagggcctcactctgttgcccaggctggagtacattgttatgatcacagctcactgcagcctcaaccttctgggctcaagcaatcgtcttacctcagcctccagggtagctgggactacaggcacaggcctctatgcccagctaattttttgtatctattttttttttagttttgccatgttgtccaggctggtctcaaactcccgagctcaagcaatctgcccatctcggcctcctagagtgctgggattacaggtgtgagccaccatgcctggcagtaagacacttctaagtcagattattcccattgcctaacttaatctctccaatcctagaacatttctctcaccccaaaaggaaaccccatacctattagcagttagtctcaatttcctcctctccccctccccctggaaaccactaatctactttctgtctgtgtagatcttcttctgaacatttcatrtaaatggagtctcataattttgtgtctggcttctttcatttagcataacattttcaagattcaatttacctgtttctttctttgattgtccttttgatgtcatatccgagaaacatgtaacccatggaaacacaggtttttatctacgtttctaagagttttatagtattaactctttcatttaggtcttccattttgagttaatttttgtacatggttcaaggtagggactggattcattattttgcatgtgtataaccagttactgaaacagatatccacatgtaaaaaaatgaatctagtccctaccatttgctgaaacgactattttttcctttattgaacagccttggcacctttgttaaaaatcaagtgatcataaatgtatggatttatttcagaattcccagataaattccatttgtctatctatatatatgtgtttatgccactaccatgcggtcttcattactgtaagtttctaagattaaaaaacgttttgattgtaagtttgaaatcaggaagtatgagtccttcaactttgttgttctttttcaagattgatttggctattctgtatcctttgtaattccatatgaattttgggatcagttagtccacttctggaaaaaaaaaggcattggaattttgataaggattacatcaaatttgcagattcagttgggaaatttgcaatcttaacaataatagtaagtcatccaaaccatgaatgtgagatatatttctgtttatttagatctcgcttattatctttcaataatgtttcatagttttcagtatacaagtcttatagttttctgattaaatttattcctaagtattttattctttttatgctattaatggaattgctttataatttcatttttagattagtcactgctaatgtatagaaatacaactgatttttacatatggatcatatatcctgcagctttgctgaacccatttattagcattaataatttggagattttcttttttttttgttttgagacagagtcttgctcttttgcccaggctggagtgcaatggcgcratcccagctcactgcaacctccgcctcctgggttcaagcagttctcctgcctcggcctcccaagtacctgggactacaggtgcacacaaccacgcccagctaaattttgtatttttagtagagacagggtttcaccacattggccaggctggcctcgaactcctgacctcaggtgatccgcccgtctgggcctcccaaagtgctgggattacaggcrtgagtcacagcccccccgccctacttagggtattctatatataagatcaggtcatctgcaagtagggatagttttacttcttcttttgcaatctacgccttttatttctttttcrtgcccattgctttggccagaacctcctgaaaaatattaagtagaagtggcaagagcagacattcttttcttgtacctgatcttagagggaaagaatccagtctttcatcattaagtatgatgttagctctgagtttttcatacatgtcttttatcagattgagaaaattctgttctattcctagtctgttgagtgtttttatcatgaaaggatgttagatttttgtcagttacttttcctgcataattgagatgatcatgtgtgcttttttcttttattctcttaatatagtgtattacattgattgatatttgtatgttgaaccaaccttgctttccttgcataaattctgcttggctatgacatataattcttttatgctgctgatttcaatttgccaggatttttacatctgtatttataagkgatttgggtctgtaatgttctggtatcaggataatactggcttcaaagaattaggaagtgtttcctcatatttttggagagtttgagaatacttggtgtcacttctttaaatattagtagaaaggctgggcgcagtggctcacacctgtaatcccagcactttgggaggcccaggcaggtggatcacctgaggccgggagttcgagaccagcctgaccaacatggagaaacccccttctctactaaaaaatacaaaattagccaggcatggtggcacatgcctgtaatcccagctgaggcaggagaattgcttgaacccgggatacggaggttgtggtgagccgagatcgygccattgccctccagcctgggcaacaagagtgaaactacatctcaagaaaaaaaaaaaaaaaaaacgctagtggaattcacttgtgaagctacctggtcctgggcttttctttgttgtaaattttttgaatattaactcttatgtctttacatgctgttgatttattaagattttcctgttctccataattcaatcctggtatgttatgtgtttctggaaatttgcctatttcatctagattatctaatttgttagcatgcagttggtcatagtagccctttatgatttcttttatttctgcaaggccagtagtaacatccctttttcattcctgattttataatttgactccccatcccttccttccttccaccctccctccctccttttcttccttccttcatcagtctagctgaagatttaccaattttgttgatcttctcaaaatactgactattggaatcaccaccactaatatctgttgttttttctccatttcatttgttttctctttaattgtctttttttttttccttctgcttgccttgggtttagtttgcttttctttttctggtgtcttaaagtagaagcttaggttattgatatgagagctgtctcttttaacatagttatttgcagctataaatttccctctgagtaccactttcactacatcccattaagtttttctatgttttgttgcgttttgttcttaatgtgttttttaagttttaaaaaaattccttctttgacccattggttatttagcagtatgttgtttgatttacacatatttgtgtattttctaagttttcttctgttatttttattgtcattctatgtgaccagagaacattctttatgagaacattgtattattttcctctttttaaatgtgttgagacctgttttgtggcccaacatgttgttatcctgccaaatgttttatgtgcacttgagaagaatgtgtattctgctgttgttgggggaggtttctatagatgtctgttaaatctagttggtatatagttttattcaaattttctgtttccttgctgattttctatctaggttttctattcattattgaatgyggggaattgaagtttccaactattatagttgaattttcaatctctcccttccaattctgccagtttttgttttatgtattttgggcctctcctgttagatatgtttatgtttataattgtatatctttttttgttttttgtttttttccccaataccaataagtatttattcattgtattttcttggaaaaaagaaaaagagggggaaaggaaaagcatgtgttacaatagtgcaacagaaaagaagtgcccagtacagcaaattgaccatcaaataaacacaccccagtgataaagtcatcagagtccaagggagctcagtctcctgcagttcaggaagacggggaagggatcaagaaaagaacagacaggtacacactcagcctaccttctgtccttccctcttcatgaattcagacttttgcacaaagctttagtttctatcagtaaacatcgagctgcatttgtccttctcttgtcttgtggccactttgacatacattttttgcacctatataaaagctcctgagtgacttagatacatttatcttccttttcttagtctcccccccaggatgagacacatgtcacccaatacattctatttgccctgtttgaacaaagggatgtaagtttatagtgcttttacggcaggtaaatgaaactccctttctctttagctactatgactctacaatcactactgcaacaatryaggacagtggctccagatactattaacaaaagcccttggtaatgggtctaggtctctaagtccagaatgttcaaaagttaaggattttttgttttattttatttttttagaatagggatctcattctgtcatccaaactggtgtgcagtsgtataatcatgtttcactgcagcctcgaactcctcgactcaagtgatcctcccaactcaacctcccgagtagctaggactgcaggcacatgccaccacacctggctagaaaaattaagaatttttgtctttgcttcatacatttattcctgggcaacacagatgggtacaggcatttcatttaaaaaacctatgcttaccagctcatactttcagacacacacacacacacatcttaatgtgcatggtagatttagtttaatctcagtgaaggatagatctggtgtgtgaagcaagtctagtactctaggattagagacttggaataggaatcctttattgcatatgtagacaacttcatctaaccttgttcctctctaggcctttcacctggcccaggctctaacctttcagcaccaccttcctattcatactcatgtccaatcttccagtaaaatgagatcaagtcatgggacaaatcaactaaaaccaagtatcccaagaaacattatcaagctggaggagctttaagaagacattgcagtagaaaagccagcccttattgacataaatgagatagtccaataggctgtatactccaagtagctgttttttgtggtgataatttaacaacaacaaaaagtattcctgctttgcagacctggagcagctgtcaaattatccctgaggttgcctgtgtacctcacaacaaagtataaaaataaggaccttagattaaaatatataaaaatatttttattaaggaaaaaagttaaaattcacaagatacatcatttgcacacatcaagttcagttggcctgctggagaaagtaagaaccaaggtacagttgttcaaaggagcaaattatagtgccaggtgcagtggctcacacctgtaatcccagcactttgggaggctgaggctggcagattgcttgagctcaggagtttgagatcagcctggcaacatcacaaaatcctgtctctaccaaaagtacaaaaaattagccaggcatggtggtgcgcacctgtcgtcccaattactcaggaggctaaggtgggagggtcacttgagcccaggaggcggacgttgcagtgagccgtgatcgcaccactgcactcccgcctgggtaacagagccagactgtgtctcaaaaaaaaaaaaaaaattgtagtggcccagaatgaagtaggagtaagcttaggagttgcaaatctgcagctgtttcctcaactgccccttttgcccataatcatacccgttgcttggaatagttcccggctccctatctcaagaatgggttatgagtagacacatggaaaagccctgccctaatctacctgagagattccctcccacagaatgttgtggcttcttggttgggtccatgaatctggtttcatgctgaatcttttcattctggtataggaaatattattatatatccttgtttaaaaggaaaaggggttgcctagagtggagcctaagataaagcatcctggttctagggagattttccacaaaagccctcactttttttgcttgaatagcatggttagaattaatttgccttcacccccacccccaccttcctccacaagggaagagagagtgattgccatggatcctggcctgagatacatggcagtgccagctgccccctacctgccccatcctactttctttgctctttgctagttgagtgagggaatatattagttaagtgaggaaactgaaattcagatgagtggtgtgtccatgatagcatagctggggagcagcaaaascattatgtgagcccaggctttccaatgttaagtctgcggttccttccatataccacagctatctttcctttagtgtaattgtttaaagacttcatgattcttcattctctttggaaaatcttatttctaatactgtttttggttcatatttttatattatctttagcagttgactaaatttgttaaacgttttaaaatactgggtcaattcattggggaaaaagaaagtctttaataaatggtaaccatctagaaaaaaattcacttcatatacaaaattcatatgcacttcatatctcactttatttacaaaatttattccaagaaggatcataggcctaaagtaaagccaaaccataaagtctctagaagcctgcatggtggcttctggctgtaatcccagctttgggggaggctgaggtgggagaattgcttgaggctagcaatttgggacaagcttgggcaatgtagtaagaccctgtctctaaaaaaattttgtttgttaaataagctggcatggtagtgygtgcctatagyctcagctactcaggtgggtaaagtgggaggatcacttgagcccaggagttcaaggctgcagtgagctgtgatagtgccactgcacttcagtctaggcgacagagaaagactttgtctcttaggaaaacaaaattacagtgtaagagaatgacagtaatgatacttttattattaaaattaatatcttaatatctttaaattgtgaaaaaataattactacaaatagaaaaaccagtgcatcaacgtttttagccagtattttatttttcttgtcagggtgaaatttgcatattattaatttcaaagatctcgagtgtataattcgatgagttttagcaaatgtataattcagtatcatagctctaatatattggtcatattctttccttgctatccctgtaagatcactaagataagttcaaaatgtttctgttctccatggctaccataaaaacaaaaccccaagatttttagaaccattaaggttgataattgtagtagctgataagaaggtagttggggttggttgtggtatctcacacctataatcccagcactttgggaagccaaggcgggcagatcatttgaggtcaggagttggagaccaacctggtgaacatagtgaaaccttgtctctactaaaaatacacaaattagccggacgtggtggtgggtgcctgtaatcccagctacttcrcttgaacccgggaggcagaggttgcagtgagccaagaccgtgccactgcactccagtccggaagacccagcaagactctgtgtcaaaaaaaaaaagaaggttgttggttggtatctagtactcttctaggcaccttaggcccaaattgtgaaacgtctctgaggcagctaatgctagagttttctaatgtaaatttcataattagtactagtaatgcatattaattatatcttaggtgggacactccaatagcctaaataaccagcataagtttatgaagaattatctccttctagctgcccttttgtttctagttgaccagacactacagtatctgtattataaatattttagcataggctgacagttcaaaatagtgataaagtatcctttaaatcccatattttatcctgcaagaatttttagttagtactctctagactgtttataataggtttaaaaaaatcagtaaaatgtaggcacttttttggtagtgtatgctttaaacaaggtgacaaagtaagctacaatttgtgaaagaaattgaaggaaggaaaggaaaatatcatatctatttgaaattattgagagaacattgatttttttttcaggcagaaaaatcgatgcccaaattttagttttgctaatgtacaagattagacctccttataaaaagtacagtagcatttgggtggggctgattgcagcatcttagaatgtggcatttcttttgtttagaaatggtgttaaataactctaaggagtcaggaattattacaagcaggttkgtttgtttgtttgtttgtttgtttgtttgtttgttttttgagacagaatctccctgtgtcgcccaggctagagtgcggtggygtgatcttggctcactgcaacctctgcctcctgggtccaagtgattctcgtgcctcagcctcctgagtagctaggacaacaggcgcgccaccatgcctggctaatttttgtatttttagtagagacagggtttctccatgttgccaggctggtctcctactcggcctcaagtgatttacccaccttggcctcccaaagtgctgggattacaggcatgagctgccagcagttgtaaattattatagaagtggttgtgacatctattttcttscgcgcgcgcgsgygygtgtgtgtgtgtgtgtgtggtgtgatccacagctcactacagcctcaacttcctgggtttaagtgatcttcccacctcagcctccagagtagctgggaccacaggcatgcaccactatgcccagctaattttttggtactttttgtggagacggggttttgtcatgttgctcaggctggtttcaaactcctgagctcaagcaatcctcccaccttggcttcccaaagtgctgggataacaggcatgaaatgccctgcccagctgacatcgctctctttctttctttctttttgttttttgttttgttttgttttkttttattttgttacatcctgagtccttgcttttttctagccaaatctagccctcttactctttcttcctgtttttctaaagggctcataggtagcactcatccttgctgaatggaaggattgctgacttctcagttagtagytcagtcttctctcaaatcccagtattcttaattcttccttttgtgggagactaatgagtaggccaagatcttcaaagtttgggagttggcagaatggaaattctcagatggattctaggattacttttaaacctcttcagagattaaaagttagaggaacttggtacaaccttgagggaaagaaaacttagggaagtagggttatgcctttgtgtgtaccagtagggaagataaacaaaagtgcatatttactgaagaatatttagtggtatagtagggaaagggtagcttttcaattttccttctgtgtatagtagttgtagatagacatttttctttttaacaaacacaaatgaccaaaaaaataaaaaaagagagaagcctcagtatttttaaagtgaggcaaaaatacacacacacacacacacacacacacacacagagcacatgcacactcacagagttattttctgaaagctggaaaattgtttccaaggagaaatgtatgatctacagttaaaatgtttagacatatggcaattggataaaataattttttggtgaaaatagaaaaacagatagatatagatgtacattagggtagtgactttcattccttgtacatacacagtgaagtagttctgggcaataaattcttggaaaagtagagtagggattggataaatgtcatagtttatgactgtgaatacatacaaacaggtaaaaactcaagatggagaggtaataataaccacccgataaagagacttaaaaccctttcactgtacaaaaaaaaagattgctttagagttataacttgatattatagtttgattttttaaaagatattcatcgcatttgtggccactatggatacataaaataaacaatgcctttcatttctcaatataattaaatattgtttcctaatatttaaaatcttaactgtaaaaaaattttttttgaatgctatagattctggaactaatattaagattactaaaaaagatgacacagccactatttcttccataggtctcttaaaaataaaggatagttgaccaggcagagttaaggaactatttcaaatcctctaccaagctatatccagtatgttggcaatgtatgagccatcagacctttcctatatcccccagatccatcctatgctgtctgttccacctcttatttcagatttctcatgcctttttctgtgacagactactgcagccaactttgaatttttcctcttctctgaatttcgtagcatgcatactaatttaaaacctctttgttgttcttctaacttttggtagatactccttaaggccagagcaatttgttatatttctttgtacacattagtacacatttagcagtgctggtgggtgatcagtaagcttatggaaagcaagttttaagggaattcaggaaagggaacaattaatagtatgataatggatgtttgaaggaaggggatcatgaatgaggacctaaactaaggaaagtctaggtcttggggaagataaaaaagaggatgttccaagctgagatcacraaatgatctgaggcccaaatgcacatagcctagtgactgaagctgtaggtaacagtgaataattggatgtatgaaccagtgaacaaattagtatattctgagtagagcaagatggccaaatttactggactgttccttgtaagtcattcgttcctcacacattttttagttctctaggatataaagatgaaaagataatatttattttcaggagcaaattctaatggaacagacagaacttattaaaatatgttacctgaaataagaggtatgcccaacacctatggaaacacaaaggaggaagctgctaagaggaaatttgtaagacaggccaaatcctcaaaggccttaaatgcctgactcaactgtttggacattattttggtgattattgaagcaagatgctacatcagaccactttgtgaagctgtaggacagcagtgatccttcctaaggtttctgtgtgaggcttagtaataggcacctctgagagttttcctgccctggccccataattatacttcaagttcagctgaaagcaaaagtcagggtatggttgggagagttggccatctctaacctgtttggaaataccatctcagaaggtagtaaccctttaatgctaaaatttagtaaatatcaaattgagatgttctagttattatagagacctgaaatatctaccttgaaagaatagtgtttactttgagagtgatagttgagtatatttgtaatctgaaaagcaagagcaaggaaacaagtttgaattttgctgattttttwatggtatataatttcaaagatctataactaaacatagctatttctgtccttaattattatttatttccagtcatttgatccttcaaaaatcacaaggaagaaaagtgttataacttattctccaacaactggaacttgtcaaatgagtctatttgcttctcccacaagttctgaagagcaaaagcacagaaatggactatcaaatggttagttgaacattcttttctacttattgtaaggtttttctagttattggccaaatcaaaattgtgatttaattatgtatggatcttgctacagctgatttttctcttctctcaaataatttaataccttaatataggtattactttggacataaatrtraacttttggcacttattttaaaatgcaactgcaggctttgttcccttactatcccatccattaaatagaaattatggcctgacttgccttcagctactatcaattataatggttacagatatgccccttaacaagctatccatcatgtgcataaattaaagggagcataattcaggtgctgctgcactacaacttaagagtgatacttctaaatgttatttttatccatggtttccattgagttttacccacatttagtatatctttatatagcttatctttatttattatatttcattcccttctttttcttgactatttcaaatgtatttacaaaaggtttgtagaatttttccatagagaaaaatctaattttaakatgaaattctttattttaaaatattattagtttaattttaattttgaccatacatatttgttgtcctctggtagttcattgctaaaatattgatttaaaaacacaaatctcgattccgtggggttttttttttttgagaaaggttatgaatcagtgacatgtagttttataattaaaattttaaataggctcaaatttaatagtgtatcctttagatatactgtgattagcctaattcacattttattgtttaacatttaatgagtgctaagcatatactagaagctacccagaaaaaagaagtctcattttacctgatttgttataatgtaacacataatgagatcttaaagttttgaatgtctttaattttactttaatcaaatgctttttatcctaaagctgttactattaggttctctttccctaaaatgtatgaaaatgtatacactttaagtttcatagttctatttttatatgcatgatatatctttttaattaaaaataaatgccttagagattgtacatccctatactgaaatgtgaatagattttaagttgatatgtactcaatttccatattgaaattaagtatggacttaaggggacattccttttgcccataaaaagattggtcacatgatttcagttggcatttaagtagataattatcacagattatagtcctaagtaagctcttttttaaaaagtcagatagcaagggtttcagaggtgctggcaatgttctgttttttgacctacatagtggttacactgattcactctagttattcatcagactgcacatacatgtttcatatgtrctgtaatatatatatctcacatatagaagtctcgaaacagaattttgtccagaattctgtatgagattatgtcatttgtaatcattacrttgcttatcctaatatgtcatcttgtacatgttttaaaaataaaaaagcttgatttttatgaagtaacttaagttcaaaataaatgagaaaatatgacgtatgaagtcatttaaattctaaatgaggtcataatctcttaacaactcccacttttaaaatattatacaaaacataatataaaatttaaattacattttcaaggacatttttggtgttactcacttcccatcacacttatgataagatccaaaacmcttatcatgacatggaaggccatatatccatctaacacccaaacacctcatctgcctcattttctaccccttttttacaytactttagccactcttaccttcttgctatttgtcagtcatgctgagccccttcttgccacaaggtcttgcagttctctccacctggaataatcttcctccagatatttatatgtactttctatgtacatttgaaccatgtactatgtgaacagaagacttaatattatatttaaatccatttgtagttataaaaggatgaaaaatttagttctatgtcttccttctacttagattctacattggccaaacatgggatttgtttcaactctttagtttatacatttaacagatgcgttcatgcagcacataataacatttcagtcagtgacagactgtatacacatcaggggtcccccaagattataatggagctgaaaaattcctattgcttagttgcccggtagccgtcataacattgtagcacaacacgttactcacatttttgtggtgatgccagtgtaaacaaacctagctcgctgctagtcatataaaagtgtagcatgtacaattatatgtagtacatgatatagtcgtgtactacataatgatgttttgttcaacaaatgaccacatacaatgatggtcctgtaagattataataccgtattttactgtgcttttttatgtttagatatgtttagataaacaaatacttacaatatgttacaattgcctacagtgttcagtacagtaatatgctgtacaggtttgtagactaggagcaataggctatacactaggtgtgtggtaggttatacaatggaggtttgtataagcacacctacgatgtttgcacaacaatgagatcacctcatgatgcatttctcagaatgtatgtccatagttaagtgacacawaactctatatgtatgtgtgtatgttatgtatcatttatgtattttttaatttgtatgtacattattttgctgccctcctccaacccatagcaagtttctccagactattacagttgacccttgaacaacatgggtttgaactgcacaggtccacttacatgaagattattttcaaataaacatactggaaaattttttggagttttgtgacaatttgtaaaaccctgcagacaaactttatagactgtaaatataaaaaaaaaagttggctatgccatggatgcataaaatatatgtagctactagtctatcatttaccataaaacatacacaaatttattataaaaaataaaatttatcaaaactaatgcatacaaacacttagaccctacacagtcccatttgcagctgagagaaatgtaaatgaatataaagatgcagtactaaatcataactgcataaaattaactctagtacatactgtgctactgtaataatttcatagctacctcctgttgctattgtagtgagctcaagtgttgcaagtatctgcttgaccatgtgatgctgataatctctgcacaagtaatgtgtctctcaagtaaattgtgtattgcagtaaaaaatgatctcatggttctcgtatgtttttcatcatgtttagggctatgctggaaaccttgactaacaccatgaaacccacataaagtgccactagtgatgctggaagtgctcccaatgagcagagaaaaatcatgacattacaagaaaaagatgaattacttgatatgtactgtagattaaggtctgcagctgtagttcctcaccatttctgacagttcatcttgtaaacagatgacaagcttatggtattaatactttacaatactgtaaatattttatcttccttatgattttcttaataacttttttctctagctttattgtaagaatacacaatataatacatataacacacgaaatatgtattaattgactttgtggcatctggtcaacagtaggctattggtagttaagtttttggggagtcaagagttatacttggatttttgactacatgggggatttggcactcctaaccctcgagttcctcaagggtcagttgtatgcattttagaaaagaagaaagagaaaatttttcccctttcctcccatgaacacttcggacttgttatttaataatgaaagtagaagaataaacaacaaatttgcatagtcgaagagagtacttgttaactggacaatagatctgtaaaaatcactcagactataacaatataatagtacagagagataaaaggagaatgtgataaaacaataaagtgaaatgataggcagaataagactctccaacatctgccaaattggagttctacaaggaggaaatacagagaatggtccataggcagtattctaagatataaggactatcagtttttcataattaaggaaagataagaatttgcaaattagagtagcatgctaagtctgggcaggataaagtaaaacagatccacatctagttatatcatgataaaactgtatgtagaacatcaaagacaaaattttaagggcaaccagagaaaagatagtacctacaagagagtaacagactgataaacttatctatatcagtagactccagcagaaaatgcaataatagtatcaattaagaatcacagttgagtttttatccaggaagtgaggatgaaatacaatttttcagacaaagtctcagagagtttgccactcacagattctcttaaaataactacaaaataagttacttctctaagaggtaaagtgaacctcagataaaggagtggaattgcaaaaagcaatgaygaaaaagtgaattagcaaacatgttaatctaattacaagttttgctgactataaagcaaaagtcaaacaattggagggcgggtgaaaaaaaaattggagggcaggttaaaaacaaacaattggagggcgggtgaaaaaaaaaagtcaaacaattggagggcgggtgaaaaactatcatggaaggtgaggaggcaacagataagagttacgatgttttagacaatattttaaggtcctcgtattttcaggcagacaagatatctatcagttgacttcttcattgtattttttgttttcttgcctgtaaaatggggaagatagtaattcctacctcagaattgtgaggattaaatgaattaatacacagaaagcacttagaatggtacttgacgtatattaatagtatatgttccatacatgttctagccattttcattaatagcattattaattagactttaagaaaagacataagacaattaaatctgaaggaatagaaaaagaaaacaaagcaaatactagctttttaaaaaaagctagtagttgatacaaaaatagaaaggctgaaatagactttatgcctaaaaggatttattgaaaataatgaggctctttacataagagatagagaaagattcaccactacaaaaataaaaggatcctgagccatatgtgcatctaaaaaactcaaaacataatgaaatatgacaggataacaagggagaaactgataaatccacaatcattgtaggagattttaaactacctctttcagaaactgatgaagcggttaaaaaggaaggatatagacaagttgtacacaattagcaagtttatctaatgagctgtggtcaaaaagatataatacccatataataaagcacatgtagaatgttcacaaaaatgtaaccagcttggagttacagaggaagtctcactgtactaaaaattacagtcatacagctcacactctaaaatttcatacaattaggaatcaataatgaaaaggcagccctccaaaaattttaacctgtatgtttggaaaccaagaaacttctaaataattcattgatcagaaaaattataatggaaagtataaaatatttaaaattgaatgataatgaaaacatgtcagcacttagaggaaaaatttatacctacattatactaaagcagttcttggtggaagctttatacagtcgtcccttcctatctgggggattggttactggatcccactcagtttccaagatccacagactctcaagtcccttgtagaaaatagtatagtatttgcatataaccaatacaccctcctatatactttaaattatctcaggattacttatatacctaatacaatgtaagtgctatggaaatagttgttatactgtattgtttagggaattatgacaaggaaaagtctgtatatgttcagtacagatgcaaccatcctttttttaaacaaagtatttttgatccatggttggttgaatccacagatgtggaatccactaatacagagggccaactgtacttacaaatgcatatacagtcctgtgtcacttaacaatggggataccttctgaggaaagcattgtttggtgattttgtcattgtatgaacatcatagattgtacttacacaaacctagatgtcatagcctactacacatttatgctatatggtatagccttttgttcctaggctgcaaacctatacagtggactactgaataccataggcaatcaaaacataatggtattggtgtatttaaacatatctgagtagaaaaggtacagtagaaatatggtgtttataatcttatgagaccactgtcatatatgtggtttgtcactgaccaaaatgttgttatactgctcatgactgtatttaaaaaggaagaatgattgaaaactattgagtcaagcattcaactcagaatgactgaaaaggaacaacataatgaaccccccaaagtagaaaggaaataatgatatgaagataaattacaaattgaaaacagggcaataataaagaaaagcaacaaatcaaaagctggttctcagaaaagtctaatgaaatgttagccctctggcaagactgattttttttcaagtagcagaaggagcaaacaatatgtaaaagagctgataaactaatatactatctccttaaacctgtgatgagcaatctgaggtgtgggccaaatgctaaacatttttattattgtgaaagaactagtcaaatatcttacctgtaaaatgtagatcaataatattaatctcagtcttttcatggaagggcttatgcttttaaatacttttcagcttttaaatatgacaaggtttaatatttctaagaataacacttaaatcagttatcagactgtcaagtacccagtcaacacaaagtaatctgaatgaaagatgtaaaaacctgtatttttgttactgcttcccaaatattactgttttagtagattaaaaagtgatttcaattttctcagcgataaccttctattcaataatgtaagtaatattttaagaatattattatatttctatctatgggacttaataaaggtattttcattttgagtgaaaaagaaccattgagctgggcgcagtggctcatgcctgtaaatcccagcactttgcggggctgaggcgggcagatcacctgaggtcaggagtttgagattagcctggccaacatggcaaaacccagtctctactaaaaatacaaaaattagccaggcgtggtggtgcacgcttgcagtcccagctactcggaaggctgaggcaagagaatcacttgaacccgggaggcggaggttgcagtgagcagagatcgcaccactgctttccgggctgggctggcaaagtgagactctgtctcaaaaaaaaaaaaaaaaaaaaattaacattgttattttttgtgagttgatcctccaaagaggttatttaccctccactctattaatattaatttggtttattaaaagaatagcaggactgtatcagtatctcattcacctctttgcctacaggcctcaacttgatctacatgcaagtaacctttttagaaagaagttactaacttttgtttgaccaccttgaacaaatcacttgaacctctgtggatcaaggtttttccaactcttaacttttggtttgagaccaaaatgattgcctatagtatttatcaactataaagtatgggtacctagaagcagcatgataccagcctaaacctgtttgggctttacattaatctttttttttttttttttttttttttgagatggagtcactctgtcacccaggctggagtgcagtggcgtgatctcggctcactgcaacctctgcctcccaggttcaagtgattctcctgtctcagcctcccaagtagctgagattataggcacacaccaccaggcgcgggtaattttttgtattttagtagagacagggtttcacggtgttgaccaggctggtctgaaactcctgagctcaggcaatccacctgcctcagcctcccaaagtgctaggattacaggcatgagccaccgcacccagcctacattaatctattaataagcattgcatcatggttaagagcacagtcttcagctaaatgtctgggtttcaatcctcactcactaactttatgggctgggataagtttgtaaccattctgtacttctattttctcatctgtaaaatgggaacaagagtgactatatcagagttgtgcaagttaattagatatcatatgtaacatatttaaagcaatgcctggccctaattaataccatgtgttagccgttgtcatcactattgattgtgcttccaagtattaacaatttgttgaaagctatcttcatttgttagggaaagagctccctggagccttaccagaaagctcaaatacaattatgaatgtagttcagattcagtgatggtacatttatcaccaatgttttgtgaaactgcacttgaagagagtcaaatacacaagtgtttggtcacttttacatataatctcacaagaaaaataccatatagactctatagtgcttttgtatattttcattgtgcttactttttttaatagaatggaatgaaataaaggaaagtaattattaagtaactggaaacctcatttactacatttactactcaatatgttgtattactcaacagtctagtaactgatctaagtattactcttagaaatattaaaactcttcatatttaacagctgaaaattatttaaaatcataagtccttccatgagaagactgaggttaatactrttgatccacatttttacagggtgagatatttgactagttctcttataataaaaatatttagaaaggcattgaatacctagtgaaaattcaaataacattctttactatttattacctaacattttttgctattagtgctgaaatgtgaaaatgaattacaagttaaaggagcaaagtaattttaatacttaattttggagccttactgaatgcaaacagcatagtacaaaattcaggaaactagtattgacctttaggcaaagattttctgaaataaaggtttaaggtacaatttgggttttcatttgtggttttccacaaaacattcattttcagcttttttttagagacagattttaatttattactccaaaactctctaaaatcataatatattgttattcttttccccttacattctttactaaatttttaaccatattaatttattctgtttggaacttaaggataaagacttgtcaaataaggcatagttcataaacaagagaaataactagtgctttaacaaaatttctgtaagttttttctccttttgcattagagactattttggggtaacaatttaattgtgatagggttttttttgttttgttttttttgaggaagacataggtccaaagtaacaatgagaggaattaytattaatcagtttctgaaccagtggactcaatgaaattgagtttcgtttgactgtttttcattagtggtgaacagtttgggttattcattcatttgcttgttcattcataaacatcaaaagccrgtatatttaagacactgaaaatcttaactctactaatatgtgtcctcaaatacttgctaattatatatcaaatgtgtttaaagtacatagtgtatatggtagtataaagtactctagaacaaacaactaaatagctcataaaacagttatctacttgaccattgataagtacaaacattatgttctactagagctataaaatcaaacamacttacatttcaacccagtgggcatatgaaggattatgacttagttacatcctatgtcttcacgtgtgcatctgtcaatttgtgaaacttgtaaaagtttagataagccatgaccttggataactacatggcattttaaatggaaggtarccatttatttattttattgttatcttaaataaataatgagtgatatacttagatctttccaaggatttactaaataaatatgcatttaaagattcaggtcctcaaaaaatttaaataaaactaccatatgacccagcaatcccactactgagtatatattcaaaggatattaaatcagtatgtcaaagaaatatctggactcccatgttcattgcaccattattcacaatagcttagatactgaatcaacctaagtgcccatgaacacatgaatggataaagaaaatatggtatatatactcagtggaatgctcttaacctttaaaaagagggaaatcctgccacttgggacaacatgaatgaacctggagaatattatgttaagggaagtaagccaggcacagaaagacacataccacatgatctcacttataagtgggatctaaaaaagtcaaaatcatagaacagaaaatagaatggtgactaccaagttctgctggtcgggagggccgagtgattgggaacatgttgaccaaatgataaaaaatttcagctaaacaggaggaacaagttcaattattgtataattgactgtaattaataacaacatattatatacttgaaaattgctgagagagtagactttcagtgttcataccataaaaaatgataagcatgtaaggtaatagatatgttaactagtttgatttagccatttcacaatatatacatatttcagaacatgttatacactgtaaatattgtgtcagtttaaaaataaaattaaaaggtacttttacccctaaaatcaaatttattttacaatgatattacgaggaacttaactattttctgagtatcggtatcaccaatcccttgttgttaacttgagaaaaaaaataaaggtggaataatgcaaactggaagcctttatatgatatcattgattaaaatatttgatgaaagtatcctttatctaataaagtttactaatgcattttaacctaattatagaatyatatttgatttctctttaatataccaaccttcagtggaaattttattcaaaagattattttttcttatatggtattgtgagtaagaaattaggaaaatgggaaatgaaaaaaaacaaaataggatactttttctttgcccacctcccttccatttgtcctttttrctttctatttaaaatttgacaaactaaattctatttaaaatttgatgatttctcctttaactttatgtccttttctttattacacatatatagaaaagagaaaaaaattgaatcaccccagtttaactgaaagcaaagaatctacaacaaaagacaatgatgagtaagtttgttatttttgaaattatatatgtgtatcttgcagaaagacgttcatatttgttaaagtgaccgtttaaaagcatttatttgtagaaattaatagtttatacctgacctgaaatattctttcttaagtaagtagaataccttagttgtgatgtggtttgtgatgttctrtaatggttatatatgatgccttaattttaatactcattgagccctgttctccgagcctatgcgtaatagaccagcgcagggtaaaactgaggaagacacttatttcagatttacatggatggagaagtaatgcgtggtttaggaacaaagtgtcttaacaaatagctggttcaggatggagctagaaacagtgaagccagcagagtgagagatctagaggaacctggaaggcctacatgcgagcaaccaatctttttcaaattgtcctgctggtggttcctttgaatgaagacattatctgcagaaagtctacgtaggaaaaatctgggaagaatacagatggctctccatgtctgtgtattacacatttgtggattcaaccaatgacaaattgaaaatatttcgagaaaaaaatgaatggttgcatctgtcctgaacatatacaaacttttttttcttgccattatttcctaaaccaatatagtataacaactatttatatagcatttacattgtgttaggtattataagtaatctagagatgattaaagtatatgggaggatatgcataggttatatgcagatacaccattttatataggagacttgagcctccatggattttggtatctgcaggagtcctggaaccaattctccacagatattgagggacagctgtatttgtatcttcttcctggaaggattgaattaagcagaacaggggttaaattttcaaagtagtgcatatgtttagctcatttaccatttcagtgtatcttctatgtaccacaccaatggacactaaagagtaaagagaaggaaaatgaagttttccccattgggagcttatgatcttttttttttttttccctgagagtctcactctgttgcccagcctggagcacaatggtgtgatcgccattcagtgcagccttaacctcctgggttcaagcaatcctcccacctcagcctcctgtgtagctgagactacaggtccacgccaccacgccctactaatttttgtgtattttttcggagacggagtttcgccatgttacccaggctagtatcgaacccctgggctcaagcgacccactcgcccaggcctcccaaagtgctgggattacaggtgtgagatactgcatgcagcctgggagcttatgatcttatgctgtaagttaatataccttcctcaatttagaaatgggttatgtttacaaatgtttttggagtcatttacatggaactcagaatgcattttccatgcaaatagtgttataatctgtggctacagccccaagtcagggcacagatctatttatttcataatatagctgaactatatagttttggtagtagtccagattaaaagatgtggaaactgagtgccatttaaaatactttagggacaaagagaagagtttttcaaagaagcctcattgtttggcatctcctccatctgtcctctgtttgcttttagtagctgttttccctcgacatgctgctcctccagctccaaatatttgcgtgtttcagtcttttctgccccacaaatatttttgttgtaaattatttcttcctactcctaatcaaagcttttgtttcctcagtgaactgatctcaactagatattaacaggaaagcattcttttttgtttaacttatttaatgttttttaacataggaaatatatgtacacaggaaaaagttcaaattatacaaaaggatatacagtgaaagcaagtagcaagtaaaaatttaaaaattacagataatcttgtatttgacagcaggtgcctgctaaaccaaattaatttctggtgcagttatataaaatgtaaataggcagcaaaggaggaaatgttgttggacaaaagtgataccagataatcaagcctgttgtttttctccctgaatcaggtccacttaaacttaatagtgtctttccttctttcttcttgtaaacccatcaatttatttagagcttagacttttaaaacaatagctcccatggcagtgggcttcaaggagcaagggaagagcaagaatcattgttatgagtcacataggaatttgcctatgtttacttaatttattaatttctctccatatttgtttctaaagatctctgttatttaagtatatcactccatgaattggtgttataattagtgagtttaagtaagagctgagacattttacaacatataaaaataataggccgggtgcccattattatctactaaaaatacaaaaattagctgggcatgktggcaggcgcctgtggtcccagctacacaggaggctgaggcaggagaatcacttgaacctgggatggggaggttgcagtgagttgatatcgtgccactgtactacagcctgggtgacagagcaagactctgtctcaaaaaaaaaaagtatttctatcaggagactgaggaaagaagattgcttgagaccaagagttcagggctgtggtacactgtgatccctcctgtaaatagctgctgcacaccagcctaggtaacacagtgagaccatctcttaaaaaaaaaaagaaaatgatacgtttcttttttttttttttttgagacagtgtcttgctgtgtcacccagtctggaatgcaatgacacaatctcatctcactgcaacctccgcctcctgggctcaagctgttctcctgcctcagcctccctagtagctgggattacaggcacccgctaccatgcacggctaatttttgtatttttagtagagaccgggttctgccttcttggccagactagtctcgaactcctaacctcaggtgatctgcccgcctcagcctcctaaagtgctgggattacaggcatgagccaccgcacctggccaggatgcatttctgattgtttttttcattcattaaaataactcagttctagctaataaagccatttttatctttagtaatagsttctttattccatttgtttagatttcttttattttttaaaaccactgcataaagacttggattttttgtttttcttaagaaacagagtcatgctctgtcacccatgctgaagtgcagtggcacaatcatagcccactataaccttaacctcttgggctcgagttatcctcccacctcagcctcctgagtagctagaagtacaggtatgttactacccctggctaattcttttatttttttgtagagatgttttcttgccatgttgcccaggctgaacttgcactcctgggctaaagcgatcctcttgcctcagcctgaagacttggattttgtaaatctcaaattaaatggaatattgccaggcatggtggttcatgcctgtaatcctagcactttgggaagctgaggcaagcaatttgcttgagcccaggagtttgagaccggcctgggcaacatggccagaccctgtctctacaaaatttttttttaaattaggtgggtgtggttgtgcacacctgtgatcccagctacttgggaggctgaggtgggaggatcacttgagcctaggaggttgagggtgcagtgagctgtgataatgtcactactctccagcctaagcgaccgggtgagacctcatctcaatcaatcagtgaatcaatcaataaacaacatttcacatttgtggatcagtttttgtttttgtttttgtttttttattttatttatttatttttttttttattgatcattcttgggtgtttctcccagagggggatttggcagggtcataggacaatagtggagggaaggtcagcagataaacaagtgaacaaaggtctctggttttcctaggcagaggaccctgcggccttccgcagtgtttgtgtccctgggtacttaagattagggagtggtgatgactcttaacgagcatgctgccttcaagcatctgtttaacaaagcacatctcgcacccttaatccatttaaccctgagtggacacagcacatgtttcagagagcacagggttggggataaggtcacagatcaacaggatcccaaggcagaagaatttttcttagtacagaacaaaatgaaaagtctcccatgtctacttccatccacacagacccggcaaccatccgatttctcaatttcttccccacccttcccgcctttctattccacaaaaccgccattgtcatcatggcccatccccaatgagccgctgggcacacctcccagacggggtcgtggctgggcagaggggctccccacttcccagtaggggcggccgggcagaagcgcccctcactacccggtaggggcggctggccgggcggggggctgaccccnnnnnnnnnnnnnnnnnnnnnnnnnnnnnnnnnnnnnnnnnnnnnnnnnnnnnnnnnnnnnnnnnnnnnnnnnnnnnnnnnnnnnnnnnnnnnnnnnnnnnnnnnnnnnnnnnnnnnnnnnnnnnnnnnnnnnnnnnnnnnnnnnnnnnnnnnnnnnnnnnnnnnnnnnnnnnnnnnnnnnnnnnnnnnnnnnnnnnnnnnnnnnnnnnnnnnnnnnnnnnnnnnnnnnnnnnnnnnnnnnnnnnnnnnnnnnnnnnnnnnnnnnnnnnnnnnnnnnnnnnnnnnnnnnnnnnnnnnnnnnnnnnnnnnnnnnnnnnnnnnnnnnnnnnnnnnnnnnnnnnnnnnnnnnnnnnnnnnnnnnnnnnnnnnnnnnnnnnnnnnnnnnnnnnnnnnnnnnnnnnnnnnnnnnnnnnnnnnnnnnnnnnnnnnnnnnnnnnnnnnnnnnnnnnnnnnnnnnnnnnnnnnnnnnnnnnnnnnnnnnnnnnnnnnnnnnnnnnnnnnnnnnnnnnnnnnnnnnnnnnnnnnnnnnnnnnnnnnnnnnnnnnnnnnnnnnnnnnnnnnnnnnnnnnnnnnnnnnnnnnnnnnnnnnnnnnnnnnnnnnnnnnnnnnnnnnnnnnnnnnnnnnnnnnnnnnnnnnnnnnnnnnnnnnnnnnnnnnnnnnnnnnnnnnnnnnnnnnnnnnnnnnnnnnnnnnnnnnnnnnnnnnnnnnnnnnnnnnnnnnnnnnnnnnnnnnnnnnnnnnnnnnnnnnnnnnnnnnnnnnnnnnnnnnnnnnnnnnnnnnnnnnnnnnnnnnnnnnnnnnnnnnnnnnnnnnnnnnnnnnnnnnnnnnnnnnnnnnnnnnnnnnnnnnnnnnnnnnnnnnnnnnnnnnnnnnnnnnnnnnnnnnnnnnnnnnnnnnnnnnnnnnnnnnnnnnnnnnnnnnnnnnnnnnnnnnnnnnnnnnnnnnnnnnnnnnnnnnnnnnnnnnnnnnnnnnnnnnnnnnnnnnnnnnnnnnnnnnnnnnnnnnnnnnnnnnnnnnnnnnnnnnnnnnnnnnnnnnnnnnnnnnnnnnnnnnnnnnnnnnnnnnnnnnnnnnnnnnnnnnnnnnnnnnnnnnnnnnnnnnnnnnnnnnnnnnnnnnnnnnnnnnnnnnnnnnnnnnnnnnnnnnnnnnnnnnnnnnnnnnnnnnnnnnnnnnnnnnnnnnnnnnnnnnnnnnnnnnnnnnnnnnnnnnnnnnnnnnnnnnnnnnnnnnnnnnnnnnnnnnnnnnnnnnnnnnnnnnnnnnnnnnnnnnnnnnnnnnnnnnnnnnnnnnnnnnnnnnnnnnnnnnnnnnnnnnnnnnnnnnnnnnnnnnnnnnnnnnnnnnnnnnnnnnnnnnnnnnnnnnnnnnnnnnnnnnnnnnnnnnnnnnnnnnnnnnnnnnnnnnnnnnnnnnnnnnnnnnnnnnnnnnnnnnnnnnnnnnnnnnnnnnnnnnnnnnnnnnnnnnnnnnnnnnnnnnnnnnnnnnnnnnnnnnnnnnnnnnnnnnnnnnnnnnnnnnnnnnnnnnnnnnnnnnnnnnnnnnnnnnnnnnnnnnnnnnnnnnnnnnnnnnnnnnnnnnnnnnnnnnnnnnnnnnnnnnnnnnnnnnnnnnnnnnnnnnnnnnnnnnnnnnnnnnnnnnnnnnnnnnnnnnnnnnnnnnnnnnnnnnnnnnnnnnnnnnnnnnnnnnnnnnnnnnnnnnnnnnnnnnnnnnnnnnnnnnnnnnnnnnnnnnnnnnnnnnnnnnnnnnnnnnnnnnnnnnnnnnnnnnnnnnnnnnnnnnnnnnnnnnnnnnnnnnnnnnnnnnnnnnnnnnnnnnnnnnnnnnnnnnnnnnnnnnnnnnnnnnnnnnnnnnnnnnnnnnnnnnnnnnnnnnnnnnnnnnnnnnnnnnnnnnnnnnnnnnnnnnnnnnnnnnnnnnnnnnnnnnnnnnnnnnnnnnnnnnnnnnnnnnnnnnnnnnnnnnnnnnnnnnnnnnnnnnnnnnnnnnnnnnnnnnnnnnnnnnnnnnnnnnnnnnnnnnnnnnnnnnnnnnnnnnnnnnnnnnnnnnnnnnnnnnnnnnngggagagggagagggagagggagagggagagggtggatcagttttaaatgatcataacattttatgttttgttttggcaatattctttttttttttctttgcaaaaatatcatagctaggagagataccagagacgaagcaaggcatctgcttctagaataattcctgtagcttcagtaccttgatggagtcactgtagattcagtgtttggtcctacactatacaaatttagaaactcaccatgagatgttgaagcataaggaattaatgaatactaatcagccttaggacaaaccgaaaaataatggaaatgccaatttattatgagaactttattgatatcagtagttttctcaggacagcctcttctgaaagtcagtctgttcagatttaaaaaaaaaaaaaaaagttattcactttgggaggctgaggcgggcggatgacgaggtctaggagcttgagaccagcctggccaatatggtgacaccccatccctactaaaaatacaaaaattagccaggcgtggtggcttgcacctgtagtcccagctactcaggaggctgaggcagaagaatcccttgaacccaggaggcggagcttgcagtgagccgagatggtgccactgcactccagcctgggtgacagagtgagactccatctcaaaaaaaaagagttatttaaagatattccacaatctaagaagtagaattaagggagtaagaagttttaacagataccttcatttagctgaattagttgtatatatccttttctctacaaaagatagcactgttatttgttatcagcatgggaaaaattttatctggacccttaccctcacaccatgcacaaaaatcaattccaggtggattggaagtctgaatatgaaaggtaaaagaataaaacttttaggggctgggcacgacggcttatgcctgtaatcccagcactttgggaggctgaggtgggcagatcatgaggtcaggagatagagaccatcctggctaacacaatgaaactctgtatctattaaaaatataaaaaaatagccaggcatggtggcgggcrcctgtagtcccagctacttgggaggctgaggcagaagaatggcgtgaacttgcagtgagccgagatcgcgccaccactgcactccagcctgggtgacagagcgagactctgtctcaaaaaaaaaaaaaaaaaacttttagaggactggaccttggattaggcaaaatgccaacaataaaagggaaaaaatggataaattaaacagctttaaaagtcctttttataaaaagaaactttttagagtgtgaaagtacagcccagcgtgaaaagatttgcaagacaatccaatagaaaaatgggcaaaagactttaattggtacttcacaagagcagattttcatgtaaaccagcaaacatatgaaaaggtactcagctggaaagtgtcatctgggaaaatgcaaattaaaacctccatgaagcaccactacatcctcactagaatgctgaaaatagaaaagaaggaaaatactgggtagatcttctggagtgagaatgtggaacaactggaactcaaataaactgctggtgggagtataagtagatgaaaaccactttgggaaactgtttggcaacatctaaaccaggatatatgcataccttatggcacagaaattccacttcagggtatatacccaacagaagtgtatacatatatttacccaaagacaaataccataatgatcattgcagtctaattcctagtcacctcaaatttgaaaatatccagatgtccatcaacagtcaaatggataaacaaattatggtatttatctaatggactacagtgaaaattatctrtagctaacaacaatggctgaatatcacaaacataatgttggatgtggaaaaaactagacacaaaaggtttcatagtgtataattccatttgtatgaagtataaaaataaccaaaactaatcaatactgctaaaagttagtagttattcttagtttctgggatgttgtcagtgttctctttcgtgatctgggtactaactgcaaytgaatgagctgtacacttatgtgtacccttgtctcttcttttatttctatactaatagactcccaaactctcatgtaaatgaagtcttgtgccgagaccagctcggtcggggagaccctaacccagtggygctagaggaattaaagacacacacacagaaatatagaggtgtgaagtgggaaatcaggggtctcacagccttyagagctgagagccccgaacagagatttacccacgtatttattaacagcaatccagtcattagcattgtttctatagatattaaattaactaaaagtatcccttatgggatgggctgaattaaaggaattaaaggaataggttgggctagttaactgcagcaggagcatgtccttaaggcatagatcgctcatgctattgtttgtggcttaagaatgcctttaagtggttttctgccctgggcgggccaggtgttccttgccctcattccggtaaacccacaaccttacagcgtgggcgttacggccatcatgaacatgtcacagtgctgcagagattttgtttatggccagtttagggccagtttacggccagattttggggggcttgttcccaacagtcttgaacaacaccagcaattttttcagacatgttatatgattaagtagatttttaacttttggactgcatggccttgcctgggacattttccaaactgtgttctataggacatttgtatctttagatatgcccataagtgttcatggggttaaaacataattttgggtcaggcatggtgggtcacgcctgtaatcccaacactttgggaggccaaggcgggcagatcacctgaggtcgggagttcgagaccagcctgaccaacatggagaaaccccgtctctagtaaaaatgcaaaaattagctgggcatggtgcccatgtctgtaatcccagctactcgggaggctgaggcaggagaattgcttgaacccgggaggcagaggttgtggtgagccgagatcgtgccattgcactccagcctgggcaataagagcaagactctgtctcaaaaaaaaaaataataataataataataatttatggtcaaataggtataagtaaaggagatatcttcatcttaaggatttacaaagcatagtaagtaaacatgggtaataatagctagtaattattgaatatttgccatgtcttaggcatatattatcacatttaatcctcttaacaacccagtgaggtagataatgttattgccctaacaacggtgaagaaactgactttagnnnnnnnnnnnnnnnnnnnnnnnnnnnnnnnnnnnnnnnnnnnnnnnnnnnnnnnnnnnnnnnnnnnnnnnnnnnnnnnnnnnnnnnnnnnnnnnnnnnnnnnnnnnnnnnnnnnnnnnnnnnnnnnnnnnnnnnnnnnnnnnnnnnnnnnnnnnnnnnnnnnnnnnnnnnnnnnnnnnnnnnnnnnnnnnnnnnnnnnnnnnnnnnnnnnnnnnnnnnnnnnnnnnnnnnnnnnnnacacaccaccacgcccaccttatttatttatttatttatttatttattttgagacagagttttgctcttattgcccaggctgaaatgcaatggcacgatctctgctcactgcaaccaccacctcctgggttcaagtaattcttctgcctcagcctcctgagtagctgggattacaggcatgcgcaaccacgcctggctaattttgtatttttagtagagatggggtttctccatgttggtcaggctggtcttgaactccctacctcaggtggtccgcccgcctcggcctcccaaagtgctgggattacaggagtaagccaccacgcctggccaattttttgtatttttagtagagacgggctttcaccatgtgggccaggatagtctygatatcttgaccttgtgacctgcctgcctcggcctcccaaagtgctgggattacaggcgtgagccaccgtgcccagctgcagacttcttttaatcattgtactagagtaactgacactatggtttactatcttattttgtctgcccagcatctcttcctgctgggattaacattctttaaatcactcgttaccccattccaataatgtggctctttatttaaagactaccaaagtcttacatgaccctaccctggacagttgattggtccaggggtaggcacctgacctaaacacagtcagtcagttatttcacagaatttataaaattggaagtaggaaaagagactacttctcagatggagatcttcaagcacagatgatactggcagccatgttttttactatgtattaatagatgaactggtttgcagtgagagagaaagaagcccatagccagagagaagagaggcattaggcagggtcctgtttgtcttctggcttctttctgttgctccttaagccttgctcaacctcagcttccctttgattatgggagatactctagtatccctccaataagtgccccctttttgtcttaaaagataaatatgtttaccttcagtcatttaccaataaaagaagatacagtatgtaagattacttcagggtttctcaatctcagcactgttgacatttgggttgggtaattctttttggtagaggctgtcctatacattatagattgcttaacaacatccttggcccctacccattagataagttgttagaacacagtgtggtattatgatggccagtatgacctatagatatgtctaatagagtctataaaactagaagatacagtggctcatttctgtaatctcagcattttgggaagccaaggtaggaggatcgcttgagcccagaagttcaaggccagcctgagcaacatagcgagactccatctctacattcaahcaatcaatcaatcaatcaatcagcaagcaagcaagctggatgtggtggtgtgcctgtagtcccactactcgagaggctgaggtgggaggatcactagggcccaggaggtggaggctgcagtgagtggtgatcatgccaatgcactctagcctgggtgacagagcgagaccctgtctcaaaaaaagaaaaaaaaaaccctagaaaataactataatttagaaagcaagatgcttttaaaatacattcttagccagttagaacaaataatctattttctgatatgagaacactaaatgttaatgattataaactactacaaaacaagtttctaaataaattttcttatttgcaaaagctagtgaatagtcaatatccatcactggcctgtaatcccaggactttaggaggccaaggagggaggatcacttgaggcaaggagttagagaccagcctgggcaacaaaatgagaccccatctctacaaaaactaaaaaaatgagccgagcatggtagtgtgcacctgtggacccagctacataggaggctgtttggagaatcatttgagcccaggaggtggaggctgacatctgcaggccgaaagagccatggccttggaagggccataaattccaccacactcttggtggctctcaccctgcagcttggagaaggcgcaatactccattaccactaatataaataatgtttgtaaaattcttacctaataaaacatttaggacaggcatgtctgcttacaagtaaggtattttttgtctgttaaaactagtctgtagcttgtttcatgaatgctttgtcaaattatggaagttaaagtgcaatgatawttgaagactataagtgatggtgtatcttgtttctaataagataaaactttttgcctttgttttatcttattagggaattatatgtcagtgtttgaaacatgctgtgtggtataataggtttaaaataaattctttaaaagaagaatactgaaactagccttgtagatatgtctggtgcacgtgatgaaacgtacagctttattggggttggtggcaatgccctgctggctaactttcaagtgactgggttttttaagtttggcaagtacaaaattctaaaattgggttttcctttagaaatgtgtagggtcgggggaggatgtcctaaccgtatgttgtcgtcatatgtagtttcatccagtgttccacatgtgtgactgctgtttctgagagaagtttccaaaatgtcaccatttctcagaactgaataaacgtattgccaagaggcttttcttaggaatgaaacgtatctgggtaaatgtaaacaaaattgtctctgtcttgacagtaccaaagttcacataaaaggtgaaagctcctggatcaatgccatggctccatggaaggcgatggatagtagatacatattaaaatatctatctgtaacactaatttgttaccattatgaatcctttcrgctgcatttgaggaaaaagtagttggctatttagaagtgtgtacatcattgttagtcattcttacagataaaaacatcttgggtcagcccactctgtccactcttataggctacagagaaaagtcataattggtgtcaatacaagttgatggtttccaatcttaaaaaaaaaatttaattaaaataaataaaaaataaatgttaaatgcagtaaaactacgaatttgaatagaaacatgactcaaatcatttttacaaatacatagttttgtttattcaaacaaaaatcttgagacccttaaaaacacaaaatttatgaagtagagttcatggagaaaagatgcttaagaactgcaaacaaaatttcccactggggctggatgtggtggctcacacctataatcccagcactttgggaggtcaagtcaagcagatcacttgagttcaggagttcaagcctgagcaacatagggagatcccatctctacaaaatttttttttttaattagcaagcctgggtggtacatgcttgtagtcccactactgaggaagctgagatgggaggatcactccagcgcagcagattgcactctagcctgggagacagaaaaataccctatcaagaaaaaaaaaaagaaaaaaatcccacgggtaaaatatctataaataccttttgtaagcttttaacagtttagagacattttttaaactttagattcttaaataattttaaatttacagaaaatttgcaagaatattaaaaagaattcctgaacactcccccagagtcgcaaattgttaacattttgtcacatgtactttcattctctctttcacacatgtgcacacacatacataggtactcaaacttttctgaatatttgagaagttgcagacatccttttttactgctaaatccttcagtgtgtatttcctaagaataatattatttaaccgtagtaaaaatattaaaatcaggaaatttaacattgatataattactgttatctagtgtatagtccaaattcaaattttcctagtaatgttctttattgcaatttttctcttgatgcaggattcaatccaagattacataaatagttcttaaagtttccttcaatctagaacaatttttttaaccttttattgtcttctctgacagtgatatttttaaatagtgtagactgttttttgtacgtcattcctcagttgtgtttgcctgatattttgtcattattcatgttatgtattttggggcaaaaatatagaagaatgttgaattacatcaagagatattttgtcctattattgatgaattttaatcatttgattacagtgatgttyaccaggtttatctatattaaaagtaatcattttccctttgtaattaataaatactttgtggggaggtactttgtcatgtttcacccagtagttttaacatacattgatgattcttgcctgagtcagttattactgtaatgattgccatagtcataattttctaactccatcatatctatatttattagttgaccttctgctggttggccatttaaaaattcatctgttcatagtgatacaaggtttttccttgacttccccttttccatatttctatcccatctcaaatctaaatctctgtctcctaagagcagcaataaatttgcacatttgcttaatcctacatcatacacaaaatacttgcagaattcccatgctcacagcactgctaaaaacaaacctgyaaagcattcaagatttgtttgcagttttttgtctctaaagatatatagtcaaattactgttttcaaaaattatttggattagttcttcatttgaagaagtattcatttgaaataggttttcttgtycgtgaattttacttttttctcatcctttttgactttttaaaatgagataagccatcattatggttctaaaagtcaaaactgttgccaaaaaaggatactcagagtagtgttaatccctccctcattccttctacctatttcttgtgggtaaccaaattcattagtttcttatttacctttcctatgtttatttccataaaattaagcagtttcatttattttttcttatttttttatacagataaggtggcacaccatatgtactcttttcactttgccttttttactgatgaatacgtcctgaaatcaattcctattgatcaatttggagaattttaaatgtaagaatcctctcaacaggaaaatacagttccatgttctaggtttaaaaatgtttttttcttcacaaaacaagtagttaatggcatgtcaataaagcccatttgtaaaaaaacagctacacrttaatattttatgtgaacttccatatcctttatgttttgcaaggaatatatataatttactgcgattggcttttcttcctcttggcaatttgctgctgctgtagctggcattgctatgaaaatgcagtaatggtgactgtcctgtaagttttattttcagataattgtagatttacttgccattgtgagaagtaaaacagagacatcatgtgtattgttttcctagtttcccaacataacatcttacaaaactgtagtacaatatcacaaccaggaaattgacattgactcaatccactgatcttattcatatttcctgttttgcaatgaactcatttgtgtgtgtgtatttagttctgtgcaattttatcacgtgtagattcttgtatctaccactgtagttatgttacagaacagttccatcaccgcgaggatcccacctgttgtataggactttttttttttttttttttttttgagacagagtttcgctcttgttgcccatgctggagtgcaatggcatgatcttggctcactgcaacctccaccacctgggttcaagtgattctcctgcctcagcctcccagatagctgggattataggtgcacgccaccaccatgcctggctagtttttagtagagacggggtttcaccatgttggccagggtggtcttgaactcctgacctcaggtgatccacccacctcagccttccaaagtgctgggattataggcatgagccactgtgcccagcctaggacttatttttagtcactagctcattctctcttacaggcagaagagtaacttttttagatgtgtattttttgttatttctgcactaacccaaataaaatctttttaatagtagtgagttatgccagaactggttttttaaaaatttttgttgttttgttttgcattatgtatgcaatttaattgtgacaaccactggtcagtattctaaattcctcttaactgctcaaatgatggtctctagggataagttagttgaaaatgtttatcagaatcttaggatgaagatataagcctatattccatattaggcctattctgtaggtgagcaaaggctaagaggaaagccaatcttaaaaagagaattattttcaactgtttaaaattttagatatggaagactgaaagctttcccctaaagatcaggagcaaaacaaggacaccagctttcaccactggtgttcaacattgtattggaaattctagccagagcaattagataagaaaaagaaataaaagtcatttaaattggaagggaaaaagtaaaacaatctttatttgaagacaagatgattctctatagagaaaatcccaagagtgcacaagaagctactagagctaataaacagagtcaaaaaaagtttcagggtataagatcaacacacaaaaatcagtttccatatacctgtaatgaatttgaataggaaattaaggaagcagtccattgcagtagcatctgaaaggataaaatacacaggaataaatttaactaaagaggtaaaaaacttgtacactagaaactacaattcatttttgaaagaaattaaagaagatctaaataaaaggaaagatattctgtattcatgggcaagaagatttaatattgttaagatgttaatgctactacccaaagcaatctacagattcactgtaattcctatatttcttttgcagaatgattaaacagcattttttgcagaaatggaaaaacctgtccttaaattcatatgaagctacaggagaccctaaatagccaaacaatcttgaaaaaggacaaagttggaagactcatatttcctgatttcaaaacatactacaaagctacagtcatcaaaacagtatggcactggcgttaacagtagccatagagaccaatggaatagaattgggggtccaaaacaaatgcatacatctatggccagttggtttttgacaaggaggccaagtttatttaatggagaaagaatagtctcttcaataaatgttgctgggaaacaggatttccttacaaaaaagaatgaagttggattcctacctcacagcatatgtaaaaattaaatcaaaatggatcagtgacctaaatataagggctaaaaccatttataactatcttagaggaaaacataatgataaatcttcatgaccttgaatttgttgatagattcttatataacaacaccaaaagcacaatgaacaaaagaaaaaataaatttgactttatcaaaagtaaaagcttttgtgtttcaaagtacaccatcaagaaagtgaaaaggcaaagcacagaatgggagaaaatattttcaaattatatatctaataagggtttaaggtccagagtagatcaagagcttccaaaactcaacaagaaaaaagacaatccaattttaaatataggcaaagacttgagtagattttttttttttttttttttttttttgagatggagtctcactctgtcgcccaggctggagtgcagtggcgcaatcttggcttactgcaagctccgcctcccgggttcacgccattctccggcctcagcctgctgaatagctgggactacaggcacccgccaccatgcctggctaactttttttttttttttttttgtagttttagtagagacggggtttcaccatgttagccagagtggtctcaatctcctaacctcgtgatctgcccacctcagcctcccaaagtgctgggattacaggcatgagccactgcgccaggccttgagtagatatttcttgaaagaacttatataaattgccaataaacacatgaaaatatattaaatatcattagtcattaaaggaatgcaaatcaaaaccacagtgagaccttacatcttaaaccttacatctacgaggatgtctatttaaacaaacaataaaaatggaaaataacaaatattggcaaggatatagagaaattaaaacccttgtacattgtagctcctgtggaaaacagtctggcacttttctcaaaaagttaaacatataattaccataagaccaagcaatttcactcctaggtatatgcccaaaataaatgaaaacagtgactcagatatttatataccaatgtttattccatcattattcacaataaccaaaagacaggaaacaacccaaatgttcatcagcaaatgaatggataaagtgtggtatgtacatgcagtggaatattatttatttatgaaaaggaatgaagttctgatacatgctacaacattgaagaatcttgaaagcattatgctaagtgaaataagccagacacataaggacaaatactgtaagattccagttgtatgcaatgtctagaatagactaattcaaagagatagaaaggagattaaaggttactagaggctggaggtgggaagcatgaagagttactgcttaatggttatacagtttctgtttgtagtaatagaaaacttttggaaatagatagtggtgatggttgcacaacattgtgaatgtaattaatgtcactgaattgtacatttaaaaatgtttaaaatgacaaatcttgtatatagtttatcacaataagaaatttttttagaaaaaattttaagctgaacggaatgcagaaaagctccttgagacagcctgtaaaaatgtaatgaaataaatagagctaaacacgggggggaatttttttttttgacaaagaatgtcaattttatttatattgaccagatttttttgtgatcagtcttcaggaaaaatgtttttaattaatttttatgtgcataagaattgcctggaaatgcatatttctgaccttctctgttagtagttcttggatgcagcccagaaatttgtatttttaaccatttaccaaggaattctgatgccagttgtaactgaattacacttttggaaatattatataatggttgagaacataggtcaaacacacctgggttcaagtcctgactgtgccccttgttataaaacccggataattaaataatttattggtacttcagttttcatagctgtaaaatggagacagtatttcccacagacagttgttttgaaaattaagtaagatatagtttgtaaagtagtaagtatagtgccttaaactaagaaagcattaaraaaawgttaacaatatatttcattgttttcataattcaactgtcatccaaaattatcagtttaggtcaagggagatggagattcagtgacctatttacctttttctgcgtgaatcatagtattgtaaagataaagaaaacctaaggaattcatccctgttatgtacattttaatgcacaagtcttgagatttataaaagtacaatttcttagaggtaataactttcagataatagcttttagtaatagaattaattagtagtgtatttgtggcctttgagaatgctgtattagaatactaaggcagaaatctaaatacaagagtttaattttaatatggaggaagtggagattgggttaggctgtcatgttgagcagaaatttgtgaaagaagattcattaaattaggtacatggagagttaagcarcattgggtgctcagcaaaatcatacttctaatattgactgtcaattctactgtgagacttttttttttttccatagtactgacagcttagactaggagcaatgaaaacaaatagggacatccagggttacatgtgagaaagacatatgtggtggaaagttagggaactgaattaattaactttgtcagcaatataactgatgaatcatggaaaatatataagacaatatgagaaggaagtaaaaaaatgagaaaactgcaggatgggcatacttcacttgaatctagggatggatggtcactggaccaggtcttttttattctgttcattgatccatcaaatagttactgggtccctcccataactgcaggcactttattagttaacacaggttgtaacartaaataaggtagataccgcccttgccttcacggaacttacaatatggtaagggagacctatgtcaaacaattggaagttacaaaaaaggagggaaatcaaaaattttttcaggccattatcatggcttttacagggtttcactcttcttccactatatccacaatgcctacacagtacagtagataccatggcttgcatccgagggaatctataaatcactgggttcctttttcatctgctctactcctttgcttctcattctttcacatctaggatggcacagcaggagctgagttaatgcttgctaacacctgcttcaataaatctgaattagaagcaccaatttaatacaatttctctttgttcttttagttctctcctcagaatacatctgaggaacttaatagagaaaaagtaaatgatgaaactacatttgaagctaagaatggaaaataattgaaagaattgaaagtggccaagataggaagaacccagaactggtacagaatgatagttttgaaagtcaagttacacctgacttgagactgaagaagttaatgtagaaggaaggaaaagcagaattaatggatacatccaatgcttctcatggattttatttggctgatgcacctaatttcagttgtttttcagaataaagactttttctttgaggaatgtgagagaactctgaatttcacaatgcaactcttctaagcaaattggaaaactgcactgaaaatcctgaattttgacatgtagctccctcaagagaaaaactacgagatgctttaaaaaaatgctgctgggtttttactctacgatgaaaaagaaggttaattcaaggaggaccaagacttcagatttcttaggttgtgctacagtagtctttgaccacaatgcagatttgattaaatcttgtaaggatgccgtaaaactggcaacagtcactggatacctggatgtagtggcccattgacatctggatggctcaaagggtcattataagataaaggatttggtccaatttagtctagcgagaggcaaatctatttgagaaagaaatactattctgcaaaatatgaatggcacccaatgatgatacttttactcaccaacttgaaagagccacaataactttgaaattttgtaccataatgaacttgagaaatatattcttcaggcagcttgaaagaaatgaaagatcgttggttttcaggaataaacaaattagtaaaggaacatcaagatgatattaaaaaccaagggactgtatgcaaaccataatgctatgttagggcaacaaagtgaaatttgaaccatgcattgaaaatacagaaaagggctctcagtagcaatgcatatctacttttcagcacaagtaggatgtttatgagaattccattttgtctaggatgaagaaagtggtagaattatttctcccaaaatctgctcagcaaatagtttatctccaaagattatgaaggcttcttcagtgattcagaaagtgtggaaaagaatgccttgaaaaaaaagaatttttcaggatttaacagttgtataacacttaaaaaaccattcatgggaatttggttgccttcaaggtgggaaaaaggtgatttcgtctagggagaagaaaaggaggaggagaggaaagggaatcaaaatagtaataagaagagcaatggcatgtctactagtcctactacttgatcctgcaatggatacaagtgtccttgagaaagcaccttcagcatatcaaagatgttttgaaaacaacttccccagataattgatatttaatccatacaagtctccaagattgttaaaacagtttgttttagcttagcccctcaattactatcttaatttaggagagctgctagtaggtcctttggggatgctacattatacaactttggggggcaccatttacatctaactctatgtgaacagagccccttggagacattcaagatggcagtcctgcgggacctaatccttcccacacaattccctatgggttaacagggagtaccatcagctcattaagatagggtaagacagtttgaaaaggctctactattccagttctcccaggaaagggatgcaaggtataaggcaacaagcccctcagattatttctcgtagcaaagtaacttatttgcctccactttgtactcctagggcactcagtaggctttggcatcatatatgagaagctagaggatccagccttggtgggagtcccttaagtccttgtttcttcaggtctttggatccaatttgaagaagcaggaattcctttatgataccatctctcaaactgaggttctcctgttaagcaatcagggcctcagacagatgacttctgattgaaaatacgtaataaaggaaaacttttaaagaaaaaaaacacccaaaattccactgtcctcataatttttagctttttcataatgctatcaaaagtctcttgtttcttgttcgcatacttagataaaattttacttagttgaaacttactgtacatatacrttgtatatcaaaattttaacatatttgtcttatttttaataacaaaaatgtcaatgactaacactgatgtaatcttgaaaaagcatttaaatagaatttctggtttctctcataaaatctatatggatttatgctgtttgaaacagtacgcactagccatacatggctaatgagcacttgaaatgtggctagtatgaaatgagatgtgctgttaatatgtaaagtatacctggatttgaaaaaagtataaaatatctcaataatttttatattcattatatgttgaaatattttgaatatattgatttaaatacttaaacatgaaaattattaaagaaaatttacctttttattccytttagtgtggctactaaaaattttaaattacatatatggtttacattatttttctatcagactgtgttgatatagattatcacaaacagctgtggggtcttaaaattggaaaagcaactaaaattttaacaataagggaatgtttaaatcatttttagtatgtttactaaatagaatattgtgcagccttcaatatgtggccccccaaaatgtatataatattgtattaagtaaagaaagcacagccagacaccatggctcacacctgtaatcacagtgctttgggaggccaaggtaagaggatcgattgaacccaggaggttgaggctgcagtgagccatgatcacaccactgcacttcagcctgggtaacagaggtaaaccccatttctttataaaaaggaaaaaaaaagtatgataacaaagttacacaatttttttttttaaactagaagcatttttccaaaaagctaactggagatatgttcagaagattgaattccaagtgatgttttcctcttttccttttctttattttcatatttaaaataaagtcataaaactttttttattttaaaaagaagttactaggtgatactgattcatagactcagatcaaggtaaatgaaggaatggtggtgtattagtgttctcaatgtggcattgtggagaaaggaacagccaactatgtcttccatcccactgctcagtgggaatcggaaagtaaaactccaaaagaggggacagttgataatatatattgtgtttgtaaagaatgaaagaacctaagtctaaggtcctttaaaaagagttaaagctctgaaaatgatttgccatgtttaaatgcttccccttgctaagtattgtctttttctttattactagattcatgatgttgctatcaaaagttgagaaattgtcagaagaaatcatggagataatgcaaaatttaagtagtatacaggtttgcattttttcatacttctaccctgtttgaaaaggataaaatsaaagaagtgtcccagattggagaatccaatccaggaaagagtttgcatagagtatgtttaatttacttttcatgggaattttttttttaataggagaacactatttaaccataatattttagtaatatcttgcttttcacatttaaacataaatttatagattacatttagtctttttagttaattataaattgttttttttcaggcatttttgggcttgaaatagttggcctgccagaaacagttaaatatcctaacataaagtttaagtttttcaaatgaaggaaacaatatactgtattttcactagacatgtcagtaatctcatgtgtgtagagaacttaactcattcaagatgactttcttgtaggctttggagggcagtagagagcttgaaaatctcattggaatctcctgtgcatcacatttcttaaaaagagaaatgcagaaaaccaaagaactaagtaagaatttttgagttttcaatgacagtaattttaaagataaacctattaatttgtctcatttacatttgatagacttctttatatataccattactggacatgtgataaaaatactattaccttctttaaataagaagccacatgtcttttatcaggatgtgttattttggggattcttcttgaatgtgaatgaaaagaatgcaccttggaaactggtagtaggcatttcaaatgtaatgcccatttttataatatataataaggtattatattttatatttggtacttataaatatgtattattttgaattatttttttctcatgaagttgtttgttgcaagtattgagaaattatccatattctatgttaattcttgacatgggatttttacttcttttagtgacaaaagtgaataaacaaaaactgtttgaaaagagtacaggacttcctcacaaaggtaagtagttgtgttttagtttattacataaagatgctttcatcccattttgccaattaaaactaatcatcatgaatcctttttagtggttttcttttttcctcagagatccctgttctgaagtatgttcttttaraagatcacaaatctcatttgaaaagctttatattgcatttagcagaagatgatatctgatgagatcaacttctctgatgattgaactttttaaatgtcttttgaaatgcaatcttcaacataagatttgaattttgtctttttattaaaatttctttttgagaatacaaataggagcaacaatgcattaatatactgcagtttttagtgttgcactagaagcattgaaagttactttctaactagtattctggaaactttcagatcattaatatgctttgttctactatgaactcttatgtctgagcatttcacagtatggaaaactaaataaacagtttttaggtttccataggaagtacacattcacaccttcacacctcaataagcaaagtaatcatgaactgtaaaataccaaaacctttagactaatacaggagtgattaatagtacctacatgwatgccatttagcaatttctgcaagtggaattaggccttaaaatgggtggccgtgttttcagcctaccacttttaaataccgatgactgccatttattgagtaactataattacaaatattctgaatactaggatcagcaaatctttacagcaatgtggaaagatagctacactgtattatcattgtcattatagacaaggaacgaagacacaaaaaatattaagtaacttgcccaagacttctacttaggtaacagagcaaggattccaaccaaagaccagtctggcctcaaaaactctggtcttttcattattctgtgttatctcttcctaaaacaaatgaaatcatccaatcatcttagcttttagattcaaacatggcacataattgaaactgcttcacccaatctggtatgttagcctgggtttagaacctttaataagccagtgatcggttggcaatggaaagtgctgggattgccagccagtcagatctaaaggccagctgggtcatggcagggctgcagccatggcaagactcctccaaagctcatgtgggaagggagctgartaggcttcctgagcttttcagttgaacaactaacrtctactgtgatgccaagaatttaagaacatgaaaggtggctttttcttggatgtggcttgggatctttttaaaaaaaaaaaagaaagaaagaaaagaaaaagaaaaaagaaaaatttagaggcaggattgtaccctgtcacccagactgaagtgatgattagtgaagtgggattacaggcataagccaacacgcctggcctcttgtctgttactttagttgtgtmatttgattagaatgtgtaactgggtttcagtggtttcaatctctcctaagttgacaagttttagaggatcacaataggaaagcaaaatgtttattatttcccaactggaagaaatcttgcttctatatattctacaccaatagtgtgatttccttaaaaatctgtaacttcctagaactaactagaattaggcttaatatagttggcctttgcaaacagctttgagaaataaggaagaggaaaactctggaataaataagtgaactgtcaatgctaataatataaagaaaaatttttttaatttatatttcattaaaatatttttccttccaggggaaacttttttcatttccttatggacatctaaaatacataacttcattgtgtgtttatgcatgatcagccttaaaactgttttctattattttaggcattaaggctgacttgcccattaccagattttcccaaaggaccgagttcctgcatagaggagactgttatcactaaaccatgtttgtaaatttctaataatcattgatttaaatgaaaactcagtttaaaaaatatataatacatagtatctatataagtatgttatatactactgtgtgttatattctattctacgtagtcattgtccaattctgtttcttggcaggagctacattagctctttatatttcctgaggtattaaaaacttcattagctttttaactaattttgggaaattcatattgcctaaaaaatagattaaagcttatttttgttgtaatttgattttgagctatatagttttcctgagtgcttttcctacctctttctctggttcctaacatacatattagttttgggggttttttgtttgttttgttttttggttaatgattatgtacacacaaatgtgcacacacatgcaaattttttgtactaagctaacaacttttacccttttctgctcatacattcattttaagaggattttgctaattcttttgacatctcaaactagtttgctttatatgtccctcattttgcaatctggccttgaaatttccactttcttttatttatttatttttattatgctattacacagaattgtttaaattttaaaatgttttgggagtttgtcataatattagaaaataagtaaaataaaaatcatccctataatatgtataggatttgttaaggtaattatgaaaattagaataagccaattacttgtttcactatcaaaagaatgtccttcagattcttctgggtttttggtgggtttttttgtttgtttgttttttggtctttcagattcttaaaaaattttcctggaatagttaaaatagacaataccatgagaatttcaatatttatgctatcattgcctcttctaattggtcttttagttctagtaatatttattttttcatttcagtgggaatttcagttaatgtcagttacagtctttattacaggaagagtagaattatraaaataacactctagtgttttaaataaatagacatctgacacacattcttaaggctttatataacttattcaagagaaatttaaaacatacacaataaaattaaaaggcacactgagattttcatagtgtcataagaactggacctggtaaatcaggggatgccttgatgagagtatatgaataaaagaggatctcctctgctaaacacagatttcttaaacaaaggaaggcttctttctttcttcagttacttaggaaataagcctaattttgctttcttcaataacactggctttatgactattaggaaaataatgaaatgaaaggttctttttctgtaagatttggatgtgaattttcataattattttaaatttgttatgctgaagacttaagacatatgaccattcagtgggctgatacagatgaaatgtcacattatcatcacatggtgaggcatgaaatttatttactttacataatcaacctctacttaaaacaacttgttacagatattccttagtcaatagatggcattatatagtagttaatattttcagttttttctgaagataattaaaaataccatcgttagtctatgactagtacttccaataaacaaaatgtttttgaaaagaatgtaagcaaattgtagagcagttgccaagatatgaaatctagacacttagcttcagtccaaaacatattttatctgttttgagaataattgtgtaggttgcagtatgcatattttaaatgaaatggaaccatctgaactttacattgttcagtgttycagctgtttgtaatagaaaatatttcagaatttccaactttggtctgttttaaaaagcataaactacaatgttcctgtattctttagttaactttctgtattcttacatagtaaaattcgtcttggttatagattttaaagttatcagattcttaracaacaggacaaatttaaaactctttctgttctaacactataaaatagtttgatattgcctcttcattytaaccacccactgaagtattttttaaacataaaaatatgttgttctttccccaactcaggcttgaaaaagtattcatcatatcagctgaataatttcactcccagaagactactacccttttagttttctattttatcttaacattaaacaatatatttttttcaaacagatacttcaattttaaaagcactgaggtttgaagtttagacgtgacgacttttaggagaaacaacagaaattccccctatgctttaacattctgggtttatctggagataaaaaatgaagccattaattttgatagcacaaatayacattaatgtacaactatagtcctcagctctttataatgattcagctatcatgtatgccatatgtgaatcataacctttcctattaataatgttaatgctcttgttttacacgattcgtcattgttttggggtatgcatttcagctgctaaaaatgcttacttgagatttgtctaggatttaagtaaaaataaactgatttattacttttcaaagccttttaaataatttctttcatgatttaaattttttatactttaacagaagtatgataatttttctttcaaataaaatcagtagaaaaaattttaaactatagatttggactcacttaatagcaattaggtgtttaagaggtgtaaataacttgctatcagacattacaaatatccaggtgctcagtatgtgctgatgacaacaaaattgaaaagaaagactgtaataattctgactggttttctctgcagaagatattgattatttgtgtgtggtgagagatttggaaaattcaattaaaggagttgtgcaaaggtttcataaattttccttctacagcgtgtacacagacattgttgcgtattaaatcagtgcagcacttcacaatatattttctttgaaacataaaaataaataacatttaaacagttctgcttactacagaaacaaattttattttctgtgaagcatttagtcatgtgctatcactgactcatacacatttgccagctgtaacaaattttatagacattttccccagagacatatctcacatactatgaatttttaaatgagcaaacggtgaagaagggatgtcagcaatataaaaattgatcagttaaaagataaaagcataagtaaagagatttgtatggtagtcttaataggttttattaaataaaaatactgtaaaaagacagtaatgaatagactgaagactattcttgaggtggagaaaaattattctggcacatttagtagaaattggttttgtgtcacctgacaggtgaacttttttttcccattttttactctcagagtagtcaaaaaagccccacaaaaaaagagttagataaattatctaagtggtttacatattttaaacacaataaagcaaatgtttatagtattatataactagttatatagttaaaagcaggacttggtaattattaaatattaggtgatttttcctccagttcagacctcagataagaggagggtagtcayttttattcatactattcacaccaagtgcttcagccctctggaacctctctttcaggaccccagaacactttgctacctttccctctgcctagattgcttttttttttttattttttattatactttaagttttagggtacatgtgcacaatgtgcaggttagttacatatgtatacatgtgccatgctggtgtgctgcacccattaactcgtcatttagcattaggtatatctcctaatgctatccctcccccctccccccaccccacaacagtccccagagtgtgatgttccccttcctgtgtccatgtgttctcattgttcaattcccacctatgagtgagaacatgcggtgtttggttttttgtccttgcaatagtttactgagaatgatgatttccaatttcgtccatgtccctacaaaggacatgaactcaccattttttatggcttcatagtattccatggtgtatatgtgccacattttcttaatccagtctatcattgttggacttttgggttggttccaagtctttgctattgtgaatagtgccgcaataaacatacgtgtgcatgtgtctttatagcagcatgatttatagtcctttgggtatatacccagtaatgggatggctgggtcaaatggtatttctagttctagatccctgaggaatcgccacactgacttccacaatggttgaactagtttacagtcccaccaacagtgtaaaagtgttcctatttctccacatcctctccagcacctgttgtttcctgactttttaatgattgcttttttctctgtcttacaaactcctgctcatcctttaaggtcagcctcagatgtcacaacctctgtgaagctctccccagctctcctaggtaaagctaaattgcttcatctttgaggctcccacaacacttgtctgaatattttaaatgtatcatgttgtagtgcattgtaattgcctggttacaggactctttctgggctcctctttggcagacaaacaaaaagtcttatctatgtatgatagttccagagcctagcacagtgcctggatagagcctggaaagaagttccacatgcagtacagccaatgtgtgatgaatgaaaagaactttttttaaagaattatctaagtattttcaaatacttataaattgctattttcttacctcattaatgtttattgagtgcctaccatgctccaggcattattctagcattgggaacacactgacaaacaaggcagacatagtcctgccctcagggatatagaatctagcacaaatgacagtcattttagtaaccataaagagtgtactaacaatggtaataagcatgtattgtaataaatgtcttggaagttttcgtaataaatttgaaaatgtatattctgaaatagaatcaggctaactatagcatgttgaaatgagaatttatagccttagagctgctattagtataaaacaagacttcaggttgttttaatttcattttgcttcaacatttattctgcatcatatactgtggcaagttgctttgaattgttttctgaaaaaaaaaamctttcttctttcatatagcatcacgtcatcttgacagctatgaattccttaaagccattttaaactgaggtactgtttcacctttctaatttagtttaaccttgtgaaatttcactgtgttttgttcaggtggaaacattttatttacattatcagatttggtattgtcttcctgtaagaaaatagggatatagctttggagctttagttgaacttatattaatctagtcttatcaacaacaggagggcatctgacatcagttagaggctgattggaaagaactgttgagctgacgacgctaactttaaaagtcagagaggacacatttttaactgagtgtaaaagggtccttaatcaagcatctttcatataaatagctaaatagactagctaaatagatgctgacaagtggactatagtttctgtaggacacatctgactgaacaagatataactagtctgttaaatttggaaatgtgctaaattaagtaaataaatctatatttattagttataccttgccttcagaacaattcctattgattcagcaatacaagtaaaaatgatgtgtttataaatagcttattataacaaataagccaaaagcaatatgagtcatgatatattagtgtttagtatacctataactgaaggttcacattaagaactgacattggctgggcatggtggctcacgcctgtaatcccagcactttgggaggctgaggcaggtggaccactcgaggtcaggagttcgagaccagcctggccaacatggtgaaaccccgtctctactaaaaatacaaaaaattagccggctagcttgcgcctgaatcccagctactcaggaggctgaggcaggagaatcgcttgaacccaggaggcagaggttgcagtgagctgagatcacgccactgcactccagcctgggcgactgagtgaaactctgtctcaggaaaaaacaacaacaaaaactggcattaggggctaggcatggtgattcatgcctgtaatcccagcactgtgagaggccaaggtgagaggatcgcttgagcccaggaccagcctaggcaacacagtgacagaccatgtctctacaaaaaaatagaaaaataagctgggtatggtggcgcatgtctgtagtcccagctacttaggaggctgagttgggaggatcacttgagcccacgtggtagaggctgtagtcagccatgatcactgcactcagcctgggtgacagagcgagaccctgtctccaaaaaaaaaaaaaagaattcttagcttaccaggtgttttgcctgctatctcttaggggaaaaaaaatcaaagcacaattaaagaattatattctacctccaagatrcttttctttggaaatggtatctcaagtgattaatattagcttcctgacaagctagtcttaatatttgcaaagcatcttatatagaaaattgtgtccgttttttatgaaaacgtttattctgttgtatgyagtaacaatagcttatattctgttgtttgcagtgagtaatagcttataataatagctaatatttattgagtactttctgttgttttgtttgtttgttttttgaaatggagtcttgctctgtcactcaggctggagtgcagtggcacgatctcggctcactgaaacctccacctcctgtattcaagtgattctcctgccccagcctcccgagtagctgggattacagttgagcaccaccatgcccggctgattgtttgtatttttattagacatggggtttcaccatgttggccaggctggtcttgaactcctaacctcaagtgatctgcctgcctcggcctcccaaagtgctgcaattacaggaatgagccaccgtgcccagccctattgagtaatttctatgtgccagcagtgttataaacactttatacgtatcccatttaatcttcacaacaacgtatgaggcaaatacagttattacttttattttataggtaaggcaattgaggcacaaacgaggttaagtaccttgtcccagaatcacctaaaacagggccaggatactaaactgagtagtctggtgccagtgcctgtgctcttgccacyacccagtagtaatctgtgaatgtcaggtttcactactggccaaggtttttatatcctgttaagtaaggataatatataaatattatccttataaatcctatatgtaataggagatatatatatattgtaataggagatatatatatatctcctatatgtaataggagatatatatatattgtaataggagatatatatatatcctattatgtaatagattatatatgtcctatatgtaatatcctacatatatgtacatatatacatatatatcctatatgtaatatatatatcctatatgtaatatatatataggatatatatatcttatatatatccatccacatacacttatattcattcattataaggttaccattttacaaaatttctgacccatgaaaatccaacagagaacatattaggtggtgatcatagatacatcgtcacagttacacatttagtaaatgaacgtgcaacatttagtgtttgataatctctgtaataaacttrcagggaattcagagtactgagaatagctttgtgttaatggattttagtaaagataaccacattttggggtgttcttttgagtctttgagtaatactttcaagaaactggaaagaattaaggttgagctaccagtcaacttccctttcagtgagaagcaaaagagcaatgacagtgaaattaagtgacttcacctttgaggcatttccctcagttctgcctttcaccatgttttcatctcactttgagcatttccttcattatctccttcgttccctgacttttcactttagtgtatatggtttccaaattattatagtctcctgggctataaacccacaatctcagctgccatacaatgtcccccaagtatactgatttcatcatttcccctccaaagatgtttttcttctacctttctagggattatatcattccattggtcaaattctctctctctttgtccccacatccaaacgctgccagattatattacttctgagaatgcttaattctcctttccacacccactgtaccagtttatttctccattacctctcttccagattatcattgtccctattgtaacctacctgtctgcactttggtccctttcccctacagcctatcctgctactggacaaatgtatgctttagaaggtatcactctaccatatgtatgataaaatccaaatttaaactgacattcaggagtctccctgatctgcccacagcttacctttccagtttcttcattgtgccttattcattccagattacttgccatttctcagacaccttccccagaaagtgcctttctcatgtccttaccttgggtcttgtctgctcaacctagcatgccttttccctcattattgtcaaaattttacccgtctttcaaaacctgcttagaactcatcttctgcataagcttccccaaatccctctcccccatattctctcattgctcttttgtatatttgtcatagctgcctgactggtatgcgtaagggaggatgtgaatgaaactcctgattttgtccttatgccctagaaacctgacagtactcctgatatcaccgtggccaacttccctacctgcacaactgctccagccctctgtcacacttcagtgattattcctcttgacctgtaattgttcagtggggaggactgtcccatacarattcactcccagagcctttaaaaagtgaagcctttgtgaaacaatgctagaataagagagaaagtaagggtgacagcaacccagaggccacagccagagtgctaagaccatcaaaagatgggaagagaaaaacattttggctaatgataacgggatattgggatactttagtaacaatgtggatgaatcacttgggtaacacaaggatgaggcttagtatgaacaaagcgctgtgtattatgacagtttgaaacctaataaggacacaaaatataaggcaagttatgataaatgatacaagttcagactcttctaagttctggccaataacaagtacaaacaaggattgtgcatccaatgaggatcaaagtatcaacttgattggtggtggaattgataacccccaacatggcaggctctctagtagaagcttggggtaactaaggtagattgccttaaagcagaaatgcaacctcttctttctcacactaagtttaaatcttgaattctgtgcactttactgaacctaaaagctggatcttttaaatagacccccaagtccgtgtgactgttaatgctgtgaagaccacaagcctgccttttacatgcttgactgcaggtcagcacaatagaatgggttggtctccctactacatgaaattaggaagtattataataaaaaaggtccactgggattgagagtagacagtgatagggaaactacaaggagggaagaatttgtgtaatgttactagtaaaatgtagaccaatgaatgttctggactttggccaatcaaatttgtcacacttccatggagtacagaggaagagttgacagaagtttcttccccttcagactgagaagtataaacattattctctactgtaagtaccaaatgaagaataagcagtgttatgggaattcacagcagacagatcacctcaggatgggattatctgtttgtttgtttttgttttttaaagacagggtctcgttctgtcgccctggctggactgcaatggtgcaatcatagctcactgcatccttgacctcctgggctcaagcagtccctctgccttggcctaggagtacaggcatgagccaccacccccagccttattaggtcatttttaaagawctcttcccacatgccctgtggtaatgtatgccattagttgccaaaggctgcttccttcaagggctttctctcacagaaggrttctaaggctgaagagacatgagcctctaccaccactaggagtccccagagggacatattctgaataggaatctgtcatagtaaatactgtcttttgggcggggggcagctgttggaggaaacacctgctgaaaggcccctaaggcttatagacaaaggcatgtaaataagttttctgtaggccctgttggagttttaaaattctctgagaagtatctcatgtaagtatggtcacataaggtaaagaatactgagtgctatgtcagagtagtcatattgacagttactagtgaagataatcaaaaagcaaataaggccgggcacagtggctcatgcctgtaatcgcagcactctgggaggccgaggtgggcagatcacgaggtcaggagttcragaccagcctggccaacatagtgaaaccccgtctctactaaaaatacaaaaattagctgggtgtggtggcacacacctgtagtcccagctactcaggagactgaggcaggagaatcacttgaacacgggaggcagaggttgcagtcagccgagaccatgccactccactccagcctgggggagagtgagactccgtctcaaaagaaaaaagcaaatgagaggttgccagcagcatctaactaaactakgtaccaaactagattgttattaggtgttaaaatcacttcttaagtcatgtatgacgtgcatgttaactaattcttgataatataattatcttttatatctcacaggcattaagaagaaatgcactcaccatgagcaccaacttctgcatctgcctgatcatatttaaaggaacagagaaatatttgtaattaatctgcccagtaaataccagctcgtagcagttggcaggtgcatgtctagataaaatttcttgcagctaatttaaactttctacacgcaccagtagataatctcaatgtaaataatacatttcttcttggctctttaatgtaagccaacatggagaggaagatcttgacttatattctgtaccacatacacttctgtggacttttagcatttgtgggtagacttaataaagcatgtataaaagtggcacctttggtagaactctgtgtttttctgaaattcagattaaatgtaatgatgagtggaattaagtaccagttttcccatttaaagccccagctgcttattaatttatagattctgtagaaatttttttaaagatttatctagtctattgtgtagcctctatctcaggagtgagtttttattttcctatgcttatagagaaaaaaacattttcaaggttttaaaattttacaccatttataaaatattagagtgtattttttcagtacaaatgtttaaaatatgaagttttttttgaactaaactacaaagagtactgaatttaaagaaaagacctttattaaggggcaatatgtgatccattccaaattattttgaaatattaaatttcagttattctgtggtgttttctgtcatcatcatgtttttgttgtcactcccaaaataaaggggaggagggaatcacagagtatgttatcttgatagtgaaacctctgcttttcttgaccatttctgtaaggaaaactgctactcctttggtacttgccctaagttttaacaaaattagtagaaaatattaccatgtcatttgaatatatcatgaaaaatgaaaactacatgaaaatctgaaacaaaatataacaagttaaggttgaaaattttccactgcgtgcaatggcacaagcctttaatcccagctactactctggaggctgaaacaggaggattgcttgagcccaggagtttaagaccagactgggcaacacagcaagacacctatctcagaaaaaaagaaaataattcactttccacttagagaaattttagattcacctttttaaaatgaaaggtttttaaaaactgttactataaattatataaattaccttcattaattatgttcttcatactgtttaagaaatttattctgatacagtgcttataataggatgttaccaaaaatatactaaaaaaggattattatagcattgaaaactaaccttaggttataagccaaaacattttataaagtaatctatgttagtcaggtaatacagagttaagaagtagattggtttcatatataattcaagttatataggtatgtgcttaatgctattaaaccagttactgtatgtttgacctcttgatatactaagcttttgccttttagaacagctgggtctgctgagaatcatttcccagttcttttcattgtagatcagatgactctcactttatcacccttggaggccacatgaaggacaaagcagaaagatccacacacacaactaatgtttatatgaggggagggggagttgcaggggatatacttgccctgatcttccaatgaacataacagaagagagaccaattgagacttgaaaccattgcgttactttaaccattatttagttatatcctatccatctctttctctctgttgaacagagaggttcctttggctgccctgacttttgtaaatgtttcactcaatttgttgtggtttatcatttggacagaatgctacattggggatttttcgcccccactaagtcctcaagggaaaatgacttctgtatgcctcatatatgatacatgaacatacaccctattctcttcattttaagaagcaaacctaagttttttggcagctgagaaaactgcatttctcagaaatacctcctccatctaaaacgtacttgaacataactttgaagggcttattttttgacaggtatattaatgaagaaagtgaggaatctatctttaatatttttgcataacctatatgtatttatatgaaaacatccctatagccctgagtttagctaagagaaatgctttggaccttgcctacttctgtgataattcatcactggatatttttgatattttgcttttttttgagatggtgtctcactggtctcaagcgatcatcctgtgtcagcctctcaaatacagaccgctgtgcctggcctctgtttctggtattttgttttggtattttggaacctaatccctctaagttcaatataaactcttaaaccggtttttaatagatacgagggatacttataagataactgctacaagtctctataaaaactatagtgcaactcagtatgattagattaaatcatctgaagaatgatttaagaatttacctatatggtaccttacagaatttacctagatgataccttgaatcaggtgcatttcattttactaatatatgtacataatacttttatttccaaataataaagttatgctactccaattatttataacttcctcatcatttatctaagtcaacattctatgttaaacacaagtgtactattacaaaaaatatttttaaaaataaagctacaccagccagccaagatgctgacatttgggcacagtgattacagatggtgaccatggacagcaatgttcttgctgattcggcagtgattcaaggctgctattctgcgttgacctgccctttgagtctttatgcacatttgctttgagaaagaaacctttctagatttttgctttgtctaaacccacttcctttaccagacttagaaacacataccttcttatatcagcctgtgactgtccgtgtctagaaccagtttttttttgtatgtggtttgatttgcactatattaaaatataccaccacttaatatagtttaatggctatcttatgaaagaagaaatatattccttaaaaaatgttgatgggaaaatgattatctttattacagaggctaaagaaaacatatctttatatgagaaactgcaacatggatatcatgtattatttttaccagttgaatactataataaatattggcttctgctaatacagggtgatacagtattaataggatgaagttaacatgaatcaatgctctggcagtggtaaccctgaaccatgtcaataataataatatatatataatgtttaattaaacagaatggttctggaggtttagaaccagtgattatgtgtaatttagaagacttcactcaaaccacttaaagttaagttaaagcttacatttaaattcaggaaaattcatttttaattgtattaaaatatgcattcttggaaataaataagattatggtttatttgccttgttaaaacaatcaaatttgcatgtgtaataaggcatattcaaacttcaagcagtttaaattgccttctcagtaattaaaaagattatcacaaatttaattccctaagatatgacttctaaacagtgaaatacacactacttgcattctaaaatgtaagtttgaataccaaaattagtgatttccattaaaaagaaggggctcaattctcccatgaagctcactatatggtctgatgaaggaagtaggtttagacaaagcaaatatcaagaaatatttctcagttttttaaagacatttaaaaagtgcatttcctgagtaaacaatgggattaaggacatgtttctcttttttccccacttgaatagctgtgaataataaaaccacatgttttggccaagcagtacttagacaagcctccattggtctttggtctccatatacatttattttgtgtagacaacaatgacttttcaccatttcctttcctgtggttccatggttctcaaaatggtaatttcatttatacatagcaaaaagttcacaaaacctttcagcactgttcacattttcacatttgtttaggaaacaatttgtttaggaatacagctagctgattttcttctgatttcttccacttttggaatcccacataataataatgttaaagtataccaagaagaacaggaagttcaagcaagatacaaaacacaccaatacagaaaacaagtccggtagtttctgaggaggatccagtgtgacagtcatcaacgtcagaagcaccatagtgatgactgagataagaaactgcaaggaaaaaaaggattactgagtagtataaaaggtgaaatttaaatgtgctggaaacattgacttgtagctattaaatgagcagaattaaaggtgagggttgagggtctaatttattctggtgtatctcaactttgacttcctattagaatcatatgaggagtttttaaaatctcaatgcccacatcacaccccagaccaattaaatcaggcctcagtactttttaaagctctccaagtgattcccatgtgtagccaaaacctgaggacccctgtcttcttatacttcctaccaccaaggcactgaacaaaggtatctgggacaaatattaatgctagtcagggttaaatttataacatcccctggggtccaacaggatataaaattctaagctaatgggtacaaatgtataggtagctagaagaaataaaacctagtgtttggcaggtcagtaggctgaatatagttaacattaatgtacattttaaaatagctagaaaataataagttgaatgttcctagcataaagacatatttttaaggtaataaatagcccagttaccccgatttgatcttcatgcattacatgaatgaataaatgaatcaaattatcacatatacccccaaaatatatacatctattctgtatcaatttttaaaattctaagctaaccttgagaacccatctgtgaaaaagttttccatggcaaatggaaaattacatttcatattcgctaaatgctttcaatgagtaaagcacacgaaggcacatgaaagaaaatgaggtcctctggcctcaaagagttttccatctactgaggggaatgttaaataaaatcacaaagtcacactggcttaaataccaagctgagtagtaaaaataattagcacatttattgtagttgtgtggtcatcagttagtgtggtcttctctaggccaatgtgctatacaatagaacttcctgcagtaatgaaaatgttttgtctgcactccagtatagtagctgctaaccacatgtggctattgggcatttgaaatgtacttactgtgactgaggaactgaatttttatttaaatttaataagtttaaatttatatatatgtctagtggctaccgtactggacagactgtgactctagactgtgagctcctttaagacaaagaccagcaagatcttactcattttatccctagcacagtacacaggtatacaaaagcagtataaataaatgtagaaagcagtgagaaacagtagtgacttccatgaagtgggtgggacacagaaccctaaaggatgccttaactgctggctacattatgacagtattggtaagatctaaatagagagtaatgcagtgatcattccaaatggaaaagcgaggataggcgccaagaaagcttacaagcagatacaaacaaaggctgccagtgtcgttaaaggaaaaattcctgaggcaaccttagtgggaagtgcaaacatctggaatgaaatctttaaaataaaagtttcaaacttaagaaatatgggactggttgaaatgtcataataccacgatcttgagtcagtgttaaacagaacaaaaaccctctcttgctccaactattaccccatttgtctgctcctatttacacttgtttcccaaaacagttgcctataaacatgctgtgtccagtcttcatcccattcactagtgaacccataccaattgggctttcaccctaatcacgatgaaactgctatagtcaaatatccataatgacctccagtgtagtaaatcccatggtcagttcttactgccttacttgattctctcattagcatttgaaatcactctcctctcactgaaacacttcgttcacttggcttccatgacatcatactcttctggttctcctatctcacccagttaattcttagacatctttgctggttcctcatgtcccctacgtctgcattctggggcttcgtacctattcctcttattaatctatactcatacccttagtgagtcatccagtaatatgactttaattaccaactatatgtaaa

SEQ ID NO: 97701 - DNA, 145735 bp, Homo sapiens
  misc_feature (1)...(145735): n = A,T,C or G
ccggcatgagccactgcatgcagcctaaactgtatattaaaacgactgctttagaacacagtcacagaaatgggattgagtcaaatggactgtataattttagattaattcatagattagtattggcaagttactttctattcagtttccacaaatctacactgccctgaaaagcatacaccctatcagggtctaaaacagtggacattataatttttcaaatagtttgtacctttaatgttttaaaaatgtatcttgtagctttaatttgaatttttacatttattaaagaagttaatgattttctatatgctttctcactagtttctatttttcttttaacatatcaatgtgcatgtggaagagtaggtagggggaatattatctgtttttgttctttgcccaccatctactagggtcattgtatcttctgtcaatttgtaataatgagatctttaataaagatagcaatattgtatctgtcacacttttttcttttttttgagacaaggtcttgttctgttgcccaggctgcagtacagtgtttgcaaacaaacaaaaacccacaacaattcaacatatttgagtacaagaaaatggagaacttcttcaagtgtagttttttagggcaaataacatgccgtaaaatgcatatcaaaagtatgatagataaggccgagcacggtggcttacgcctgtaatctcagcactttggaaggccgaggtgggtggatcacttgaggtcaggcgtttgagaccagcctggccaacatagcgaaaccctgtctctactaaaaatacaaaaattagctaggcatgttggcacgtgcctgtaatcccagctacttgggaggttgaggcaggagaatcgcttgaactcgggaggcagagtttgcagtgagccgagatcacgccactgtactcgagcctgggcgacagagtgaaactccatctcaaaaaaaaaaaaaagtatgacagagaaacctgggcaacatgatgaaaccgcgtctctgcaaaaagcagccaagtgtgatggcacgcacctgtagtccctgctactcaggaggctgaggcaggaggatcgattgaggctgggaggtcaagactgcagtgacctgtgattgtgccactgcactccaaagcaagactctgactcaaaaaaaaattatttgcatgaaaaacttcattcgttatgaagacttgtatagaaacattgaaatacacttatgaattacaattaagtttaaggaacagtttacaaagtgacatgtatgccatgactatatttatatgaaaaatatgccccgtggaaaaagataatgggaagaaaacatataatatggtgactgatttatatcaggtttgcaagattacagtcaattttttctccagattccaatttttggaaacaaatttcatgatttgtacaatggggatttagtttagtttagtgttgttgaaaaaacatcattgtttgcatctaacatattttcccattgttatctaagcaatagcttttgcagaggaagactgatggggacatattcttttgatgaagatttatgtgtgaaactgtgtgtatgattgatggttgggtggttgttattaattttctaataagaggcttctacactgcatttggtttaattaaatttagatgtatgtcatggattgcatgttagaaggaaatatttgtattcttttgttttacactattgtgtctctcctatatatcatatattctactgagtggcatttttttttttttttgagacagagtctctctgtcgtctaggctggagtgcagtggtgtgctctaggctcactgcaacctccgcctcccaggttcaagcggttctcgtgcctcagcctctcgagtagctgggactacaggtgcatgccaccacgcctggctaatttttgtatttttttgtatttttagtagagacagttttgccatgttggccaggcttgtcttgaactcctgacgtcaggtgatccacctgccttggcctcccaaagtgctgggattgcaggattacaggcatgaaccactgcacccggccctttttgttttgttttgtttttttgagatggaatttttctcttgttgcccaggctggagtgcagtggtgccatcttggctcactgcagcctctgccttccgggttcaagctattttcctgcctcagcctcccgagaagctggaattacaggtgcccaccaccatgcccaactaattttttgtatttttagtagagacggggtttcaccatgttggccaggctggttttgaactcctggcctcaagcaatccaccccgtcttggcctcccaaagtgctaggattacaggtgtgagccactgtgcccggccgtttttttttttttttttttttgagacagggtctcactctgtttcccaggcttcagtgcagtggcaccatactagctcactgcagccttgatctcctgggctcaagtgatccttccacctcgactcctgagtagctgggaccacaggcatgtgccaccacactcagttattttttgtattttttgtagatacagggttttgccatgttgcgcaagctggtctcattttgaactcctgaacccattttgaactcctgaactcccaaaatgctgggattacaggtctaagccaccacgcctggctcagtgactgtttaaaactttcctcttctcaaacataaaactgaatttcttatcctgtttagtcggtggcatccagtcggtggcatccttggtcagcttattaaccaattcagaaaatttgggagtcatgcgagattcctctctctgcctcagtagccacatctaatcagtcaccaagcactgtccattctatctcctcaggccttttgcatcttcctcagtatccttccccagtccactgccttagataggctgtcatctctcgcagcttgcagttttacaatgacatgtaattaatctccttgccctccaattcatcttccacattatccctagactagtggttctcagtggggtgtgattttgcaccccaggggacatttggcaacgtctgaagacatttttggaagtcacagctgggaaaggaggagggtggggagttgcgggggggtgtgatgggggaacaagaggacttgctactagcacctagtagtcagaggtcagagatgctgctaaacatcctacaatgcacaggacacccccactacaacaagaattttccagcccacaatgtcaatagtgctgaggttgagagcccttgccctagggtgattcttctaaaacaaaaaccttaaatctctcaaaaaaaaaaacccactattttattttaggcaaaagtttttgcatgggattcaacttttctcattccccagtcacacagcatatacttattttttttttttaagagaaggggtctcactctgttgcccaggctaaagtgcagtggtgtgatcctagctcactgcagcctcaaactcctgggctcaagtgatcctccagcatcagcctcccaagtagtcggaaatacaggcatgtgccaccatgcccagctagtttaccttttttttttttttttttttttgagagggagtctcgctctgtcgcccaggctggagtgcagtggcacaatctcagctcactgcaaactctgcctcccggcttcaagcgattcttgtgcctcagtctcccaagtagctgagattacaggctcccgccaccacgtccagctaatttttgtatttttagtagagatggggtttcgccatgttggccaggctggtctcaaactcctgacctcaagtgattggcccacctcggcctcccaaagtgctgggattacaggcgtgagccactgcacctggcctttgtttgtttgtttgtttttattttagagacagggtcttgctgtgttgcccaagttggtgtcaaactcctggcctcaagcagtcctcctgcctcagcctcccaaagtgctgagattacaggcatgagccgccacacccagccagcatatactattactgcctgaatatgccgctacctcctgactcctgcctcctgtcggctacttgaagcttattctgacttcctcagactcggctgggtgactgtcttctgtgatcaccattacaggaccgggaatcactgaattgttacttgcctgtctctctgactgcattgagcattcagaggtcaggaacctagtctattttttttttctctgaatcttcatcacctagcacaatgtctgttatagacgaacagatctaaactgaatccaggccctctccccctgattccaccctgtgaacagccagattcgttcgtgggcacaatgggttcactgctgccttcctgactttcctttttctttacatcctcacctgaaatgctgttctttcacgtctctgtctcccttcatgtcagtctcacctgttctttatggtccagctcaataaaaacccctaccacttcctgagcccatgccatgtgggctatattatcatagttcaccttcagcaaaacccctttaaggaaggcattatccctatttaacaggtgaagaaaatgatgcaaacagccctgaggtgttgttcagagtgtggcagatgagacaagacttgcacacaaacacccacaatgcaggcaacccgggttgcctccctgtctgctctgatctccggtcttctttggtcctcttttctgtacttctggaaggcactttggagatccttttgtctgctgctccactgagaattgagtcaactaagaattgtttagggcaacacaggtggttactggtggaggccaaacctcaaattcagtagtctaattcggatgcttgactttattccacacccagaatatcttgctcagtttcagttgcagtaactcaagtgatcaggaactgtccagcagggttagtgaagtcagcacaggtggggcagcctctgtccacagccctgaagctgcagaattctgaccgtgcacggcctcggaggattttcatccagggattgtcagggggaagtcgctggagtgttttaagcatgggagtgtgtggaacagatttgaatttttaaaagttcattgtagagaattaattgggggctggagtgaatggagtgacgatttaagagatgttcgtggtcccttcaggtgagagatggtggcagctcggaccgtgttgccggaacatagacaagtgaactgattggagagatacctaaggaaataaaattgttaggatttgtccgtggactgcctacgaagtatgaatcttggctacagtgtgaccttgattaagacactaaagacttaatttgttcctcatggataagatgatgctactactttgagaggttattagtaaaaaatgaaaagcgctgtacatgcattaggtatcagtgaatgtagttctaattcctattatgcatatgcttttttttttttcgtaaagagcttttaaaatacggaatgggttggatctgcagtagcttgtccaagctgggggctgtattgttaaattctttttagtctagtgctccactagctcctctcctactgagctggggtaagaagcggagcgtatacggaggaggcgggatgcatttctgcatcgagcgcacaaaggtgtggcggagggggctccagagctgggaggggtcaatctacgggcgaatcctggcaattttactccccgcgatagatgacctcgcgtcctagatgagtttctagattctagaatctagaggacgcggtgaacagagacgagtgggggcagcttcgcgagcgaagccggatgggggcggggcgggtaggccggaggcgcaaagtctccgccgggaccgcgaccccgccccgctttccggggctgccgctggtgacgtcgcgagggggtgggcccggcggccacgggggtggggccggccgcggggcggggcggggcgggacgggaggcggtgcgtcgctgagcgcaggccgcggcggccgcggagtatcctggagctgcagacagtgcgggcctgcgcccagtcccggctgtcctcgccgcgacccctcctcagccctgggcgcgcgcacgctggggccccgcggggctggccgcctagcgagcctgccggtcgaccccagccagcgcagcgacggggcgctgcctggcccaggcgcacacggaagtggtgagtgtcaccgggggaggtggaggagccggggcggccgcggtcggcaggcgaggggcgcgcagcccggactggccggaggcgcggccaccgctcttggtcggtccttaggctgcgcggcccgggctgctcctgagcgcagctcaggaccccgcggctcgggcggggaaggcggggatttccagccccgcggagccggcgggcggcgaggaggtcgccgggcgggggcccccggccgggagaagagcggttaagccaggccgccccctcccccagcgcgcacggcaagttttcataaacaagcccggagcgcgctgtctgacatcctgtttataccaccccgagatacaggcgcgggctggagggctgacgtccctagctccttgtaccgcgaacttgaccgccagctcccggccggggtggcagcgcagaaaggttttcttcttcggccccaggaaggaggctgagggtcttagcttttttccttccttgcggtctcagcgagggaaagtttctgggatttggagctgggtgttgggcgtccgcgaactcgggaaacgccccctcccctcttaggttctgttaggaaccaggcctcaggtagccagcgagaagtgggaaaggagaccctgggcgagaggaccagggaaggggaacagtgggagagaactacccggggaattgcgaatcccactggaaagggactgattaaccgaaactggggctggtctctggctccctcactccaactccatccgcgcatcgtcggcgaccgggagcatcggaggactaatagacactcctccaaagtcactccccagggtccctgggatgtgggctccttggatgtgtgtttaccacggaacttctagataaaagatgcgatgtttgccaggtgtttgtgcacacgttttttggagggtttgcactccatgatttcctgtgtgttcctggggaaggggaccccgtccttcctgccactcttcttactacgtggctgtgagctgccttctgcccctggttgagtacatcgctatacatgtcattgacacttttccccccaagtcatagggtttttctctcactggcaggaatttacagtggtataaaattgtcattacttctttcagggagtaaaacatgggtagttaagtgatgagaataatgcagagagagatgtaaatcagggcgtgtttggttttggctatttttttattttttgaagaaaagatttgagttaaatatgggtataggcacagtagattttgtttaagatgagcaattcgtattgattgaatctttgttcttccctttccaaaaccccattatgtgttgtttcttgattttgcttttggtgactctgatgttttccaagaccaggggattattttcattgaaggatcaatgtgttcttttgtactttgtggtgaagattaatggagaccaccagggttccagacatttctggtacaatatgctttgtaatgtggagaaaatgtctcccctgtatagatccagatcacayttaaagatgtgaagacatcatactggaatgactttggacattataaataggaataatcataacctcttcttaattctgtatatcatattaactaagtgctttgactgagtcttagtttctgcaaatagatacaaaactatgtttttttactgctaggattgcagtgtgatactccacactgaatacagccagtttaaatggtttcctccatttcatactatactaattatttactaccattgggaaatgattgtagagaatgcataaattagatataggtaaaataattcaaacatttcctaaaatataactacatttcagttgttgtaatttaggatcttaacatgagcttggctaaagccatatacttccgactgaaacaagcattgagaacgtgtaggttgatactcatttgtgtagagagaacaagagaacactaaggtataactgcatagcaaagaccatgatctgtgttttctaattctcagattcctctggtgtttttttcccctcaaasacacatcccattttgtatgtccttatgtcctgataagataatagcatgctgttagaagatttattgtctgagatgtgaatattcatacaaataaatttttcttgttcattttcacatttaaarccattattttaagtggatggggaattggcttattaatggaatctcgctgaagaaggaacattggatgttctgtgattattgtggctcagtggtatatggaaccttgtcattgaacaggagtgttggaaggaactttcagatttttttagactagtaagggtatgattttgcacccaatgagatatttgcagtttctggagacatttttggttgttacaacttgggggaagggagcggtgctactggtaggcatctagtggttagaggctagggatgctactaaacatcctataacgcacaagacagccccccatcccaaacaaagaattatccatctcagtagtgcccaggttaagaagtcctgctttggaatactgagtaaggagcaagaagatctgggctcttgtggcaaattttttcacttcagggcacctcttttcttcatttgcaaaatggagataaaaatattctccctggtcatctcgcagagttttggggggaagtcaggtaaataatgcatggaaactgtgacgtgctatgcaaatcataactaatatgaagagtatttttcataagtgaatcattagatttaccggtagttgagggaaccagggttaaggcaatatgttgagtaaaaagccgcctgtggatggtttgatattatcgaattctttgttattcattttttggggtaaaggtttttttagtatacttagttttcttattgtcagaacatgtactttttagctctataatttctttaagcaaaggttatttttcccatcataacaataaggagaattcactatagaaaaattagaaaatataggaaagtagaaaatagagggaacaagtcattcatgctctactcgcttgtccatttaagcacactcacatccttgccaatttcttttctataagagcagttaggattcagagaatgatgagagagagtagctggtgaccaaggaaggtgttccttgtttctgtgcccttcatttctttcttttttaataattacgatgtaaaggtaaattacattatagtaggcatcagagacatcggttcattgtttttattattatttttatttttcgagatggtgtctcactctgtcgcccagtctggaatgcagtggcacagtctaggctcactgcaacctctgcctcccaggttcaagtgattctcgtgcctcagcctcccgagtagctgggattacaggcacgttccaccatgcctgggtaatttttgtgttgttttttagtagagatggggtttcaccatgttggccaggctggtctagaacttctgatctcaactgatccgcctgccttggcctcccacagtgctgggattacaggcgtgagccaccgcgcctggcctggttcattgtttttatactttccttgctgcctccaagccatgttctcattcagcttgtttcctctctgcttcttactctcccccgtgctcagctaggtgtgccactgttgcttcctgtctcagaaaccctctggttacatgggatttcaaacagctgtcatgttgaaatgactgggtttcagggaccrgaaactaattcctgtgagtattctttcctctgaggtgcaccagccttcttggcagtttaaggcgacaggaaagcataaaacattaagctcatttccgtgatacctccacttctgagggtttatgatccatgattctttgtagttggcagtgggcacacattcttccttggtgctctgyggataaactgcccagtcccgaggcaagacctgctttagaagcaaaaggataatttcttttaagtctactctggccagaagatagagctggcgtttgttgggatatttttaatctgcagtaactgaatttatttaacagtactattcacactagcattttatacattcttttattcatttagcaaatacttgttgagctcttgcagtgaatctcagagagtgaatagacagacaacaaaacaggtacaaatctgtcctcgtgtggaatttacagtmtagtggaagaccctgagggcatgttcagttttacagttgcagactatatgcatgtaaaagagtaaatctttgtgattgtagaatgtttcctagaacccttcatggcactcctttgaagtttgaggactaggaagtagcttccccttgttatctttctttttttaatgttacagattaattcattctttgtatgcacagacatctctttggtacctattaagtgcctggcagaaggataagacatagtttatatggaaataaacttggtatacatggctgtaacacattgtgggtgatgctgtagtagcagtcagaattaagagctccaggaccctgaagagagctaattcttgcgtggagcccttgtcaaatgcttttttgaagaggcttcatttgagttgggccttcaggagtgagtaggagttcctttgttttagggtgggaaggaagtctaggcagagatacagtgtgagcaaggacataaaagtgggcatgtacgtggtgtcagtggcagacttggaagtggccactagattagagcaaagactgcttgggagggagcggaaggaggtagggcaggacatgcaggttggatccagattgtgaagaccgtagctctttccacaaatttgtgagcagtgttaggttagggactgaggcctctgttgaacgaatgagtggggaagatgagaagccatttgaagtttccaagctcaagaataacatcgttagcaaatgaagacctgaagcactgagagttctatgaagggtgagcttcatctgaccattgtgcaactctctcctccccatcccagaaaacgccttttattatctgccatttatcaactatccagaagactactaggaaacaagaaaggcttcgagccaagcaagatgtcatgaagttcatycatgcttttcttacagtggaataaaacctactttgatttgcttttaatttataaagacttttttttgacagtttatctaactggtttttaagccattaggaaattaaatacaagaaacctaagaggcaagagttgttaagtggatgaatacaggaagacatgttctcagaggcaagcagtgttaatttttatcttagaagtgaataaggagtttctactggtttatgacaaggagaaccaaaactcaaaagtgaaacaatctggggcatttagtggagggcaaacaccattgtcaacaagctagcaatttgaggttgcattgttaatcacagcacagtatggtgtttggtattggtaatgatcatcaagccatgaagaagaggtcaagttgttgagcataaatgaagtgaaagttcacatctctagcagaaaagggcaacttcagatgtctcatttaggggttaggaggtatgtaagaaggtctgaggacaatataagaagctgctttcagagaatttctgtagacaaattcaaagaagaggttttcttcagggtgaaacaccagtgaggaatctttgctttaactcagggaagattacttaagagtgatctgcgagagaaggttgactgtgaaacctaggaagaggagctgcggccgtctgcatagaagatagtaataacttgaagccggctgtaggagactaaatcacatcaatttatggtacctctgagtagaaaacagactgattgattgtcttttagccttgttttgttttttgattctgatagtctgtttttggaggctctggatctacactgtatgatttgatcctagctgtgagtttgcaagcaagttacgcctgtttccttatccatagaatgacaataaagacagtacctacctctgaggttgttttgagggttgaatgactatgcttaagattttgaagtgatgccagcatgagctgaaaatgtgctagctatttttacattttattttattttgagacaaggtctcgcgctgtcacccaggctgaagtgcagtggtgtggtcataactcaagtcagcgttgaccttctgggctcaagcaatcctccccacctcagccttccgagtagcaggaaccacagacatgtgccacaatacccagctaatttttaaattgttttgttgagagaggtttcattctgttattcaggctggtctcgaactcctgggctcaagcaatcctcctgccttggcctcccaaagttttgggataataggcatgaaccaccatgcctggcttattttattttaatgattgataaataggatgtgtattttaaaaaaaaccctcaaattatattcagaatgtttaacatagtagggaagatgccaccagtagatacaaaacaaaaactaacagatatattctatgttagatttcagttagcaatgagtaaatcaaaaaagaaggcagtttctcaaatctagaagggtttattacgtagacagtgccaaaggtgctaggtaaattaggttttactcttatttttaaggaaaaatgactaacaaaggtgcttttatttaatttaaagtgccatccaaggtatataatttggtaggaatgtatttgactttctgggaaagttaatgtgaagatactgtgttgacctcactgattcagtttacttagcaagttgtgggctattggcagaggcaccatgtatatacctgtttgtaaaacggtgtcttcagagttgtgtggaaattaaatatcttgtaaatcagataatactccagggagttttgctggtaaggaattataagagtttaaagggactctcaaatatgtattcagtttctatggaatgcccttttacagtttctgtttccataaacatattttgctttcytaaagcaagatttacccaaaatgtaaaagtgtgcaaagagttggcccttcctcctaatcatagatgtgtgttttaaaatattttaaatgtatttccttcttggtgatgtatatgttggactggtttcttgggtctgggcattatttatactcaagaacagttgttgccacgtgattggaaaagcgctattgatgtcattctcatcccatatgctttgacagcaaaggagttagctgtatcttcccttgtcttcccactctagaatgagaaagacaagaaagctccctaatttgatttgtatggagggggagtgggtaggaaagtccacttcagctgaaaaggctgacctgtaggtatttaaaacataaatttaggtctgttattttcacatacacttggtaactcagactggtctgaatataaagtagaaatagctaagaaccatttgtaatgaatgcaactcttatttgtttttaatggtgttttaaggacttaagggtattagaactgacaacagtttattcagttaagcacaattttatctggaggcttgcttgcacagttaatttgatcaggttgtagtaaggctatataacagtttttttcaattatgatttaaaataatgtttatattgtactaagagaaaagataacagaaaacaactcaaggaaaaaataatctgccaaatatgtgtctttccagataaaaatcttgttattaaactagtttggtggatcacacacagggatgcggacagatgcaatttatattataaagaaagaagtacaatggctttttgccaggtgtacctgcaaacccattttagcactaattcacataacatagactaaaaagtaatatgctaatgtcttaatttaatattctgactgattttgttcagttaaaaccattctgtaaaacttaaggcaagtccacgaatcacagtatacgggttatctttttgggaaaatcatttgatgtatggtggtaactccaaggaacctcatgtttttacttgtgtagaacgaccattcacttgggttggttggaagtaggargaagtcagaggaggtcatattggcccaaacataaattgtragcccacttgatgtgatttaggaagcaggccacctaccatctacaagctggctgaaatacaaatgctcttaggttttcatgtttgttcctttattcagcaactctctgtagatctcactgtatgtgagaacaagatgggcttggctcctgcccttagaaaagttccttgctagttgaaaaaacaattcagcaattatattactgtttgttacagtgatgctgagtaccgggagagatgtcagaggtgggttgtaagaaaagggagtctttgcagtacactttttttttttttgagacggagtctcgctctttcgcccaggccgggctgcagtggcgctatctcggctcactgcaacctctgcctcccgggttcacgccattctcctgcctcagcctcccaagtggctgggattacaggctcccgccaccgcgcccggctaattttttgtatttttagtagagacggggtttyaccatgttagccaggatggtctcgatctcctgacctcgtgatccgcctgcctcggcctcccaaagtgctgggattacaggctcccgccaccacgcccggctaattttttgtatttttagtagagacggggtttcaccgtgttagccaggatggtctcgatctcctgacctcgtgatccgcctgcctcagcctcccaaagtgctgggattacaggcatgagccactgcacccggcctgcagtacacttttatacatggaaatctgaagtgtgaaagagctgtgccaagagaatgaggaggatttccagtgagaggcacgaatatgtgccaaagacctatggtgggaccaacaccctgcagctggtgcagagagaacraaggtggaggctggtgaggcaggaaggaacctggtcaagcagggccttatgtgctttattacttttgggccttataatgcattaggggaagttgaagtttttaagcagggtagtaacatgatgagatttgtgtcccatgaaaaaacggaaggatcccatccactcactgttgcccctagagcacctctcctctctttcctctttccctgcattctgctgccaaataccttgaaaaccttcacttcctcccacccactcattctttaaccctttgcaaactgactgccacctctacactcatgagactgcttccttgaggtcaccagtgaccttcttgctgtcacattttaacaccttttttctgccctagttatctaaaacagttcatgctgctgaaaacctccttcctggcagatgtccctcaaccctactggtgcctggcttytgagacacagtaaggacttcctttctctgtatgtctctgttctctttttgagtatcgtctctttctctcacttctcctcctcccccaatgaggatgtttytaaaggttctgtgaatggtagatttatatgttgcgaaaactgtgcagatgacccacttttgcctgagctccagttgtccctttttatttattttccttcctcgctgctccttacctcccccaaatactggttgcacagtttcagacactattcaaggcactggggacactggggaacaagagaggaaaggtccctgtccttaagtagccaacagtctaagatgttaaacacattgataaacaagataatttcaggtggtgataagtgcaatagagaaagttagcaaggtatgggtagtgaatgcttaggttggggggttgggagaagggctcctggtctgagaaagtgacatttaaattcagccctgaaggatgagtaatgagtagaagccaggcagtgcaatgatctgtaagaaaaatgtactaggcagaggggatagccagtgccacgccccttcagtgggatgagctttccatttcacactgggctgccttgctgtgtgtcctttgacacctcccatttaactgctccaagattgataccgtctttctttctgacccatcatcataataatggatgatttctctgttttggttaataccgtctctatccaccaccctgaaaaccctaggccagcagtctgaaaactttgtgaggggaaagacagtaaacattttcagctttgagcacagtacagtctgtcacaagtactgaatctgctattgtagcaccaatgtagatatagacagtatgtaaaccartgagtgtggctgtgctccaatacaactttatgtatggacactgacatttctattttcacttgtaacaaaatatttttcttttttttccaaccatttaaaaatgcgtcagcttattggcgttcaaaatgggcagcggcaggccagatttggctcacaggccaggatctgctgccccctgccttagactaaccctgatctctccctttgcttttgccccaccccacctcctccctaggccctttcagggctccctccctggtattcgtattcagcacctttgccactcrctgtccccactgctgcagccttcctttggctttctttacctgggtgatctatcattgcgcactctatgtccatgtgcagacattatttagctcccactttaagtgagcacatgctgtatttatctttccgtgtctgactactgatcacaagcctttagaagcccctattgcctatagaaaacaatccaaactccaccttagtctgatagtaaaggttccttatgctaaaacctcagtttaactttctagcatactctcctatttctctccttctacactgtcccaaaatagattattcattattttgctttcaatgtttcccatgcttttctgtgttcttgttcatttaatgcacttttcccgtgcttcatgctttccatctgtcagaattccatagctttcaaggmcccttcaaatgtycctggtctcttcctctgcccctccctaccccaacaagcggtgtgtatacacatagtcccctggtggtgtgtgatcctctgttccagtacgtcgtgttctggtctgtgcttctgttcttttgcagacacacctccactatgcagtcacgaggcccttgaggacaggaaccatctctttcttcgtaatgtcacctttcccagtaggcacacggctgtttattgaataaacacagatcctgtgtacacttgctcaaattgtacaaaatttgcaggagattcaaagtggaaacattttactgaagggaattcggtcaaattacatccttgattcttgtataggtggtacagttttgtaaaggatcatcaagtattttggaagactcattggctctgccagtggcttagataaataaattygggcaagttattgatctctctcctcagagaaaaaaattgatgtgttttcttttatataaagagaaaaagaaaaagaaaaaatgtgatctgtaactcattatgtttccttgctagaaagctcaaagatatgttatttgcctgtttttagttgctatccagttttcttacaataatctctctgcctcagtctcctcatcggattacttgtcacatgtgttaaatccttcttttaattgatggttctgttgtatatatcttttatatttatataggtagcctcaactctcctttttttggagagtggtaatagaaatataaataataaatagttgccctttggtttccccaacctgtggtgacaacaagataataaaacagatacttatcctatataaaacaggcaaaaaggctttgggacaatatgggaatcatgatgtgggtttggtggaaarcgagcaaagcaccttgtaaggatcttgtagtctgaagattaaggtgtgcttggggtaggtcatgtcctcccagctctgtgggatttgtagcacatcatcccacgtggggaggagagtgggcaygggcatgagactatttattagcttttactgtgtcagttgttgggttatgtattttgcatttgatatttaatttaatctttgtaatagccagagacttggatcttattggcatcattttccagatgagcagagctaataaatggcagaactagaattcaaatctgaggctctctggcattgaaaacaacaacaaaacatgtttctactcttcaaagagactttttctcctggattgtcacttgtccttttctttctctttctctcctgacattggtatttaaaatgagaacctaggaaacttgtttcttctaacctaatgtttttgaagcagttttaggtccttggagatgtgccttgatgtgtctatacaatatagtatttggtattgttagatataaagaagacctgaggccgagtgcggtcgctcatgcctataatcccagcacattgggaggccaaggcaggcagatcacttgaggtcaggagttcaagaccagcctggccaacacagtgaaaccccatctcttctaaaaatacgaaaaaaagaaaaaaagaaattagcygggcgtggcagcacgcacctgtaatcccagctactcaggaggctgaggcgggagaattgcatgaacctgggaggcagaggttgcagtgagctgagatgatgccacttcactctggcctgggggacagagcaagactctgtctcaaaaaaataaaaaaaaattttttgttttttaggttttggggcagggcagttgggttcatttagctgtcctaaagaaagtttggtatatttttgtgaaatatttagtttaaaagttgtattgctgtttttgacattttaagtcagacgagatttactgttgctttatattacctgactgttatataacacgtcctgtgtttacctgtgtgggtctgagcataccagatgtggtgttatgaaaagcgtgctggacttggaaccaggacgagccgatgtgaggctgtcctctgccacttactagctctgtgactttgggctcataattgagccttatttttttctcaattktaaatggactgtgtagtacctgtcacagaggaagttttgtgaagcttaaatgaggtagaacctacaaaatagcttcagacagtgcctgggatccagcagcatttaacgaaagttacccactgctaccccaaatactgaatattgccagaaaatctgtaaatgattacataatgtttacacctttataagtggtaactttgtaggtaaatattattcaagttatgaacctctgatttaggaaacctccttatgcaaatggttggcttcccactacagaaacatcagtaataagatagtggtttagactcccaaatctgcgaccagtctgtatgtttgaatcctggcttatgatcagtcatagctgagtgatcgtgggcaagttattcaaccgctttgtgcctcagtttcctcatctgtaaaaggataataggataataatggctcctaccttatgggattgtgaaaattaaatgagaatgtgtgtttatgtatgtgtgtgtttgtctgtatttgtaccaataccctattggagtttaccactattatttactgttcctcttctcttttcctccctgtgtaaacagccccataagttatctggaagttccctagtatctctttcttatcttctgttactggaagactcctttttcttctgtctttggtcccgtgttagttgcttcattttaattgaggctatcttgttctagtgtgcaatacattctcattgatcccttccctatacatttcttgcctagacactttgaaaaagtgtttttgttttgggtggaaactgaacattttctaataatgactcataaacccagccaggtgttaaggatactcctatatcaaggaaaatgaaagctatacagtctcaagcaaatgaaaaaactatataaaatgcctaattgtttattgaatgtttatgccagaaattcagatcaataaactgagccttagaatggttgatgtttaaaggtacccggcttttaagtggaggaacctagatttgatcaaagccagaccaacctggcccttggtttcacaatccctaagctcacttgccttaataaggcctctaggcaccacctcaagactccatctgcaccccttatgaacctacactctgctttccctcacactcctgcttttgagatggcaaaatcacttayggttctttttggctgcagtaatgtttcctgctattttggcagggcaaatgtatagcgtttcagatactttatgtgttaaattggccttttgtgtgttggcttggaaacttaaccacatttactgcagtgtgtctgggggaaatgtgcgccaagtttcaaacaaccaactgggaatgaattctttaaaaggcagaacttgtgcctggcgcggtggctcacgcctgtaatcccagcactttgggaggccgaggcgggcggatcacgagctcaggattcgagaccatcctagctaacacggtgaaaccctgtctctactaaaaatacaaaaaattagctgggcgtggtggcgggcgcctgtagtcccagctactcgggaagctgaggcaggagaatggcgtgaacccgggaggtggagcttgcagtgagcagagatcgagccactgcactccagcctgggcgacagagcgagactccgtctcaaaaaaaaaaaaaaaaaaaaaaaaaaggcagaacttgtttatagctaagggctgctggtgtatttatttgagtgtgttacctgcattggtatgctttaagggcttctgtgtcatgcctgaagcgacatattctggaatgtatacattattgcacttccttggttaattgtcctcactgttgctgacctttgtacactgaaccactgccattgtgtttggcacgtagtaggaaccctgtgaagagacttatttagtcctctttaaagatcaatggttctttatacttttctgtatgcttgatatatttcaatttaaaaaaatcagtggagtaaggaaggatcaggcaacattgaaagaggaatattgccacacagttgccaatctgatgaaaatactgcttatgctaggtcgaattgagactctgaaaggtatttgggagccagacacttatgagaatacatattgctttgaatattggaagaaagcaaagcagtcaaacgaatttcttcttggcttggagttttgtttacttttctcaggttagaattgatagttctaatggttttaagaagtcatggagaacaggcccaccatgaacctgaatatttggttctgagtttatagccattgtctagtaaatactgtttaagggttattagcacacaatgatcataaaatcttgtaatacttttaagaggtgtaagaaattgaagtcacctgagaatacctccttctgattttacagtggagaaataaaggaatcagagtgtttaagtgacttgcctaagacctgtctgggccaccactttagggattgttttttaatccatcatcatgctggatttgttactgagcgataaaatggtacagaaggtagtcacatagagaatttaggaaataaaatactcatttgttcaaatacttctcaggaggttgagatatatctatgggtagaagatttagaggttatttaagagaaattaggattgtctagggtccaccccttaccgtggggattctgaagggcagtgtcttatgagagaagagagatcaagttacttggtgagtgagatgttctaggtgctcagtccaagggctggccggatggctagcactgaacttgtgtggatgtttgttcaaactaatcagcctacgattggtttgttcctaagaatgataaaactttgttctagttttttaaattgtaataataattctgtaagcatttaagaagaatgctttctttaatgttgacttttttttttttttgagacagagtcttgctctgtctcccgggctggagtgcagtggcatgatctcggctcactgcaacctctgcctccgggttgaagtgattctgctgcctcagcctccagagtagctgggactacaggcgcccgccaccacrccaggctaatttttgtatctttagtagagacggggtttcaccatgttggccaggatggtctcgatctcctgaccttgtgatccgcccgccttggcccgccaaagtgctgggattgcaggtgtaagccactgcgcccggcctaatgttgacattttttactcctacacgaagctgttatgtttttacttattcttttctagtctttatcgataatgtataaatatgtactgtattatgtaattttaattgctggatacatatacctgtcttcttaaacttttttattctattttaatagagtctttgtaataatcatttttgaatgtagtatttagttgtgttaatttattttatttttcttaagtaatctatgatagaataasctatttctgtttttacagaatattgtagggaacctttaaaaacacacaattagcatttttctgctgctaattgctttattaggatgaatgcatagatttactgtgtcaaaggttataaccaattttatgacctttagtatgtaattctggaaaattaaacagaaacttaagtcacaaatggccttaaacattggcaggaagctgctgatttcctgactgttgtacaggcaacccactggcaagtaacatgtcaaatacggaccattataattccttatcataaaggcagatacagttttcttcaaaggacatgaaaataatttatttgcttttgatgccttttctcactgggaaatgatattctgtaagtgcacaatgtgcacttgaatgtgaagttgtagtgaggatttttatttttatttttgtacaactgggttataataaaggaaacaaactttatgtcacttctaggctgatgaaataccctagtaaatgcagtacatttttgcatgactaataggagtaggggcggggctttgacttttacatcagtcaggttaaaatcacctgtttgctggtttccctaagacagtgatgtattgccctttgcttaactttttgttagttgggaaatgtattctactttgatgactggtgtttttctgcttagtggggatattttctgtgaagccaggataaacaattctataatgcaaatctgaacacatcactgccttgcttaaaatctttcactagctgccctttgctgttaggattaagtctatccaaactccttagcatggtatgaagagcctctcatggtcacagccttcctttccttccattccctttcttgcagtcagcactccagcccttctgaccgtttttgtttcttaaatatattgtgatctctcttacttctaggacagtaagttctgtagattccttggtgaatatacagccttagagactgcaagaattctgagcagtatttctaagggttagatttccctccaagtaccattaacattctgggctgccacatttcaagatttactctggagatgtgaggtggaagccatgttaaatggctggaagatagtcctgtgggagagataagctttgtcattttatttttaccaggtgtgttgcagtgagtgttgaaaagccttccacaaaaaatagagtcttcttttttcccctgttatgattaaattactggctgctaatctttcatgatgaagagagaagcccaaaagcaatttcagaacatggatctcatgctgattagtggttataatgatttcacatggatagtattccttgtgtttgaaagttattttattggtgagatctgcgaaatcaacaaggctagtttatctttgcaaaaacttgtgacaagcttatagctacactccttggggaacacagttcacatttaagattttgcctcaggcacctctgttcagctttatgctgtgtctttcagattctagatatgaaactggtttgacattaatacctagcatgatagctttttagatacactctttgcttgcattaagtcagacaaaatctgcagagcctagcactatgctcagtatatgagctgctytgtctgtgtatcttggttcatacgagagtcagtatacctaggcagtcagtaaacagtcattgattagatttggatttaataaatttaagcctggccaataattagtgggaaccaaaccaaggcaacctatagtaaatggagcattgcatcgaagatctcagttcttcaaataaggcacagataaaggatctctatgtattaccctcctgttcttggatttaattgttcaaatgtttcacccaaaacctcaatttcaggctaatatttaggcattctcttctatgttatacctcaggtaatttggaaacatttgtatttctaaatctatttctgtataaactttctatgaattgtatatctctccctctctatattatatagtatagatttaaattgaaaaattcattgttcccttcagaggtataagagtattctggcccagctggaaatgttatgttaaatttgaaattctactacctaaattttggacttgtgtactactgttttagtagagctatatgatactgcagataaagttccaaaacaatctgtggtgaaaaaattcttgttcagggacctgttgttcagtgaaactgcttttctgttgggtacctgtattcttttttggttaagttaaaaaaaaaaaaaggatttattggcctatgtcttaagggggttgggggaggacccatggttcatggactccaaggatataaaggcattccccttctcagtaagaatcctgctattctgcttcctgttcattggtcttatgttctgccacaatgaggttttatccacatgatttgaatagagaacagttggctgctccaagatgatgtctgtttatcaaatctccctgaaagacttgtgtttgtgtcacccttggtctggaaggtggacagtgcaggcatsgatgggggtcaggtgggacactgtgatctgtagtgttaacagaatcacctggtatgagaagtttctagagagataaaaacagatgtcagctgtaatatmttgaactggcagttaaaaaattttttttaagttgtggaaaataaacaacataaaatttaccatgtgagccatttttaagcttacagttcagtagtgttaagtacattcamgttgttttacatctaatctccagaactcttttcatcttgcaaaactgaaactctgtacccagtagataataactacccattgctttttcctgctagctcctgccaactaccattctactttttctatctatggatttgactactctggctacttcttataagtggaattgtccataatgtcctttttcactagcatgtttcacttagcataatgtcctcaaggtttatccatgtttttgcatatgatggaatttccttccttttaaaggctgaataatattccattgtatgtatatacaacattttgtttatccatctatgttgttggatgcttgggtggcttctaccttttgactgttgtgaatgatatttctatgaacatgggtttgcaaatatctcgttgagaccctgctttcagttgttttgtgaactgccacttttttggataactctcatttgaaactatgttcatctttttttccttaaaaactgcccgtaattaactctttttggtgcccagtaagtggaaaattcagaacagcaaaatgtttgctttattcaacaagcaccttctcaaaatctagaaaacaaagaacattagagaacactgtggaagtaagtatgattgtgggtagctggctgacgtagaagattttaatttttactatgatgcataaatatgtacctttgcaagttttagcagacaagagcatgaggtccgatcatagacctatgactttggggaagttacctaaagccttgccagccaccatttacttatttgcagagagggggttggttatacctgctagggttaattagactattaaatgagataacatgtgcagaacacatagccagtggtaggtggtcagtaagtggtttcctctctcctgtattcttccaggggaatagaagacgaccactgtgtgaggatctctgtattgttcagctctgatgctcctcctactgtgggtggtagatctccctcttaacaaggctttcttggcaagcatttttaaactttacattttcttatttttttattattgttattgatattttgtttggcataggtactgtattgacatggttcagaaagcaaaccagggccgggtgccgtggctcatgcctgtaatcccagcacactggaaggccgaggtgggtggatcacttgaggtcaggagttaaagaccagctggccaacatggtgaaaccttatccctactaaaaatacaaaaattagctgggcgtggtggcaggcgcctgtactcaggagtatcccagctactcaggaggctgaggccagaggatggcttgaaccctggaggtggaggttgtagtgagctgagatcacaccactgcactccagcctgggcgacagagcaagactctgtgtcaaagaaaaaaaaaaagaaagcaaaccagtataacagggtacaaattgagaaggtttgctcccatttttgtttgtccgtcaacttcgttccctgtttccttaagtgctcttctcatctctaggacctattaatgtaagtatatattcgtattcttttttttattgtacataaggtaaatatatactatatactattccaccctttgcttttttcattttaccatatatcctcctctctttccttattagtacatcaagtattttctcgtgtgaatagaccatgacttatttaaccagtccccatgtaagggacattttgtttgcttctgcacttttgctgttataaatagtgctatttgtgtaactttgtatgtagaaggtcagataaattcccagaagtggaattgctgggttaaaagataattgcattaataatttttattaatattctcaattgctccccatggggttagtacctttttccatgccttgaaatttacatatttttgtgcattgcagacacctctcaccccttgctgtataccttcttttgaactgccatcttgttaacatggagagaactggcaagtgcaggcgattccttcttgtgtttcgtaagggctagtggactgttggagtgctttccaagcaggtgccagggtttgagattgtagtgtgatatgcgactaggggttctgcccatcccgatgtgctcctgttcccgtctcaggacctgaggatggaatggctgagtgtgttgtgagcccaaggtgccaagtgcttctcgggggagaatcagttgctctgtgcattaaagcagtattggctgctgcctcccttccttggaagtttttgttctgtttttttaatttcataactttttacaaaagttattcctatttattgaagacttagaatccagagaaaagacaaaaatcacttggactctcacaacctttgttaatattttcacgaatatcctctcaatcgtgtgtgtatccccaacataaatggtggttatatactgcataatgtttcataacctttttttccatttgctagtgtatcatgactattgtaacatctttcagtartgatatmcccctgcccccaacacatgcacatgttttgtgtagatttctattgggtggcttcaccgtgattctgtgttcctggatgaacatttatgtttgtcttgttagtcaacaaccctacgatgaaaatccttctggctaaatcttgtatgttattattgtttgcttagaatacatttctagaattagcaaacaataataacatacaggaattagaacttctaggtcaaaagacatgtacacattgctctccaaaagtgacatattatttatattcctaaatgagagtaccactgtcatcatactcaatttgtggatataataattttttaaaaatttccaatttattagtaaaaagtgataaatctatcttttactctgtagatatttaattactggtacatttaaacttttttttttttttttttttttgagacagagtcttgcactgttgcccaggctggagtgcaatggtgcgatctcggctcactgcaagctccgcctcctgggttcatgccattctcctgcctcagcctcccaagtagctgggactacaggcacctgccaccacacccggctaattttttgtacttttagtagagacgggatttcactgtgttagccagcatggtcttgatctcctgacctcgtgatccgcctacctcggcctcccaaagtgctgggattacaggcgtgagccactgcgcctggcctaaacttttttttttcaagtttgagaactcatttttttgatgtggattgcctagtcaagccctttgctcattttattactggcgtgtttgtctttttttttttatttattaaagctacatatgttaaggatattagttttctgtcacatatggtacaaatatttttcctcaagtttacttatatattaagaaccttttgttatagaagttttatattttcatgaactcacatcaatcactcatttctttataaaggcttctgcttttggtgtcatgtttgagagaccttttgatgcctctaattctacaaatatttaactcttagacttaatatttggtatatttgtcatttgaaatgataggatgtttattttagtctatgatgtaagagggattctaattttattattttctctgactatccagttgtcctaccacaaaaaatcatcatctccccactaacttgaaatccatgtttttacaaattgcttttttgttttttaacacattcgaaaatttacactaaaactctataaaaagggcattagagtcacaaggtcctatccctggactgttttcaggcagttgatgccagtgagacattgaagaggtggtctaacctcttcttagacttggtttcttctggggattcacacctgaccaccaatcagggtgttatggtcatctgatgaggtaataggtatcaattctgaaccattatatgggaagtaatctttatagtgctactaattaggagagcccaggtattcctgaggaactataaccatagtcaaaatttgatataataaagtttagttattgtcttttggaagaattaggaaaactaaagaaataacttctctgacttttgagttatttcccattagccaaatagggcctaattgtaaataataaaaatgggcctgttttaattatttatcttgacatggattaaatatagtatttaatttccttaatgattaaatatagacagcaaatgtaatgctgtacttttcacatgatgcaattcatttggcctttttctttttttaaaaaaattaagacagttactttatttagaacaggaaagtggtgtaagcaactgagagtgtgccctgtaatatgagaggttcttccctcgttctacttcccaccttaaaatataattttaggagaaaaaagtatcttatatttggttaattatgttatctacgattacaccttttgctaaggcaggcatggcatttgctgatgtttggcttgaagtctaagaatattgtccagatagaacatgctaaattgttacatttgagttaatgttgaatacttgaactaacatagggatgccagaccactactcttgatttaattagagatttgtacacattttcagttttttccatgtaagatcagttttattgttcctttaaaaatattctgatgaaataatcttgcaaaggaaagataacctagcatcaagtctgcgatataaaaacaaaaataaaatgattttctgatcagttatcatgtttattacctttacaaatagtgtattagtcctttagagagccccactatgctgcctgtgccaaaagtgtcatgtattgtccttgagtatcaaagtggttcataccggttatctagcaaagggccagattgtctctgcatagtacttttcatccagagtgaaatgatgataaattcccacacgaagtatatgtatatctttttctccctggcaattcagatccatgtgtcctctatatcttttatgtcaaaatacctacttccatccaagatatatcgaatttcatcattcaaatgtaaatgtttctcataagacatcatcttttcctctaatttggtaatttatctttgcatattgttattatgttcatccaggagtagtttctctctctttggatttttatataattctggatcgttcttgtatttgtcaggaacaaccaagctgacacagtcgctccaggccgactgggctccagtcggtagggctttctctagggctttctctggggatctgtagtgtaaaccacacctgcctaatcttccctgcttctcctagagaacactggaaagtcccaggggacactggcctgacctcaggcttttcctttggtctttagattcagacatttccactaaacttagagagtcaagtacctggattcatgttgaaaatctgatagtagttgactttgagacccaggtttagtcatgtcatgtgctgagctttggtttcttcattttcaaaatgtaggccgtttgtgggagtttgaatgtaacatcacagctctgaggttccctttccatccccagtttctctgatagagcagaggactytgaaaggaggccagtttttttattctaaccatgggaaatttgaaataattgttgacttcttttgcttattttttttggtccctaaaatatttgattggtcaagataaatcatctttgttttatttttcatttctgataattatcagaataataactggataagtcccagtgaaagccccaactgaaagaatttgtagtcatgttgtcacattttatatttaaaagtgtttctctagagttaaggaatgaattttttttttcccagatgtggatgcaagttacaataaattcttggcccttttgaaccattagggattaatcattttgggttaaccattttctagatggtgagaatttattcttataataaccacaaaacttcaactactttattttatttttattattattatttttgagttggagtccatagcccaggctggagtgcagtggcacgatctttggctcactgcaacccctgccttgcatgttcaggtgattctcctgcctcagccttccaagtagctgggattacaggtatgcgccaccacgcctggctaattttgtatttttagtagagacagggttttgccatgttgctcaggtgtgtcttgaactcctgacctcaggttgtccacccatctcagcctcccaaaatgctgagattacaagcgtgagtgactgactgcgcctggccaaaactttaactactttaatgaaaaaatccgaaaatatattttttctgttcttgaactgaagcgactgaatacagtttattttctctttattaatcatgttcagctacaaatgtaatttgtgttgagcactgtgtttatggagcatagcataaattggagtagaaagacctgggtttaaatttcaccacctactgactcttgcctacgaacagtaaacccgtcttaacctcattttcttcattttttaagaaattgaaattgagccaggtgcagtggcttatgcctgtaaccccagcagtttgggaggccgaggtgggcagatcacttgagccccagaattggagaccagcctggccaacatggtgaaactccatctctactaaaaatacaaaaattagccaggtgtggtggcacacacctgtaatcccagctaatcgggaggctgaggcaaaagaatcggttgaacctgagaggcagaggttgcagtgagtggagattgtgccactgcactccagcctgggcaacagagtgagactatctcaaaaaaaaaaaaaaaagaaattgaaattggtataagctaggtcttctgtaaatgatgactcttacaatagggattccctgcaggtctgttgagttatgtgtatttgcatgcacatgtacacacacggtgtatttgttccatagtaactagctttggacttcctgttgtgccttctattgtttttctgtcaacttaccggttttctstccttgaagctatcagtatgcctgtgtgtagtgcctgctctcataggatttataggtttgttgacatctagttacttgtattttatacacagctctaagtgagaaggcttggcaatatgtaatgttcgtgaatatttgtatgaaattcagcagcatttactttggggaactcatattttatgtgtgcttcaaaacaatgaaacttagcactattacaacacaggagtatatttgcatcctggtctttatttataaagaaatagtattgagccacccagttgggggatacacagtctaagtagttattctcttattttgtttctggttcccacttttattgacttatatagcacacatacagtagtggcataataccagctggatttcagagtgcagaatgaaaccatgtggttttctgtgagattttttaggccttatataggaattatatgcatgactaggaccttataaattatgtatctactatgtgcccagctcctagtatatacctaatttaatccttgaacaactcttttgtgttacatggtattatccctgtttaaagatgaagaaaccaatatttggataaattaaataccttattttataaatgagtaagtcttttctgacttcagagttcatgcattttaccagtaagccatgctttccgcttactgcaaactagtgactccaaacttctgcaaactgtgaaactattgtgaacttgtgtgaatgtatkgaagktggcactgattagacgtttgaacttctttccttgtcctgtgttatgcatggtaatctgccatttgctgttcctagctgtatggtcacccttagaggtatgagttgtgcttatatgtatatgttcatgcctagatctgttgctcacagaatcatctgacatccccatttcgttgaatctaggcagcagggttgatggcagccagaaaagtgtgccctgggggcaagaatgtctttagggaaaaatatgttattgtctttcagatagtagttctccaaacagttgctccaacagttcctatgaaaagattgcttgagcccaggagttcaaggcagcagtgagccatggtcatgccattgcactccagcctggacaacaaagtgagaccctgtctcaagagaaaagaaaagaaaaaaatgctaggtggatcttcagtttagttcagttaattaagtattttaattattaactattaattataacattaagaatgccaggggaggatagagacccgtgattctgttttggggggcactagaaaacagatcctgagacactggtgctgccatctacctctacccacatcatatccttatgtagacataaaatattaagagagacttcatgaggaggcatttctcagtttcttttgtaatgaactctacttttagttgagaaacatgaaagtgtatggtttggtgttggagaacgagtttacttactagtttgatttacagtgaatactgttcttgggatttataaatggttttagtattgagaagtagaggagataaatagttctggtgtcaagggaagcggagcaataaaatgaagctgaaacatgaccattaagcccgagccaatcagatcatctgtgtgccttaatagaaggctgatgatcttggttcaggtcttcacttagttcatgtaataacatggaatcaagagttcagacaagtataaatgcttctgggtcttgtttcctaactaggcttagtttataggccagaaagattctgctactatcctgttattactggggcagtcattgaaaagagcctttctattatagtggactgaagacataaaatcacacagtacatctaaaaggtttcatcaaagttgttctttacgaaagagtatttttttatatctttgtataattgaacttttttttaaaaaaaacttttttttttcagccatgaaattacattctttcttagccttaaagactttgacattctcctttgggaggccgaggtgggcagatcacgaggtcaggagatcgagaccatcctggctaacacagtgaaaccccgtctctactgaaaaatacaaaaaattagctgggtgtggtggcgggcacctgtagtcatagctacttgggaggctgaggcaggagaatggcatgaacccgggaggcagatgttgcactgagccgagatcgcgccactgcactccagcctgggcgacagagtgagactccctctcaaaaaaaaaagaagattttgacattctctgttcaagaaacttttacagtgagagtaatttagtgtatctcagacaatgttggagtgatcgatggttgggtttccttgttccaaggtagaatatcaaatgttcagttgacttgttgatggatcagtttgacctcgctttaaggatatgtctgaaaaactgaaataatgaggtcaacattttccaggtttttttttgtcattctatgatcgactaagtctgctttggttttcagttactaatcagtgttccactaatgcctatttagaaactttattttgaaataattatagattgacaagaagttgtaacagagggcctgtgttgtataattgaagtttaacagtgatacgctcctttctttctagaaaggctttcaatttatggaaaaattagcaaaggtaaaagatgctcggcgttggacctttgaaacttctttcggaattagtattttgaatgactccatacaactagaataatggctgaaatttctatggtgctggtcaggactgtgactgtggcccgagcatgagatgattttcctggaaaccaaaagtactactagaaggagaagaatgctgtggagctctctgggggttggagcttatgcctctggagactttgagttttctgtgggtgtaagttttgcaaatggtcctggtagccctgaagctagagttgtcaaagtaacaggtggtagctgggagccagcttggcagtggatcagctacccaaatagccaaagttgctcaatctacatgaggtcctgtagaccaaactgggggtggggaggattagccccatacaaatagttgatccttttttttttttttttaaacagtcatttgaaatattttctgtaaaaggcctaagctttaggcatttaggatgattgtaaatgcactgctttgtattctttttcacatgtatttgatttattaatataaaattgccatttttgtacataaaaatggtcaaatattggcagtttcatatggtacaacctactgttttctgctgtcacattggaaattctcaccaacgtgggataccatgtttcaaagaaacgttggcttagcctcttcatttatggaagaaatatagcacttatggtgttctaagtagattaactaacttaatctttttacaagcaaatgaggtaggtaggtcctagtgttttcctgctttttaggatcacagagctagtaagtggtggagctgggcttacaccctggctactggtcacagggctgtgctgtttctcagctcttgtgtttggcctcacctctccagtcatacttgtgaaagtcctgggtgtctagacaggtgatgggtgagtgacataaggtacctctctttgtcttcatgggagaaataactggatttccccaagaatgaattaattcttccacaatacaagagtcttaraggtttaacaaggatacttctttcaaggtgcccaccaattcctaccttgcattggagggtgcactgtgtcaaatttgtatttttatcttaaataccaaatactcttaragtccatccatgggcctgtggagttgagggtaaatgtagaggcttatttggcctaataatgaaagtatggatagttattgccatggaggaggagggtgaatgttttgtagagtccattccaaccttgaaatcctgattctctgataaacttccacctctcctctgttgcttaatctttgatcttgagcctggaaggagaggaggcaactcagtcaatgaaggagttttatttagtaattgcacattggcctcttcctgccggatcccatattgacactggagtaaggctagaggctgggagacaaggccccatgggagctttgtgaaatggggaggggcaagggtgtktccctggaccgtctgtttgtggggcagctgtcctaggtgttgagacacacaccggtctgttytaagatgttcctactggatcctgtcagttcgccctccagcattcctggatttattgtgcaccatttatggctccacagtccactagatgaaattgtaaagactcaatatggtggctctccagggactttcccttttcttctcccttagcatcagagatgacccgtcagcgttgcaagcagttctgtggtagcacatcaagtattctgtcacagcaggaaaggctggataaacatcaagggactgccaagaccagacttctcattcagtctgagtaggaggaaagaggacaggttgttggagagttggtttaaagatgaattatgggctgggtgcggtggctcacgcctgtaatctcagcactttgggaggccgaggcaggcagatcacgaggtcaggagagttcgagaccagcctgaccaacatggcgaaaccccatctctactaaaaaatacaaaaattagctgggcgtggtggcacacgcctgtaatcccagctactcaggaggctgaggcaggagaatcgcttgaacccgggaggcggaggttgcagtgagccctgatcacgccattgcactctggcctgggcaacaagagtgaaactctgtctcaaacaaacaaaaaaaagagttatgactggtctttctcatttcatctgctgatgggtagaggagggaaagggtcagaaatatttcttttaataccctctcagtatgaatgaatgattttgacctagtttaggttttggtctggtggatgtgagattggaatataatttgtttggcagggtcatccccaaggatgtctgatgcatctgcgttcttgttcccatggctagaatggaatcaagggagaagcttcctcattcctatttcagagggagcagggagagtagtggtgcatatccccacagccagaaatagattggtcctcaagtaaattggtttgataagttgattatgaatcttcctgaaaactgctgtggccttaggaactctggagggtcctactagtggaccctcatcattcatctgatgagcacttactatgttctaggcactgactgtgagaaatacaaatgagtaaaatataatcatagcccccaggatagtctggtgggtgacatttacaatacaatgtaagctaaggttgtaattaatgtgtttaacaaagtactgtggcagcacagagaagagagtgactacgtttggagtccacaggacttcaccggaaagatgaggcatctgacctggactttgagaggatgaaccagaactctgtaggtccagtagatggaaggttttcaaagaatgcaggcagacagagccttgggaacagtcaaggttgagggggcactcttgtgggtccacaacccgagcttctcgcccctctcatttcgtaatggctgccaagctcttccttcactgttgtttttctttactgctctgtggattcatcctgakgagtcacgacaacctctgcttgcagtgatgccacgtctcccagttaggaaacgaccctgctcttcactgcctggttccttggtgtggctgcctccagccttcagtctccccttctcagagctgtgacaagaggttcttacagccttaaaaataaaaagcagcttcatatgttttgcctttgtgttatttattgcatcatttgttgagcaagtttcccaggactggagccggaggtcatttgagagatgtctcctgggattccactgaaactcttttccactgatcccaattggtgaccaggaacaggagttgcttttggtccttttacatctctccatgttttccagcttcctaagataccctgtcccctcctgcattttggtcagcacttatctttccttctgctttgtgcttctagtggttctgggtcactttctgtcagctcccaaattccagaggtggacctgggttaggccattggctgtatgtcttttagtgtgtattgcttgagaatgctcatatttatgtagtatattccgtagtgcctgaaaattctaaggaccacagcgattttgaatgattcaaagttagtcacttcagtatgaaacagtgtgaatttaaaggcaaacccaggattctttgaaagcaaaaactttctttagagcagcggcgtgcttggtgaggcaaatagattgcattttgtggtgccagaaatagacagttccctttttatacgctacatctttgtcatgtagtcagagacatgcagatcctttgaagtgaattctggcaccacaattttgtagagacagtcagtgtagtacagcatgagaagggcatmcgatgtgtcatttgaataacttctgttgaagagcaggcgtcagcccatggcagagattgctgaggggatggtgcagacgagaggcaggtagtattggggcattgtgaaaacatgcgtgaaaggccttttggaatcctgctttttggcagtgttgtgcaagtccctcagaaattttgtcacttcccttggaaacatgtacaacagggatacgtcacttaggcagagactactcaagggctgaaaaatgctacactcatgaatagtttcgctgagctggagattggtcacatctgatgtctggatggtggccattgttgttaaaaatagcttagaagttcaaaacgggggtaggagccttgtgttcttttttcttccctggaaagggaagtgtttttgagctgtggaacttcgagtaaaacctaacttmtttgtaccttgttttgctcatctgtaaatggggataacagtggtacccaccttatgggatgttcaggattcaatgaatataaaacatttggcatgatgcctggcacgtatagctaccactggtgtagtgtttaattatatttattattttttctcattgttactgttcttttctatttgagatttctcggaggttctgtacttgttttaaaagtataattctttccatggctttacttcccgttagcagtggcttaattctaactgggagaaaaaacctttgatttgtggtaattttcttaattcccttgtcttacctttgggatggtggagttgggagggcagtgcagagtcagatgtcagtggggaacagagattgtgggcagtcccaggcagaggcaggtgccagctgggactgtctagtgccctctcaattatttgatggtggaatggttgattattgcagtttgtcaataaaaaaaaacaaaccatagcgttagtgttaggagtagctgagtgaaagtatatgggaattctgtgtactatctttgcaggtcttgagtaaatctaaaattatttcaaaatgaaaattaaagccccagcaacaaagcaggatgtagcaccatgctgacactagtaaatgcttaataaacgtttgttggatgcaagagtgagtgagtgagttaggtttgaacccaacctcgacacttattagctagattacctttggttaattactgcttttatgaatctcagatttcttatttatttatttaattatttttttgagacagagtctcgctctgtcgccaggctgtagtacagtggcgcgatctcggctcactgcaacatccgactccctggttcaagcgattctcctgcctcagcctcccragtagctgggattacaggcatgtgccaccacacccagctaatttttgtaattttagtagagacagggtttcgccatgttggccaggctggtctcaatctcctgaactcgtgatccccccacctcggccccccaamgttctgggattacaggcgtgagcaaccacacctggcccagatttcttatttataaagtgccatgatgtctacctcacagtgttggtatgagcgttaaatgagatgtaaagaacctgatcagaggatccagttatatggtaagtagtctaaagtgtaggtattattattgttaaagatattgtgggcactttgttgattgaatatccccccccctccttttttagagccaaaatccatttaaaaaatacatttaggtttcttgcagttttttgctgttatgaacaacacttcgattaataggattaatagctgtatagctagatctctgtgtgtgtacattatgtattcttaggatacatttctgagagtcacatgggttcctattttttggctctttttattcccttaccagagtgcctcccgatagtttgtaattttgtaacaatttaccattaaagaacagagttttgataggcagagatgggagagtaggagagagggagtagcctgtacacaaaaggattgcctcctttaccccaaaggttgaggcctctgaatgctggtctgagctcctagggatgatgcccctggagcgtagtaattgcctaggatacaaccactcagccttgtgccaccatggtaggacacccaccatgctgggtgtcctactgccatggttggggagggctgaatgttttcaccctgttgctgggggaggtggggacttggatgagtgacacccggcgtggacagctaccacctgcccatggtagatgaaaccttactttcgatgggaatggccctcccttcttatgggagttgtagtctgcgtggagtgcggttgaacaaggatgagcaggtaatccaggtgtacttagaatttgcttcctctgaatattagaacgtgaagaggactttgagggaatccagcatggtggttttgactctttgaaaatcaaggaaccctatttcatatcaagtccgatgtggaatctcagtgtactaaagagtttattttttttattatacattaagttctgggatacatgtgcagaacgtgcaggtttgttacataggtatacacgtgccatggtggtttgctgcacccatcaacctgtcatctacattaggtatttctcctaatgccatcccacccctagtcccccaccccctgactggccctggtgtgtgatgttcccctccctgcatccatgtgttctcattgttcaactcccacttatgagtgagaacatgtggtgtttggtttttggttcctgtgttagtttgctgagaatgatgatttccagcttcatccatgtccctgcaaaagacatgaactcatccttttttatggctgcatagtattccatggtgtatatgtgccacattttctatatccagtctatcattgatgggcatttgggttggatccaagtatttgctatggtgaacagtgctgcaataaacatatatgtgcatgtgtctttatagtagaatgatttataatcatttgggtatatacccagtaatgggattgctgggtcaaatggtatttctagttctagatccttgaggaattgccacactgtcttccacaatggttgaactaatttatactcccaccaacagcataaagygttcctatttctcacatcctttccagcatctgttgtttcctgactttttaatgatcgccattctgactggcatgagatggtatctcatcgtggttttgatttgcgtttctctaatgaacagtgatgatgagcttttttcccctatgtttgytggccacataaatgtcttcttttgagaaatgtctgttcatttcctttgcccgctgtttgatggggttgttttttccttataaatttgtttaagttttttgtagattctggatattagccctttgtcagatggatagattgcaaaatttttctcccattctgtagattgcctcttcactctgatgatagtttcttttgccgtgcagaagctctttagtttaattagatcccatttgtcaattttggcttttgttgccattgcttttggtgttataatcatgaagtctttgcccatgcctgtgtcctgattatggttttaggtcttaacgtttaagtctttaatccgtcttgagttaatttttgtataaggtgtaaggaaggtgtccagtttcagttttctgcatatggctagccagttttcccaacaccatttattaaatagggaatcctttccccattgcttgtttaggtcagattcgtcaaagatcagatggttgtagatgtgtggtgttatttctgaggcctttgttctgttccacttgtctatatgtctgttttggtaatagtaccatgccgttttggttactgtagccttgtagtatagtttgaagtcaggtagtgtgatgcctccagctttgttctttttgcaagagattaatcttataagttcagacttgtaggtatcataacttataagaatcatccatttacttaccctaaataaatggatttacaagagattaattttatatgttcagacttgtaggtatcataacttacaagaatcatccatttacttatggtaaagtcaagagaacaatgaagctgctgtagtgagcactgaattttaacttgggttctgagtggcagtcccagtcaaatgccagtttcattacccaggttccatctggatttaattttgtttgcagtatagaaaagtctgatttgcatggataagtaattgcagataagaatagtttgctaataccttgcaatttcaggatactctttaattaaattgatccagaagcctgaaagatgaatagggggaactttggtctccaaggagaatcacactgtttaacaaatactttcattctttattacaaactgcaagacagatgataatgtatggtcactctttttattacaatgcagcctgttatgaattcatttgcttttgcataactgactattcccctgtgataagagcataagccagcagatgtgcctgagatttacctggcatttaactgaacatactgcaggtgtgctatagcagtatacttgcttgaacagttttaaggcaccagacaagtacaggcctgaatttttaaaaagataattccagtttccttcagaatcagtgacatatttacaagatactaatataagcttagaattggcaagagcagctttattytgaggtctacaggaagataatgtgaacacatttgtcatcatcagtgtgctaaaatttccaataaaatttgaatctgtgggagtttattataatctctaaaatcattaatatattaccttaaaaataaaattgaatactttttttgcagagttttttttttttgktttttktttttttttttttttttgcagagttttatagcactcagaaccttttggttgctcagaacatagcttgaaaatcctgatctttcacatattgcagcctcagtccttttataaatgatgagattcaggtcttgggggtgaagtgactttccaaatgtaattccagaagttactgggaaagccaagaggaagagttcttgggtctctttatgctcctctaagctatttttctctgctgagcagttaggactcctggagggggcaggaagctgtgtgctcaagtgacatcctttctttagttttgtgtgtgcatatttgtgtaggcacatgaatgcactcttgtatacctactaggtgcagtgagagctggcttcagggagaaagggaaatgcgtgattttggggtccccagcctgagcctactttttctcgcagtattctttgttctggaatctttctcatcaccttttattgcatggaaacttaatctattcaggtcccaactttcaggcttctctgctctgacaagtactagaggccaatatgatagactagtctgagttaaaaggtggcagtgaaggaaccagctacccctccctgtttttgtattatcataagcacctcatggcatagaatgctttcaccccaagcggctgtttcaggggcactggcaggtttggaggggcattgtgttttgaatagtcagtgccttttgtgccattaaactcccatggtagagagacccagccttaagaaataagactgaccctccatagggctgctgctagtctatatattgtctttgtgaaaattagaaaacagcatcttgtctgagtggggtagccctgcaccagagagtgtggcctggctagtaaaaggcagattggatttcagccatcactttcttacctcagttgggcattcttggcagtgcccaacctgcccaaccatatgctgtagtcctgattctacctgctatcttccagccaaatacaggggctttgtattcttttgcattatacagatgtgttcattgtggctgcttaatagacgtttgagttgatcgatactcatcgttgaccaaatagagagaatggcactttgcaggatgtttatttcctgctgtccccatagcagcagcaaccatcagcaacctgttaccttaaggattctatagttcattcatttattaattcaacagctacttcttaaatacctataatgtaaaaggagacagggtaccaagctacaaagagcaccatctttggagtcaaatctgggtttgaagtttgtcttttctgttgattgtctgtgtaatatttgacaaattattaaactttctgagcctcatttattcgttcatttgcccacttattcaacagatatttattgagcatttcccttggctggatgaagatggaaaaaaaaggaagacagacgcagttctttccctcatctctagtgaggatgtggacacaaaacaaatacatggatcaacacataacaattytaggctgtcataagtgccctgaggaaaagaaacaaggatgtgctaaaatgaataggacctggggagtsgggggaggggacacgggagaccgtgccagagagacagagctctttcttaatagggtcgtcagggtacgcccatcagaggtgagcacataagcagacccaaagaatggtgaggacctggcctgcagagagcagtcagggctgaagagtcagcttggacaaaggtgggaagtagttggtatatttgaggacataaaaatatggacttggggcataatggaagacaaggttggaaacagtgatgatgataacagtagcaagcacttgtttagttcctgctatgtccagacactgtgctgagtgccttcacatacattaactcttctaatgctgaccaaaatactacggagcatgtgttacgatcattrttttacagatgaagaaattgaggcacagatgggataaataacttacccaggatttcccagctggcacgtggtagagctgggattcaaacacacgtgttctggttccagactgtgcttatatctgctatgctgtagtgccagtgaaggctgggtcatgccagacctcagtttcgtcatcagtaaaatggaactaatatgtggattaaacaaaatgtgtatagaatggcagccacatcaagtcataagcattcatcaggtggactgtatatctagtggtggtggtggttgtggtcagcattgtaggaaaatacaggggtgcattaggaagtaaccctctagggaagggccgtgtatactgataatcgttaatgtaaggaggacaggggtaagggccctgaggaaagtgtgtgcatgaacagtgctgcgatggctctgaagtgggtcagtttgttccacctgggcagtgtggagccacttgggggtggggggaggggatcctgctgttgagtctgggaaaatgggcaggagtcacatatactggagcaggtaggaggagcatttcctctgcaccatcaggtgagcaaagatytagtgtgtactcagagttggaaagtggggtctggagacaatagcactggccgtaggagagaggcaggaactggagtgaagataggttagagccagcactcactggggcttgatgccattgcgaagctttcagtttatgcatcagggaatgtgtggtcctggggtccacagcttggtttaaagatctaatttgggtatcttctcagctttctgtgactctggctgagcagcagagaggaattttgttttggcttttatttgatatgctatctgtcatctacctaaaggagcctgcccacctcctgggttcatacagaggagaggtaccactatagtgggaagctttatgaccccactcctccagacaggtggttttataggtgattgcaaataactggcacaggcttggagctagacagatctgggctgtataatctgggctttaacagcatttgaccttgggtcttgtgtttgggcctcatttagttccctgtaaagtagggatttataccatgtctcattgttatataaaggtcaaataagtgcatgacactatgtgcctgaagaacatggtaagtgctcagatgatgttagtcggaattactagattgcatggtgtggaaggcccagttacccacaggaagtcagtttgaaccgactaattgtcttctcccatatttttgaggtcaggaagcctaatcagttggcaggactcattggagccacattgagatggattttaaagtcattcccaggctctgtgggacatcaggccatgatgtatacacagttttcttcttcttgttttatttttccttaaggctttattttcttaaagcagttttaggtttagagcaaaaatttttttttttgagacagagtttccctcttgtctcccaggctggtgtgcaatggtgcaatcttggctcacttcctgggttcaagcgattcctctgcctcagactcctaagtagctggcattacaggtgtgcgccaccacaccctgctaactttttgtattttttttttttttagtagagatggtgtttcactgtgttagtcaggctggtcttgaactcttgacctcaggtgatccgcccgcctcagcctcccaaagtgctgggattacaggcatgagccactgcrcccagcctagagcaaaattaagaggaaggtacagatctcrcacttgcataacctccctcataaccaacatttcccaccagaatggtacatttgttgcacttgatgaacctacactgacatcattatcacccaaagtccatagtttagattagggtccactcttggagttgtgcattctatgggtttggacaaatgtatgatgacatgtacccatcattgtatcacacagagtattttcactgccctaaaaatcctctgtgctttgcctgttcagcccctgctgaccatgtgtatttgctgtsctggttttagatcatcattatggggttggaaaaatagcatcctataaaggtgtttgtggctttaagtgaatgtcagcagttctacagtcctgtccagtagatgccatctttcaatttgctgaagatactgattctgtttttctgttacttcagaacaaacagaggaattttagaagaactaccacccacttcctcagacttactgagcacctgcttaggagccacacatagttctaaggttgatgcatgacatacaaagacaagaccctacttggcctcatagcagagcacagctggggcagtggacccttgttgtttgtctctttgatgccgggctgggtacctttgacatttaggaggtcatggctaggaatactaggaatcctataatgtgcacagcaatagtcctgtggatagaagaatttttctatagcctgcatgactttcaaatgtctccccagacattcttgcagggaaaaagcctgttcataattttctgaacctagaacctgtaattccattttatgtaacggactttttgcattgttttgatatacccttaattttctaggaatgccactactttgtaaattgatacgatatactatataagatactacactattttgtttgtaactttgccaaaagctgtttaccatttttataamtcacttgccaatgttggtgtgcatgtatttgtgtcatcaagaataatatgcaagtatctgactgcatttatagttattgcattcagagttgttctgttgttgtattagactacttcattatgtcttctgatgtactcgtgacagagcaattactattgaaatatatattcttacagatatctttaaattctttatttatagttaggacattatattatgttgaaattgtatatagtttatattatttttgattttcatttcagggtagtaaagggagagcattatgacataaatgttttaaaaagcagcaggagtcggggtgggaggcgttgggaaccgttggtctgatgcattggaaccatatcagtaagacctggcaaagtgcagagaaatctgtgggggaaagagtttaagcttcattttgttttaagtcatggcatgtgtggccttgattctaaactctgtgtttgaataaagttgtttttggctggtggtttygaagttttagaaaatgggagtgtatgagtagatgtgaagtggttacastggtttagtcacagcaccctgggcctgagaatcttagccagagggactctaatttgtgacatagtcaccacagcaaccaatggaaatgtccccatgtgatctgaaccaaagtggttttggagtgttaaaaaatgtgtgtttaataagctaaaattatctgttaactgttccaagggtgatttttgtattttcaarcatgcacaattctaattaaatggcattgtgtaatcacttgtggtctcagtgtagtttataatgagttagaataatgaaggggtagtgagactggaagttagagacgcagagagcctttctgcttaaggtatccttaaacagataggtgttaggaccagcaaatagtgatcccagaaacacaatacaatatttaatgaagtgctaattatgttgcgtgtcagtcattgtaggctgcaattgatggagctaggtggtggaggaggaggaggttggattgggatgggccttgaagggtagtaagtagaatgttaatggaaagaacctgcaattgtttcctaccccaactttccaagttattattatccacagagtcacattggcttgtattccaaatttactttatagtagctaataagtatcttttttatttagtacctaacgtatgatttccactgtggttggtccttgacaacagttaggtgagagcgaattgatactagagatgcagaaatgtaaggcttagaagctcaagtgtccaggaccacacagagctcataagtggcagagccaggatttaaactcaggtttgactgatgtcaaagccactccttatggtctttttgatatttttgctctagagatggtgttcatgattagcttgtttacttaccaaccattttctattcagattataaagcagatctcatttggccgagacttggagatttaagtttttgatatgtaatctatgattgaatttaaatgaggtatggttagaaagttccagcccagttagtaatttagcaccttaaagcattcaacaagcatggttaaccaaaaacctaaatcatactaaatgtttgaagtggtgaacaggagggaatatttttatattgttactagtcagctttaaaaaaaaatgtgtttataaactgagaagtctaggtacatgacatttatactcctgatgtttgactggctttggaaattcccacgttgtgacttcttgtaagcttggctgaatgaactgacaggggattccagcccttactgtataattaaaggtaaagatacagaatgcatctctctacctccaactattgtgtagttagttgtagctaccaatgaaattatcaggtcaatgcaaaaaaacccttgtttttatttatacagggtacagggatggtctgattagttgttctcaagtaactaactggggggtggggggcatttagtagtgttgttgttgtggttttttttttccataagaacaatcaaatgaggaaactaatagcactgtgggctgcttagggaatttttgtcactgaaagaactgctgcaagccctgtgtctcaggaagggtgatggaatgtctaaatgtccatctgtcgggagaagattgaagtccctatgccgatctactctgcttgtgcaactttgtgatttgcagccagttacttaatctctctttactgttgttgactgaagtcatgctatagctggtatttcatattacaaggacagagttcaagaattatcttcttggttggaaatggaaaggaggtatatctggagtcaagtccaaatgggtaagccatctcactctagaaactcactgtacaaagggactaagaagggaatagagaagctgccttgtttataaaaggttgatccactcccaatagtataatcacaacaatttctaagaggttttatttcaaccacttattttcttatccctaggttacacatcagtttggtgagaagagctcagtttttggttttagatgagctgagtgcttgtctcagttcagccacttgctagctgcatagccttatgcaaggcacttaaattctctgaatctctgtttctttatctgtaaaatgatttccagtgacctactatatactctagtaggtcactggaaatcagttaagttaatagatgtgaaagtgctttgtacacttcaaagggctgtctaaatgtctgtatgagcctgaaggatagttgttatgctttcagttatcagtagtctaggtggctgtgcagaaagggagaggcgagggagtcatatttttgacaactaacttggggtcctatgatcgaaagcccagaaatcctcacttagattttttccctaatgcagcagtcttgtgctggattttggagtgtggtagaaacatatgctacacttattaaaggggtttggcactctgtaatgtgggattactggcatagaagatgaaatgataaaggaacatctcatcatattcagatgtgtgagtcatgcacgcttatgagttactctgaaaaatggaattataatagaaatgggcatgagttcaacttacattattttccttggctttagcagttttcaggttaaaagtcactggatacatttaactgtcttaaagcatagcatttataaaaagcttttagaacttagactgtacaaaagcacctgaattggaaactgtgtctcttattttttctatcagtaggatattagggacagttttgcactggacctgttcctgtgtactgccttgatacttaactcagtcagtgaatcagtaagcaggaatatatggactcctataaccctattggccttcagggagcttcatggtcatttattctgcctgcctgttttacagtggggaaaactgagggccagaagggttccttgaattatccaaggcccaaggttaggttctggcagaggcagggttagaactcattcagtccacaccatgctgtctccagtgtatatgtgctggatgagaaattttccactgccagcattaatttaatttaatttaattttagtttggtctagtgtagtctagtcttggattagtttaagacagagtcttgctgtgtcgcccaggcaggagtgcagtggcatgatctcgactctttccaatctctgcttcctaggcttaagcaattctcgtgtagttctcagcctcccaagtagctgggactacaggtatgtgccaccacacccagctaatttttatgttttatgtaragatgaggtctcgccatgttgcccaggctggtcttgaattcctgggctcaagtgatccacctgccttggcctcccaaagtgctaggatgacacatgtgccaccacacttgtcctgtttattccatttaaattacagttcattttgtgtaagccacttttccctgtttccgtcaatttcagatttggaaatacttttcaaggattatccttaatactacatctcctctttatgcttaaaaattttgtttgattctttaaccagaaatgatcatagtgatttttaactttcaatagggagctactttttcattaattacttgggtcatatttgtcacttgattcttagcacttttttcttttgatgtcgtttattatttattgagaaacatttgagttcttactctgtgccaggccctgtgcttagcaggtgctggaggtgagaaggcactaagtgatggaaggacctcatccaagaacccgactctgtcctgagaggatctagggtgtccgtcaggccccaccccatttgacttaggaccattattgtttttatagtagctacttgaaagactcattaggaaaagtcatgcttttgttcatttctgttttcaacctagctaaggagacatatattacaagtaaataatggcacaaattggcaaatgatgaaagtccaggggattattgcctaggtagaattttagaaagatgatgtggagaaataggaacacttttacactgttggtgagactaaactagttcaaccattgtggaagacagtgtggcgattcctcagggatctagaactagaaatatcatttgacccagccatcccattactgggtatatacccaaaggaatataaatcatgctgctataaagacacatgcacacgtatgtttatagcggcactattcacaatagcaaagacttggaaccaacccaaatgtccatcaatgatagactggattaagaaactgtggcacatatacaccatggaatactatgcaaccataaaaaacgatgagttcatgtcctttgtagggacatggatgaagctggaaaccgtcactctcagcaaactgtcgcaaggacaaaaaaccaaacaccgcatgttctgactcataggtgggaattgaacaatgagaacacttggacacaggaagagcaacatcacacaccagggcctgttgtggggtgggggaagtggggagggatagcgttaggagatatacttaatgtaaatgacaagttaacaggtgcagcacaccaacatggcacatatatacctatgtaacaaacctgcacgttgtgcacatgtaccctagaacttaaagtataataataaaaaaaaaggtaaaaggaaccaggtgaaattaatatcctatttcaacatgtaatcaatatgagaattgtttatgagatacttataaatttttcttcttcgaaaaaaaagttgctgccattcaagatggtctttaaagaagcgtagtatttgattactggagaggataaggtaattgattttttttcaagtttcagttatttgttaatgtaatctccaacacattatatcaacatgatttcatgtatctaaaggagaaatatttcctagttaagtggaaaatagtgcagctagcttctggaagatcttcattctaagcagctttatagtgaaacatttcatttagaaatctggaccatctttcttcagtttactgtaatccacattcactgagtagaacttgtattgctcattggaacccagtttattccagggccctgggtcattctttctggcccaactaacatctggattgaaatgccagatgcaagacatacagtgctgctctggtacctctagctccattaaatacaaagagggggatcaaactcagttccttggcctgaccaaggacctggtggagcatgttttcagcaagggcatctgatttaaaaggagagaactagcttagctgccaggcccttgactaagtagtatctcagaataaagtaattgaaaattaatgagtatctacttagggtctctaaatatatttaattttctatggagggaactttttaaattgaaaaatgtatcaacatagagaagactatgtaaacagtatgtgtatagttagagaaaaatacctatgtatccaccattcaggttaagaaagagaacattactggtatcttagaaatcacctggtagtcccctccactgcacttccctcagaggtaacagtcacccccactttggtattaatcatgccctttctaccagtgtatatgtccccagagcaagcataaacctaggtgtataaggaaagggcagtgatgccatctctagatgaaggctcccaggagaagagcttcatggtctctggttgaattcattacccctgtgtctgaacagaaactctgggtcaagtctggatccagagttgagaggttgcagggacccttttgggaaagtcagtggaaaagatcatgaatgagttgtgggaaacagggcttctcatagttggaggtacctagaagactgcagtgggcccagctgttgggagcctgggaggagtggagtcaagaggaatgtgctgctccaccctggcttatgtccagctctcaggaataggccaaatggaatacttctgcggggtgaaatagtcttctgctgattcaggcagcaggacacagcaggggaacaggaatttcatcagtgcatgattaagaaaaaccaaattccattaggaatttggtccaggctcacccaggcattctaccctcaatgcagtctacggggatcttggcagtgactgccctcaacataagtatccctcaagttgccctgctcacatggggattggtcatcctctgaggctggccacagcttttgtgttgagaccgctctgttctgtgctcctgggagttcccttcacttcctctttgtttaatctttatttcctgtgttggagcctgtctcctgttattttcagaaggatgcatagcagtttgttttttgagatctttgatgtctaactgtatcttgattcttccttcatacttcgttgataatttggctggttatagacttctgggttggaagttgtttcccttcagaattttgcaggcattgggtgcctgtctctttccttggtgcagctgttaaaaagcctgagaatattctcaatttttgatcttttgaatgtagcctgttttattctcttttggaagctttatagacccttgtttccaatgttmtgaaatttcccaggaatgccccaaacaggtctttttctccattgttttgatgggcctttccaacctggcaactggtagcctttggttctgggaaatctttctcaaatggttttgctgatgattttctcccctccactttctttgtcttttctttaggaattcagacatgtgactgtctggattgccccctttaattttcttatctcttttctcctattttcaaactgttcttttctaacctatttcctaaacttttttttttttttttgagaaagggtctcactctgtcacccaggctggatggagttcagcggcagaatctcggctcactgcaacctytgcctcccggttcaagygattctcccacctcagcctcctcagtagctgggactacagatgcatgccaccacacctggctaatttttgtatttttagcagagacagggtttcactatgttggtcagggtgatcttgaactccagacctcaagagatccccctgcctcagcctcccaaaatgctgggattatagtcatgagccactgcrcctggccttttcctaaacattatcttccaacctttttagcttttgaaaattaagatattatttacctacagcaaagcttrtcaatgctaagtgttcctttggctgttttgacaatcatataggcttgtgcagttaccaccctaaacaaaatatagaacatttctatcaacctagaagttccgtagggccctttcccagctgtgttttcatttctgttattatctttttaatattcgagagctccttttttctctgaaatgttactttaaaaaagaaacattttattcttgattcacaaataaaaggtattcttttatctttctgaagacattaatttttaaagttttctctctgtgtaatgttttctctgagttgcttttttctrtctccatgtctgcattagaggctttcctcagacatatgtttaccttggctgtttgtttatgattaaacttggaggaaggctgagcatgtgcctcgggcttgtgaactttgaacgtcactaagagtgagccattcattggggaactcccagcctctgtgtctttaggtcagtcctggtgagatggtcacattcctcagaagacagtattccagtctctcacctggagggctagggactggctgccagcatttctggagctgcagggaagagggtgaaggctgtagcatcctggcccccagcactcagcatgtgtgcagatgccgtctttctgcrtgcccagaggttcccatgcttcayctgacatctctagttacaggaccctttgtcttatcctttccagaaactaaacctctagatatgtgtttccttataataaaatagtcactagccacatggtagccacttaaatttaaattaacatttaataaaattaagaaatcggtttctcagttacagtagccatcttttaaatgcctggtagccacatgtgactggctgccgtactggacacagcacagatacaaaacgtttccattattgtggaccattttactggacagtgctggtctagacttttgctggggcagaggagtggccaacgggattctttttctcaaacacctttctctggccctctttcttcaccccagttactggtgcttccttccagttcctgtgactttggagacttctgtggtatacgttaatttggttatcagcttttgccattgtcagcttgggattcagtatttgtggattatcgaagtcaattttttttttacatatccaactactttccagtttccaaagttgtagttttctcctcttcttttccccttacatatttgtgaatttggtcttaaacagaaaagccatgctgtatttattatactactttatatattttaaaaatatgtactatattttagtggagtttcagaagggagtgaaattgggtatttctgttcaatctgccattttagctgggaatcctgcctcatttaccttcacaatcctataaggtatatatgtggttattctcattttatagtgaagagaggcaggtaaaataattgactcaaggtcacatagctagtaagtgggatttgaagttggatcagacttaaaaaatcagagagctttttttattaaatagtgttgtgccttatcttgtattgaggaaagacccacccatcacacgttccccaagttgcaatactatagttatagttgtgttttaaataccatgtgtttggctgggcacagtggctcatgcctgtaatcctagcactttgggaggcagagatgggtggatcacttgaggtcaggagttcaagaccagcctggccaacatggtgaaaccccatctctactaaaaatacaaaaattagccgggcatggtggtgcacacctgtaatcccagctactcaggagactgaggcaggagaatcacttgaaccccagaggcagaggttgcagtgagctgagatcacgccactgcgctccagcctgggtgacagatgagactctgtctcaaaaaaacaaaacaaaaccatgtatttgcccagatacttcccagttatccttacaaccacttaataaaagaggtcagccttggatagttctgtctcagaaaggttcttttctcctcagctgtttatttcrttgttttgggactttacaacctctaaactttgtgttagctttttctttagcagttctcaaagtgtttagagtcagaagcattccattgtttaacttaaaccttttatttgaagcatctatggtcattctcttatattaaaattgttccctcttsatttaacctcactttccataaggcagcgagtagatcgtgtttatttttgaatccctagtgcctggccccttgtctgaggtaggggattcatagtgtttggttcaacatcatcttttatttggaccattgcagttgcttccaaactgctggtctctgccttctgtcagctgctctcaaaatgacctgacattggtctttctcaaaatcaacaatcactggcctcctctaacctgcattgtaragtcttggctactcagcatggtctagagggttgaccacgcctgcctctgtccactgctgtagccccatgtctggccactcaccccccaacgcaccctccagtgcaccaatgtgcactttgtgaaaggaccactacatgctctcaaacttgtgctcttatttctgccagaaatgtgctatctccagtcccacctatttctgttatttaatatctatttttctgcaaatcccagccccaggacattctctgtgaaacctcgtctgatccacccttatatggagttagaagattatttttgctcccacacacttcctttcaattcctccctccctccctccctccctccctcccttctttccttccttccttccttccttccttccttccttccttccttccttctttccttccttcctcccttcctccctccctccctcccaaatggaatcttgccatatgtattattctgcagtttgatttttctccttaatacgaagcttatcatgttgtaactattgaatgattagtcagttctattagtgtctggttcataggaattattatcattgtatgaccaatttctagcacagaggctggcacattgtaggcacacaaaaattatttattgagtgaaattgagccatggtgttgagtgagtccatggcagttcacttgccatttattgtctttgaattctgctgtcagtagggtggtcatatgttccagtatatgcctattcctattttcccagcatagttatgaatagttcctgatgttttaatatctcctagttggtacagtaaattatatggacaccccagcctggrcaataaggcgagaccctgtctctacaaaaaaatagaaaaattagccaggcgtgatggtgtgcacgcctgtagtctcggctattctggacgttgaggtgggaggattcagcattgagcctgggaggccaagattgcagtgagccaagattgtgccactgcactccagcttgggtgacagagtgagamctgtctcaaaaaaacttatatataatttttatatgtatatggccaccctaccaattaaacagatctaagtggaagctcattttaccttatccagtggaacagctagagagtaataaatatttggggtatgaggttgcatttgaaacattgaatccagtttctttccagccagccaatcagcaaagccccaaatcacacactggaaaaaattacctttgatgcatcttcaaagcctaaatgtttcatgttccagaaggactgctgattccttttagaagtacttttacaagaagtggtttacctttcagaaatggacctttttttgttgttctgccgcttcccagcagtatgaccttggcaaagttctcccggaatgtaaaatggggatgagagtagtcctgctttacagggttaatgtggcaattgagatcattcatgtagagtgattagcattgttagtggcatagtaagtgcttagcaaatatcagcttttattattggtgttatgatcgtgaccattactatcttttgacatagactagtttagaagacgttggttatggtcttgaaaggagtgactaggatctgccccacagctttctgattgcaatgtgtatgcccttaactgcctgtcaatgcaggatgctactgcactgtagaggatggaaaaagaaaatcagtaagaagaaatcatgtgtgggttgcaaaggagagagtagaatgacataactgtggttgctagtgagtcaggggctagctgtgtctaccttggaaatcttgggtgggtcagatttggattgacattagaacagatgggcctcagaatcacctggagagttcaaaaaattgtctactctgggttccagcctcggagaccctgatggatgtagggtaaggattggaattcatatatttttaaaaagctcccaggtaattctgatacacagctgggtttgagaattactcgatggagtgaccatttattacctaataattctgtaaagcatttcctgatcatttgctatttaatgtaaggcagatgatgacataggggtcagaaaacagaggaagattattggagagcctgaattaatggaattaaattttatgagagttttgaatttaagcctgtcatgaatctgtgttgttgttgtctaggatccttgcctatatttagatcatttgaaatgaaataacagaaaattgtgaaatcaggaacaaagtcctgttagaaatgtaaaataatcaaaatatgaacctagctatgcttggatttaaaactgaaaggtagatattttctcctgacatttgaaaatgttttcaacttttattgctcttactggaaaggagaaagaacttagctaggtgcatatcatggatacttgactgggtccaggtcattacttagatgatttaatggaagggcattgggttaggagtcagtagacctgcgtggagtctcagctcagatacttctctttgcaaaacctgagttagttacttcagtcatctttttggcatgtatttacatatctgtaaaacggagacaatgttattggcctctatccggcatgatattgttgggggtgtaatgaggacatgtatgtgataggaatgtaaagctgtgatgaacacagagagtgaccatatgtctctgtttgcctggggcagccccagtttacacctgttgttgggtataattattgatagcacactctttaactctcaggtatcccagtttggctgataaattatatggtcaccctgtattcataacacccatctattgtttactattaatctttcgaagtaggaaggttttctggcctcattcctgtggccccaaatccctcaccaaataagtatttyttagatgctttctggtagttttcttcaattttatgtgaatttcatctctccaactacattggtcagtagataataattgttttttttttttcactcctgaataattttcttgtttatcatggtattagcattttaaacattctaattgcccattttggttggtgcatcttaagaaagtaaatttgaagtgcaggcagaggacagaggaaccccagcgggaaatggctttgtggaagtacactaaaaatgaagagtacagtttgtttgctgatgttctgacttggtgttttggaatctaaatgccctatgttgattttttttttttttttttttgagacagagtcttgctttgtcatccaggctggagtgcagtggcgcaatctcgactcagtgcaacctctgcctcccaggttcaaactattctcctgcgtcagtctcctactgtaatctcagtagctgggactacaggcgctcgccaccatgcctggctaatttttgtattttcagtagagacaaggtttcgccatgttggccaggctggtcacgaactcctgacctcaagtgatcagcccgccttagcctcccaaagtgctgggattccaggcgtgagccaccacacctggccatatgttgatatttctaagtacagcgttaactcttcaaagtaattgggaagaccacaaaagctctagatgaaatttcaaatctccctcttcccccggagaaatttaagaactaccatcagaaaaacttttcattcctcaaataacattttcttttcccttttttgacaacgagagcaatgcatttgatcatgtttctcccctgctttttttttgacccctaggaaactcaaagccaaattcgtagcccatccttaatgtctatgtggaaagcagtagactacaaataactttccactagccttgactttttgtcccgtattacaatctccttagtcctggattttaaaaatacgtatttctgttttattcaatgtgttcttataaactgccttggaatcttgtgggttaagttaaagattaaataaataacgaatataaagatggtatcatagtttcaacattattttcatgaaattgtttgaaatttagaaggcacaagcttttgtggtacagagacctatactgcctgagagtcaataaagaatatactctggtctaccatcccactgaggaggtcacctcccaccagaacagggctaaagagagcaaattacctccatatgttgcctattaacctcttggacaaatgattggtaacacttagtgtatgcaggtgggaataagagcaagcgcctgtcttatttttttgagaccctgtcttatttttttgtgtgatggtctcactgttgtccaggctggagtgcagaggtgctgtcacagctcattgcagcctcgacctcccaggctcaggtgatcctcccacttcagcctcccaagtagctgggactacaggcatgtgccaccacacctggctaaattttttttttttttttggagagagggggtttcactatgttgcctaggctggtcttgaactcctggcctcaagagatcctcttgcctcatccttccaaagtgctgggattacaagcgggagccactgtgcctggcctagaagatctgttttcttttctctgaataattcttgkgacactgtctctccctccatctctttctgtttctttgkcatttttcccagctatccttttttccttgtcttgkcctcttctcccctccatcctaaaacctttgatcacaagctagtttcctttccacatcatctgctcccctctactaaacgctatttcgcccccacctgctttcagctgtgcttgcctctgagcccctctttcaccacggcccagatggggtgcacgtgccagcttccctgtcagcagctcttgtgagcagcaactgctgctaacaagcttcccgaaaactaggaaaagagatacaccattaartaccaagcagtaatttggagacaaaagaaaacatcacatctgattggaatgccttacgttgcatccagatagtttggtaggaaggagaaataaaaatgtggcggatagctagcataatgctagatagcagtagcagtagaatctcagttcttctgtctttttgtaattagctcgttcgttcgttcattcattcattcattctttcactcagcaaccacttatctgtgtctgttatattgccagtagtgttttcttgggtctgggctttttgatgatagagctttctgagacctgggacctggcctgggaatttagtaytcgcttgctttctgggctggagaaagactgcctctaattatacagtttctcctatgcatagaggttatattcataaatacagtgtacactgaatctttattttaacaaggggtgtgtgtgtgtgtgtatgtttgccatgaacatacacacagtatattctaaaaattgtgggcatatgcttccattttaacaagcttgaaatacagcaatttgaatatctgattaagattattcaaatactrttttactagtaaaaggaataaaaacctgaagactaggcaagatagaagacttaaccatctgcttctgctctggggtttttgggaccttctcccaaaagcactaatttaagtaaaacataattaatatatatatttttcaatctacgtagtaaaacttttactaattggaacaaatgagaaggaagacttgcctgaacatattgaaagctgcacagtagaatatgtaaaaaggaatggcacaagtggaaatggtggctcagtagagagccccatatcatgttgagatgaataaggatagagctgaatagatgcatcattttgagagggtcactgccgtgagagtaagtaccagaaaaactagccttataagccttatatatggcttaatagaggtttaatgtttaagaatttgataagaattacttgtgattagtgcattaaagttctaacctgagcagtactgacttgacttctctttatattaccaatactatttagagataaatgggyattcctaaagtgtctgaaatgttctgtctgttaaggaggtcagtagtctactttgtcacttttttttctttaccagtttcatttttggacagatggtacaatgctctatacacttgtgagcatgtctcaagttccatattcgaaaaatatgatttaaaagtgtttaggctagtgagaataacagagttaagagtcataattgtatttcaatyaatgaatacagttttggtgtgagctgggtctactttgctttttagtagtccatattacttgatagtaaagagacatgtgcgtttcagtagtatgtgttttattacacttggaggtaacttctgtgtcctttcaggggctccacctataaaattagggagatcctggcatgtcagggctgagggtacactcataacacatcttgttttttttaactttaagttcaggggtacatgtgcaggtttgttatataggtaaacttgtgccatgcatgtttgttgtacatattatttcatcacccaggtattaagcctagcacccattagttatttttcctgatcctctccctcctcccacccttcaccctccaattggccccagtgtgtgatgttccccrctgtgtgtccaaacatatcttatttgtatgtcttattgaacctgggctcagggaggtgaaaggatttattatggcagagcctttaacgggtccagcactttttctaaattctactttgctgtaggtctgagaaaagcccagaagtttattgtgctagaacaatgttattctctctttcagaatcaaaacctttcagaacccagccttttcattttctaatagctattcctccctaaaggatgccaggaggaatatgtaagtatatttagatagaacgtatgcatacatctccatgtcttaraaacacctccacttccaaccccatgtactgttattttcatttcagaactggaattaggctgtggaagcatytgaattgttcccctccctatcatcttttctctttttacaaatacagttttaccaaaacaaacccagttataaaggcattactggaaagtttactgtactttggatccataaatattcttttttttttttttgtgcttctcctcactgttaagagaagtctgctggacaaggagttttgagtatgtgcatttagtgggtagatagtggtaaaaggaaaaagaaaaacatgcactggcatgaaaggtagtagtatacactcctccgtttttcctttaaagctttaagaggtagtgtggaatagcagaaacagtccttccctatatttctaaagatctgggttcaagacctggcttttgccatttacttgctctatgagtcatatcacctctctgtgtcaatatttatgtattcactcaccacttattgagctttgtctgtcatacactgcagatacaacaaaactgtcacagccctgccttcttgatgcttatgttaagacaatgatagtgactgagaatggcgtagtagcagtgtaggtggcragaaatcgtgggatatgggacatattttgaagctaaagctgatagaattggtgatggtttagatgtgggatgtgagagaaagatgtgtcaagactgactgctggggggttttgcttctacaacatggtgaatactggcatttactgagagagtgaatgctggggaggagggaggaggtgtgtgttgatggtgtgggaattccaggttgctttttatatagatgatggtttggatgcctgttaacttccaagtagagatgctgaagaggtagttgggatttttttttttttttcttttttgagatggagttttgcttttgttgcccaggctggagagcaatggtgtagtcttggcttactgcagctcccgcctcccaggttcaaacaattctgctgcctcagcctcccaagtaactgggattacaggcatgcaccaccacgcccagctaattttgtatttttagtagagatggggtttcactgtgttggtcaggctgatcttgaactcctgacctcaagtgatccactcaccttggcctcccaaggtagttggatatttgagatcggagttctgagatagaaatttggacattgttggcatgcatgtggcatttgaaccatgcaacagggtgagatcacttcagtagatagagaaaaagtgaagattgaggcctgagtccttgggccaccgacatttggagactgagaagtgggggagctccctctggcctctgagaatgagaatgctggaacctgacctcttttcctcatttaggttgtttgtagggatcatgtgagataggtacacataaacacacatcaaaaacaacttagtgcttaattgcatgactaaatatagragtaagggaggttacatggataaatcactttttcacttgatttttcttctgaaagtctattttatgggattgggtgaggtgcgtgcaaatttgttatatggcagaggttcccaatgtgtagatgtgtaaatgtgggatttaagggagtgaagacagggagggtatttgggaaattttacagggggcctactgtacaatatctgctttcaatacgattatttctttctttattagtccagaaatatatatagcagtaggatccatgagctattacctttaacaggattctcatactaaaaaaatttaacactgatatttgacatatgtagagctatgtacatttataaaaacatgtatgcattctaaatgtgaatcggatacagttgacgttgtctgcttttgtggacagatatctgcttggattcccaggttttcgtaagctgtttgaacttgtttcatctcagtctgctctgccccttctctgtcaccgtcctcgcactggagatgaggcagggtttcctgaactgtgggctctgttctgggaagaccctgtagccagctcctagagaagacttgcagaaagatgtgggatgagaacaggaagatcaagtgggttgaaggggaaaaaacaagaaggccgaggcaaataaaggcagaggatcatttgggagggagttgaggaaaggggcctccactgttccctaggtgaccatattttctctccctctttgggttattttctttgtgcctacctgttttatcagaattgcaaggatttttcccaggtgtttgggttgttgagtagtaggtaaatataactttttccgggcattaccttctggaatatctgcttgaaggtaaaattgcaaaaatggctcattctcccctacttttatgaacactgttttagtctaatcttattatattgaaatcttagattttatcccatgcttgtgtttatccaattttatagggtgtgtgtgtgtgtatatatgtgtgtggggaatgtgaatatatgtgaatgaatgccttttctagagaatctggtatattaagtcatctacccaagaagaaaagtcttctgagattgatgctgtcagataaatctatagaatttgagaaatgaaagagagcatagagaacatctgatccggacttttccaaatgtatattccattaaaaaagaagtgccttggtctgatgatttttttgggagttggagactcactgcatttattaactatgaaaggcttaagagctcttgctgttaaaaatattatttaactatgtttaaccagtgtttctccaattttttcactatggaccctcattttccttctctctctttttagaaggatatgtacatagaacagttactatcattgcacagaagtacaagattccagaaaacataatttgggaatgctaatttaattcttaccttcaaattgaaygcgatacttcatttctgttggtttgtgttcccatatgtagtatgagcaggttgaatgaattaatcaattactgtgtcactcctgactgtgacattttctggttctgattcgttaaatcaatatttaaaaattatatctgtttctatattaaagaaccttgtcttttttgttccttactagaaccatagtgtctaatacagtgcctgacacatagtagtgtctcagtaaatgttactgaacaaatatatacctgttagattcagagcactgaactagctatgtcttgaggctgcagagagaatgatcttgtttttgctctcaaggaacttgtagtcaagtcattaactttcctaagagcatggaatgtgccatggagaggtcccaaattagagcttgattgtgataatctataggacaaagatagattggacattatttctgaccctgtgtcagatgtgtggattacaacacagctgggttatgttaacataactttcatgacaagaagtgtctttcagtaatagtcactgcagcagccacatagtcgttttatccctggcaaagactttatgatgctatcagcactaagagattggagctagtattattcccattttagtagataaaagagctaaggctcagagatttagagacatgtctaagttgacatacctcctgactgaaaagccagaattaggacccaggtatgtgattctaaaccttgtgcacttatccactaggcttcctgtcctctcaccaatactagtatctttcattgtctcatttgtattagaagctcaccttgaacaggctcagagaattacacatttccagtcttcattgtgtccctgctctgctccctctgtccccatgccatgagggctgctttctttacagctgatgtgctagctagggtgagttttggagcaggtaataaaaagtttacakactttgggccagatgcggtggcttacacctgtagtcccagcactttgggaggccgaggccggtggatcacctgaggtcaggagttcgagaccagcatggccaacatggtgaaaccccgtctctactaaaaatgcaaaaattaaccaggcgtggtggtgcatgcctgtaatcccagctactcggaaggctgaggcaggagaatcgcttgaacctgggaggtggaggttgcagtgagctgagatcatgccattgcactccagcctgggtgacaagagcaaaactctgtctctttgtccttaccaaccatgttggcagcatccatattctaggctgcagataggagaaggaattaagaaaacggggcaaagaccttacagtggtctccagggtagaagctgccacacagtacttttgcttttatcctgttggccaaacttactcacatggtcatatmttgccgcaaaggaagctggcaattgtagtcactattgtgagcattcttgtgcacagctaaaaattactgttgaagaagaggaaggacaatggcatacaatcagctgtctcttccaccactgcgtattggggtctggtgcccattcactcccctcttctgactyttggctagtagctaatccttttccctgtccttacctttatcctttaactcccttcttcctattatttaaatgttctcaagtctcttccatcttaacatgccataacacacacacacacacacacacacacacacacacwcwctctctctctctctctctctctctctctctctcacaaattcatgagtaaaggcaccatgtccccagtgctcatgttatatactcagatccttgtgcagggcatagtacataggggtttttcaacaactctttgttgagagagcaagtgggtgagtgaagggttgaaacatttccctctatcctttatcctcggattgacagagagatgctgctgtctgtcttaacatctatggcacaaatgacaggactgatgattttactccctttagtgctgaggaggctgtttgggaccatgaagtagttctagaaatgtatcgtgctgagaagagcactaaagggagtaaaatacacatcagttctggttttgttgcttactagctacaatgacatttggcaaattatgtaatgtctttgagcctcagtttcctcatttgaggaagtgaagactccattgacctcacaatgattaaattagaaaactgtgataaagaatacacccctgataatattattttggcttcttatggtgatttttaagattaaggagtatcatcatccctattttatttctctaaaataatatttaaaaaaacgtaaatgccctatacaatagagtattatttggtcacaaaaagaatgaagcactggtgcatgctacagcatggatcccctgaggacattgtgtaggtgaaagaagccagacacacacattatatgattcaatttctatgaaatgtctagactaggctaatagaccagtggttgctaggggatgcgataggggagaatggagagtgacatggggtttctttttggggtggtgaaatgttctggaagtagatagtgatgatggttgcactcttttgagattacactaagaaccactgaattgtgcacctaaaaaataagttaaaaatttaaatgtcattatagggcattataattataagtaagagaatacttttaaaactgtgtctaagttttggttcacagtttgtcartgattcttctgtaacagaaaccaacatctggttggttttttgagttttttcacctgctggctgaccttacttgacatactgtattagactttctttatctttccaggcctacgcaactctcagcacactgggaaatctcagggcatggtgttccattagaaagaagagtaagcatgtgggcttcttcgtgggtaccatgatgggagagaatagaaaataagaagttaaataattcctcgcaattctgttaggcatataaactacacatttaatattataaaacagttttataaatgcacttggtctatggtgtctgcatggattaggtgagtacttctggaaggaggtggggatagtcagagaaggcatgctggggaaggaaatgtttaaacatttgcttcttacacagacatttattgaatatctggcatgccttaggcattgttatttggtgttgtatgtacccagataacagctgcagtccctgccctcagggtgctcaaagacagcgaagacagatgattctacagacagttagggagcaggatgtaagtgctactccaaaggtaagcacaggactctctgaacgcctcacttgggaaatgggagaagtcagggaaaccttgatggagatgattcctgagctaggaactgaaggatgagtggggacagcaaaggcttggaggacaaagtcatgctggattacaggaactgcaggtaactcagtacgtttggagttcagggcacaaatggggatgagccatgagaagttgattacaagtagccttgtaagccatgtcacctaagagagtaagaaataaaagagttttagagcatgatacttccagattagcagtctagaaataagactggctgcattgtagagacttggaatagaagcggacgagaatgaaggcagaaactttcaggagattgttgcagtaatttgggagataagtgggtagagacaacagagttagaacagagacaacagagttagaacgattagggcttgctccccaagtggatatggtcgcagttcctaggactccaagatctctgtccacttcgctgtctcacttcatgtcagtctgaccccagcctgccttctaagtcttgttttcttctcttcatgaaatgcttaagtcttgtgcttactgtccccagaactcgcttggtgatttaatgtctgttacctttgattacacctttatcttcacctagaatggagctcatctgttccctttaccttcttagatctctgacttatgaatcctttggaataattccatgctagaatgatctctttgtcctctgaagtcatagcacttaatatctctatcagtcaatgacaaataattatgttttgccttgtcacatctcttaattgctttgaattgctagtcaatcttgagccattgcagcaggtagagaggtgaattggctctcctgaattcctactcccagccctaatttcctgtataacccagggggaatgacttttctcccctcattagtgtagtaacacatatttgatgcagaacacttagaaaatctctaaaagtgtgcaaaatgaagtaactactatcacaaacmccttggaatactcacaggtaattattcttgtaatgtcctccccatccattttgtcaccgtttctttaggattacatgtgtgcgtctatgcatcatagctaggatcatcctatacatgctgtttttcaatttgattttttcattaccatattgtaagattcttgtgtcaaaacataggagaatcttcaagtccaaattgaaagtggagctaaattgttctcagggagagttgtacagatgagtatcccctatctgaaatgcttgagaccagacaattttcagatttcagatttttgggattttataatattagcactatgcttacccattgagcatcccaaatctgaaaattcaaaatcctccaatgagcatttccttcaagaaatgtggtagtcaaaaagtcatattttggagcatttcagacttcagattttttgatttgggttgctcagccttaccaaaaactgaatagtgactatctctgggaggagggaggggaactttggcttttcagtgatatctttctataatgttgaatgtgtgcatttatgatgagtctaaatgatttttagagttgtcacccatagtttataggtgacagtaatttatacttctacctaatccaggcttatatttacatttaaaaagaagtataacaccaactttactgactagatagataaacaattttaatttactgaaatttcaccttttcaccatgattataggtcctttttccattagttgtttccatttcctttgctgtctaatgacttagatttgagtcctaggtaataaatacatgtgatctttcacaagtcacttagtgtttctaagctttagtttgcttatgagtagaataagaggaatgatacttsaaattattgtgaggattgagatcaagtattgaaagtgctttgtaaattgtaaaaagtatataattattgattttttattgatttttatattagtcaatggtcatgagcagttaagccaactttgcttttttaaaaattcatttggagaaagactaaaaaggcagaggtgccttcattaatatttattttggtgcaatgtgggatccatgagatttgggtttgtgccacatttctgctgctaattattagctatatatacagctgaaatgcactgaacaagcacagttttggccaggcccagaaatgttcagggagcacctggctggacatacatcagagagcttggtgacctgataaagcattcatgcaagctcctggagactgtttaactggatgacagtagaaggaaactatttatgcaaattttgctaactgaagttctcccacacccttgagtccacatttcacaggcttgtgagatggaaatgggtcaaaatcaggttctaataatctctttgtcatctgcagtcatgcctgagaaggtctgatatggtcttctgaatcatcaagggaaggtagaatttcatccaacatgacttttgtgcatttgctgtattcagctccctggaaacataggtgccttaattttatcagttatccagaacactgaattctggataatagaggaacagggctgtgtaaacaactctgctgagtaatagatggcctcctggcctctggtttctgactctgtattcccttttatccaaggacaagatgttacaaaaataattcagagtgactcccaagggcagccccgtgaacttgctggtccctccgactgtgctagcagaggaggatgagtcaccagcagcagaatgttgactctcccagtgctattagtggatgtcccagccagacgcgacaaccaggaagacaagctttgggaaagttctttctgactcattaacatcatgatttacacaagaaaacctctagcttctcattttattttattttttaaagaagtttcctttttgtatgtgtgtatagcgaggtggggcaaaggtatggatccctcaaatgaatattcaaattagctcttacccatagcagtatttgaactgtttgctcagttaaattttattgtcctttctcaatgtacagkgcctatatatccatcaaagagtagcagattcattaagaatctttaaaaagaaggacattatttttacacagttgaatttcaggtgtcctatgcccatgcctttcccatcatttcctatgtgtgagaacccccaccccacgtagcacaccttcacatactggggactttccacttgaggaattcacatgaatctggggatytgcattctccttgggtagtatcccctcagaagaaaatccagactccttagggggcatttgtagcctgggcccagttttcctccttacctcatcttttttggttctacacaaacctgtttagtcttcagtcaagtgccttaccctccggctttcctcctcctcctcctcctcctcctcctcctcctcctcctcctcctcctcctcctcctcctccctccccctccccctccccctcccccctcctcctccccccctccccctccccccctcctcctccctcgtcctcctgctcctcttctttttttttctctttttcttttgggatgcagtcttgctctgttgcccaggctggagtgcagtggcacagctcactgcaacctccaccttctggtttaagcgattctcctgcctcagcctcccaagtagctgggactacaggtgctcaccaccacacctggctaatttttgtatttttagtagggacagggtttcaccatgttggccaggctggtctcaaagtcctgacctcaagtgatccacccgcctcggccttccaaagggctgagattgcaggcgtgagccatcgtgcccaaccccactttccttcttttgctatttcttcatgtttcccttatttggaatgttgtcctcactcagctcctgttttcatcctgtttgtatcccaccttcttcgtagtgatagtagtagtattgcatgcctgctgtgagccagttttcctactgtgtttatgtatatatttttccaagagtttaaaataagcctgtaaaataattatgattatccttatttgcaaatgagaaaacagtcatagaaagttaaaaattattcaaagccagctactaagtggcagggctgaggttttcctgagcctgaacattcaaccccaccatgctggttttccctgccgtcctctggatccgatcaaactcactacaccagccccactcttagaccttctccagacgtgctcttttcgcttggtcgggtgtgtcctgtgtttggcaatcagtcatgtattattaccttgctatgtgcttgggttgctaattcttctttggtgatatatcttttgttgttttcttttcttcttactgagctgtgcatcgcaggctttacacaatgcgtttttgttgattttacttaattaatgatgtcctggaacaagtgagttatttctcctagttatatttagcccaattagttatttacatcctaccataatatttgcctccactaattgctaagtagtcttgcaaattatccttcagtcttctttttctatgcttttattcctgggaaggaaagacaaaagaagctccgtggctggagtctgtagtgtatcccatcccctgcaaagaaaccaacagaaaaattaagtggaatgaccaggcattgccactaaatagtttgatactttgaaatggatgccagtttggctaaattcaagtgttgtctgttagacaagggctattcgtaaaagaattgtgaatgtaagcatgctctggactgtgcttcaaggatgcaaaaaagtgtcattgagactgccttcctatgtgcagagtgggaaaaggagcatttatcttgagaaagaataactgcatctgatcaccgttttcaattcattgatagggaaatataattaaagattcctaacctatttcaggatacccatctaccatctaaatctccaagacttggatagcttccccgttcccgagtagttccccattgacaggcatgcactgaactcttcatttacgataaccgttgtttccatgaaatacactgaaaattttgcacagttgcaaggtacacagaatggattttgaattcttttggttgtacgaagcatccctagatgtgatcatgaagttagacacctgggactgtgagaaaataagtcatgtgtaagaagagtggtttggcagaattttaaaaatagaccttccatgctttgtgggtatagtttctacatattctagatctttgtggtaccattatatggctgtaggaggtaaccaactgaagagctttctgggaggagaagcttattgtgaaatgaagactgtgcatatgcgttgtatgggtctcagtccagctgtttgtattgaaacatcataggctatacattgtgagaaaagagaagtaatcttgtggtaaccaaagaagtttgaggtgaaatatgtctcactgtttcatattcagctggggaatgtctcactgttttatattcactttcttatatttgctgaaataaaaacaaaaataaggtaaatttgattagtagtaaccttgttgggtcctttaaaacagtgtttttcaaactgtagtctgttaatctttactgggctgtgaaatctgttttgtgggtcttgtttagcatttaaaaatgtattaaatataagaaaatgtagaatagaaggtagagggaatggcacatagtaaggatcaatatctttttgtgaaacttgtatgtcatatayacacatgtrtactacaaaatatattttttacggtggatcatggtcaaaaaagactgcaaagctgttttaagcatggctgtcagcataggttcctaggatatcagacaatgatgtgtaaccctagctggattcttggctgaatgctaggggaaactggggcagactggggaggagtgagaggtggcacagtggctccagaggcgctgtggtgacctgccgatcctgctctgccctgatgctgctgccgccttggtgaagactaagtgcattactcattatatggatagggttcgctgagagctctgccagcagtttaagattggagtctttgttggcagggcagtttcaaagctgaacataaaaactggttacagttttttggttgagggggccaagtgtaggggggccatgtagagaaagatttttcttgagatttcctggtttttttttgtttgttttttgagacgtagtcttgctctgacacctaggctagagtgcagcagcatgatctttgctctctgcaccctctgcctcccgggttcaagcgattctcctgcctcagcctcctgagtagctgggattacaggcacccaccaccacgcccggctaaccttttttgttttttgttttttgttttttttagtagagacggggtttcaccatattggccaggctggtttcgaactcctgacctcaagtgatccgcccaccttggcgtcccaaagtgctgggattacaggcgtgagccattgtgccccgcctcgttttgttttgttttctctcctaacttacattttgaggcaatagctgagtacctttggtgcatagactgaaatggacatttgccatttggggggttgtctagcattggaaccccctttgtttctagagtggtctcccattgttgctgtggaagctgaaggaggtgcagacacataactgagggcaaactaggttcaacctcttcgattcctcctcgtcaggactttgaatctggagggagtggtgcaaacatacagaggtggcttgagatcattcatggaagcagcagagttgggagtccagtcctggtgatggctggtgaccggtggaggctgtgcgagcagtggtgtccttatcaggctgttcctctgtccttctgtctttcccttaaactcattttacccttaggtaagcagagctggtttctgttgattgtacccaagaacactgagtggatataggaagcatgttagatttgtgtctgccctaaatgaacttagtatgtgacaggtgagaagaagtaggtgaatgcttggtagacacaaatagtaaaatttagcaaggggtggaaggattcagggttgttttcctttgtattcctttaaattatgggtaccttcaagctttgtcagatgacttatcagcaggagattctatgtctttacatkgtgacattttggaaatacatgttaataaaaaatgagctatgttaggtgcagtacaaaatggtttcaaacttttataagttagggtttgttttatttgtttcttttttcagttttaagctttttaaaagccttgcgcatactcacagaaaactgatttcctaatgggtgtgagcattttattttagcattaagagatttagggaaatcttgaatcatcatcacaacaaccctgtaaagtagatacttctattattctgaggaaacaaactcaacagaggttaagaaactggcctaaggtctcagacagtgggtgttagagctgggatctggacccaggttagggtgactccaagagcaggcttttaactgcttctataaggaactttggagggcatccaatactttttcattatgcagggtttgagctcagagaggttaagaggcttgctcaacaccaggcaggtcctagtggatctgggctggaacatgggcctctttctgactggtgggaagaagctctygcacaagctctgttcctcttgcaccctcccctcctttccttgctgtctgcctttttcctgcaagattcttcctgtctgcatactctttcctgcacaattgtgcttgtgattttccttcttcctggcctttattttyattttttttaaagaacagctgtacctttcctctctctttttcagtcttctccatttctgaaaactgagagcagattcctctctccttaatcccctctcagcccaaagcatggcccttgtgtcctctgtttttgactcccatggttctcagtgtctgtctctcagcatgccctcacagcctcttccctggggttcccgtgtatatgttagtcttgccagctgtcagtagattgtaagatttttggcatgctcagatgtatttgtgttacttctttggattcccctgaagtcccacaccttgcccaaggcagagtggtaaatggaaaggggagwgaggctacagctgagaaatgtgtttgagacctatctcacctctcactggccagttgactgtgggaacgccttagccgagtcttcccatctgaaggggctgtgaaactcgaatgtggtttagatgtgaaagccctttttaagccataaagtgctatataaatgcaaggttttattgtgatggcacaagtgcttcagaagtatttttgggataaatgattaaaaagcacatattgtgcctgggtgagttggttcatgcctgtaaccttaacaatttgggaggctgagatgggaggattgcttgagcccaggagtatgagaccaccttgggcaccatagtgagacccctttcccaaaaacaacaacaacaaaaattaactgaatgtggtagtgtgcacctgttatcccaccttcttgggaggctgaggcaggaggttcacttgaacccaggaggtcaaggctgcagtgarccatgattgtgccactatattccagcgtgggtgacagagcgagaytccatccccctccatcccccccaaaaaagcacatactatgaagacaagccattctccccaccccgccatgttttgagtgtccatttgtgccaccaagtctttgaccctggggtaaggatatggatggcttcactaaatcttatattcattgctctttaataagattatggatgtgttagtggtaattagtttaaaagaagaaaaagttttttagaaaaggaaaagtaacaaagtctcttggtacaatgtggcttttagaaagacacttactgactttaagcaaagtactgtatttacttttatcaaaaactgtctctcactgaatgcaggctccttgggagcagtgcgaagcaccgaaccattgagctggcattgattatttaatcatccctagtttattgtaaatgaagcagcacttacggttctggggtattcctggaattgctgctatagttagaagtgagttattctgtgtggcaggagtggcatatagaaaagccatagttctgacttcctgacaggaaaaatagcagattttgtatttatatgatgtcgtccttttggctggaatccatcagctttacagtatcttgtgatgctttcatcagractgttattccacgtctcagcatagcagtggggtcccagtagcaatagatacaagtcattttcsgtggctctatgggtgtgaagccactggcagtttccctggcttgttgtgtaggttaggctgttaggaggcttcctgttcacatgttgctaggactttcctctcacactgtggcagtggtgccagggcagagcattagtagtgggcaggaacacagggaaggctggggccatgcagtgattttttaaatgacagtcctttcagtctacagaaggaagagtgttggagtaagatcagtctcctsggtggttgttagactatgaaaagtactaaaaaaccagagaagacagtggtgttgctgatggggacagtttagagcagttcttccccactgtggaacgagcagggtccttagaatcagtagtcacgtgtttgactcctggcactctcgctgattagcgtaaaacctctcatgctttttatgagaattaagtgcgagtgcctaactccaggctcaagatattgaaatgcttagtagatattgttttttttttccttgactggaactgtatatttcatcaagctgtaatcagtttaacaaattatggtcaaaataygagtgcttactgcatgctaaactctgttgggcattttacatgcattgactgacttaactcttaatagcccagtgagataaatgctatttttatctccccacttacaccaagaacattgaaggttagggatattaactaacttgcctaagattacaatagctagtcggtggagacgccagaattcaaacccaggttgcaatgactccagcccgtgctcttaactgctttgctgtgtcatctgagctttatgaaatggggttttgatttgtatctaggcttttgctcagaatccctatttagactttgctcttcgaagcagattcatagcccactttagtcctgtgccataaagactattttatattgcgtcaatacctttttgtacacttacacatctatagcctcttgcaaaaagggcattgtaggtacttgatgaagagtttttgaaagttgtttgtttttaaaaagagacaacatcttgccatattgcccaggctggactcaaactcctggggcttaagcagttctcctgcctcaacttctcactgaaagatatttttaatccttgtaccaaccctctaggcaggatgtttcctcttaggttaatgggtagggaaactggcttagatgaaaatgacttgctcatggtcacacttgctagtatagagttagtgggaacctacacaccttggattactgtgctttttttcattgcataatgttgcttactttgtaccttcatctttcatttacagctgttaccgaacatacttcttgatcacctaatttgtgctgaggataaagcactaaatacaagacaaaaaaaaaaaatcctgatcttcctgtagttttcattgttgtgttaggtttccttaccaacgttaagactgctgcctgctgaaatagttgattaaggcttaagatttttagtcttaaaatttcttaagatattaagaagctgatttcagggcattttctaaattacatatttttctttcagtttttctgagttcataccttaattcataaacattttagttgtattttctacttcagaaatcaaaaggtttgattcctttaaggcaaacacaaagtaattcattgtaggtgtgatggtttcttttatatccatagtattttaattcttgtcattgagtttcactgtcaaccagtctgtttttaacggtaaaaatctggcagtggcccttggccaaagtggtctcattctgatgatcatatttatgaacattaaaatagtctatttttatttccttgtccactatccaaaatgtgtgttcttcccttgcgcagataccagtctttcaaaagatgcccttgaaaatttaagagagttccagttttttcagatagatttctggaattttgcatcttggaaaaatttctgacattttatctattgcagtgaggctttgttccaacccacagaattgtgtcttgtttcttttattttttcccttgttgagaaagtgtcagatatacttgtcttttttataagactgtggtaaactgaagcaatttgagtaacccacaaaatttccctgatttttttttcatgtaaaacagcacctacaaaattgagctacaaaagtaatcctctgtcaccaaaagaaaggtattttctttcaaatccttgacaattttataaataaattcgggtggaagaattcactgctatcaccaaaaaccttctgattactcttcctggtccttcctgttttctaagtgtctttatattcatttgagttgggaattgaacccagtgaatcatgttctttttaaagggtattttgtgattgctcctggtgaatctttctagcattgatgatttttccttttgtatattgcagcaagaaacttgaatttatttcttggaattatccaaagtgtttattaatataaactgatcttgctccttttctacttgctctaaaaataatcagctagatcacattgtctggtttattttagaagaaatattatttggatgaagccattacacaaatgctgtagcacacacacaaaaaaaccgcttgtcatcctgaatgaggacagttgtcatttcatataaagtggatcagcagccttaggtttaaagtgcttagaacagtgcctcccatgtcttctaagtgctatgtgggtgttttctatttttatcatcagaatggcaattccctgagagtagagattttgttgttattgaatcggcattcaaaagcatcacagttaatgcatattgtcttgaaattctgttgctgttcttgttttctcgaagagtttaatctctaggctaagcatcacaaatctataccattttactgttgtgttcaataatactggaggtcagtttgaagattaggtataatgtgattgcaatgtagtattgcttgcagaagagacagaatgattggaaaaccaaactcyccttgattactggtttttgtagaattctagttctaaaagaatcttagtgattttagtcagatccttgaatcttacatgaggctaagagaagttccatgactcctaagttgaagtaacacatggtctgatagtgcatattaaaaaactttttaagttctggccaggtgtggtggctcacgcctgtaatcccagcactttgggaggctgaggcgggcggatcacgaggtcaagagatcgagaccatcctggccaacatggtgaaaccctgtctctactaaaaatacaaaaaatagctggacgtagtggcgcatgcctgtagtcccagctactcgggaggctgaggcatgagaatcacttgaatctgggaggcagaggttgcagtgagctgagatcatgccactgcactccagcctggcgacagagtgagacttaggctcaaacaaaacaaaacaaaacaacaacagaaaaacacctttgtaagttctaaaaaggtttatatggtagcccttctgaatggagcctgggcctggtggaacttacagttctcttcctgtcctaaaaggctgagttgtgaccctttccgggtttgaggcatgcttttcagtactcccctctggtcagttttcactgatccttggcagctggtaacggtatgctgtgaggaaacctggggtagacaggctccagacatgcagttagcaagcactgcctatggactggctagtgctgttgggtgcccaagtgtaaaaaggagtaytgtgaggttttcctgttcaagcaacgggagagacaagcctagctcctttctgctataggacctttttccccacacatgctgatccttttgctgagactgctatctccgttttggcttcatgccccacctccatggacatccattgcatcttaactcaatgtcccttccctcctgagccccagaccagatcacattccctctattttatgttctctacttttccttcatagcattttagctctttgtaatgacctctttctgtacatcttagtttgattccattcttcccattgactgtaagctccacgtaggcagggaccgtattgcccttgtcctttgaattagcttagtttctgcagagctgtttgaaaatacttgttgaaagagtgaatctcttcaacaagtatagcatctgaagtcctgcttatgagcagaagcaaggcattagcatgtagctagtttctaagtgctgttctgaggcagggcagggtgtttattcacataattaaaacaattgattatattaatttttaaaaaacttttgtgcagtgattttaatcttgttaaaattggccataccaaaatagccaaatcaaagtcatcacaatcaaattcatacttgtctcccctgccrggctttccatcattacttttacttaagtcttacccactgcagaaagccttcccaagccagcccttgccagtgtcagtcaccagagctaacaacatcctgacgcactcacactattgattttaggttgcttttgtgtttccatttgtgctgtctccaaccttctattgtaaggccctgtggggatgctggcctcgtggcctcagaggtaacccatctccctctcccccttcgctgctgccctgtaatgcctgggactatgctcttcctaaaactggattctgataaaatgtgttgagtggccagacagaaaactgaggtgataatcactgttaatttgagaaccaattttgaatcaccaaggttggtagcttattatttgcaaaaataattggattctactgttaaagaatttgtgagaagcaacaaggaaagctgttaaaataatacaaagststgtgtgtgtgtgtgtgtgtgtgtgtgtgtgtgtgtgtgtgtagacaaggttggggcggggtaattctagaaggaatgagaaattaaagtgcgcgtttttgggtgtcttaaactattgttcacacaatcaggagaggggctgttgatggaaaaagcacacaatcttcatttacattggacaggacactccatatcgggaagcaaaaatccctggcttcctttcttgatgcggtgaagttagtatcctctttgatgtttgcaccctaagatgtctctctgtcctctcgatgtcctaggccatttttttgttttgttttgtttttttccttcttcctctcaaatgctttttcttgcctgcttatggtttgggctgcttccttaatgaaaatgccctcttattttcagatgcaattacctctgccactgatttatttatttatttttgtctttagcgcttctctgaagtagctttggaaagtagagaagaaaatccagtttgcttcttggagaacactggacagctgaataaatgcaggtatgtagatttgcatatttttaaaaaaggaaaatatctggctttaaaaaaattgatgaaaccgtgttcttgaggctgtagggctattggtgctattgcctttaattttttgaaattgatgtatttattcattcccaatgttgagtatgctggttaaaaaaaacctcaaatacaaaagtataggaggtacagagtaaaagttaaacttcccttgtaatctctcctagatgttcaccactattaagaatttattgtacgttcttctagattttaatatgcatgtgcataatcatattatacatgttgtgcatatgcatgakcatactatccatattatgcttttttcattttgcagaatgtcctgtgcatctttctgtgttgattcatatgcagctttatgttatcctttttgacagccacatagtagtcctgcctgttttgtttagtgagtcctctcctactggacattgtcagttggatttttttcttatttcttttttttttttgagtcggactcttgctctgtcaccaggctggagtgcagtggtgtgatctcggctcgckgcaacctccgctttcccaggttcaagcaattctcctgtctcagcctcccgagtaggtgggattacaggcgcatgccaccacgcccagctaatttttctatttttagtggagacaggggtttcaccatgttggtcaggctggtctcaatctcgtgacctcgtgatccgcccgccttggcctcccaaagtgctgggattacaggcatgagccaccacacccagccgattttttcatatttcaaacaatgtgacatcctgtaaatatataattacatgcatttgcctgtttatttccttagagttagagggtrcaacactgtctttggattcttcccctgtcacrtctataaagactctcaaggacaaaggtttatcttacattatgaagcaggcttttagctactctgttttccatcacagtttttcaatgtgggatggggttaggggttcagtgctgggttttcaagtggtcttgcttgttgatctgaatttcaaggttaattatgaactaactgtttcaggctggtttccagaagattctggtcttcagatttatttggaaattaaacagttaaaattgaatacctctcagtttgtagcattgaggcatatctggttaatgtccctcttttcagaatctctcctcaccaggggagctaatagaccaagcaaatgaatttggtgaagagaactgtgactgctgtctgccctgtatgacttttcttgtttgggggagcctccttgggtcattctgcaagcacccattatgtgtaagcctctgtgcttcttacggatatagagaaaaatgactcagttcttatctcaaggaactcacagcatgtgcataagatgcttaaatttcctgtggctagtgcagtgggataagtttaggagcaagaagcgagggccttagggaatgggatggaggttcagagatggcttcctgcaggaggcgatatctgagctgaattctaaagaaagttgaagtttgccatgcaagggataaggtagaaagatattcctatagaggaatcagtgtgagtgaaggcaggagggtgagaagtagcattgggtaggggaggatacagtaacactgacagccttgtgggtttcaagcatgaagcaagaagctcagagtgatagaagataaggtgaggaaggctggccggccagatgatggagcagggctctgtttcagagtctcagaattgctctgtagattaatgggaagcccttggaggatctggtatgtgttayggagaaattactttaggggtttaagtgaaggttggcttggcagacaggaagaaagtagtaggagtgtggrgtcagcgaattagtttgtagcccattggtattgggcaagaagaagaaagaatgtgtagggctttccctcatttctttcctcctttctggccttgcccaaggctaagttgctgaggttggttctttggccctaggtgctctccctttggagggtgcttatgtgaattacttacttacgcacttttcaccagggttttctaactgttccaaagtaaggcctcctcctgccctcctgstgctgcgtcaaagtcctgccgctcctcctggggtggtaggaaccaggctccattcattaattgttatggcccttccatgtgacttatgaacatgaattggtcatcattttgtgtgcagtgtctcaggtggggatgtgaagagagataagatacggttcatgccctcaccatgcttgctttttagtgggagatggacatgaaattaaaaygctgattcttgccataagtctgttcaaagcttatgtgattccagtagaaacagcagcagaattygtaactaataatcagtcctttaacattgttggttccagaatgggctacatttttcaattacaacttgggtgcaaatggagaaaataaattcaggccatgtctaaaattattctgatttttgaaaatatggtctgaccatattttcaaaaatacataattaataaattacaattcattaattagtatgcataattattttccatggtttcatctcttatgagatctgacatgtttggtttccaggaagggaaggggcaggggagaggtacgtatccaataccaacaccaaatgtttctgcttttttaccttcagaacactcccttttgccataagaacttttagcacatagagtgaccacatagtcttgttttccttccacaacagtatctaaatataaaagaggactgcaatgccatggctttctgtgctaaaatgaggagctccaagaagactgaggtgaacctggaggcccctgagccaggggtggaagtgatcttctatctgtcggacagggagcccctccggctgggcagtggagagtacacagcagaggaactgtgcatcagggctgcacaggcatgccgtgagtactggcagctgcccagggctgggggtttcaccaacacactagttcagaagwtctgggggtctctgccccttgtagcgctgctgggcagaaagagttgtggactctggagtcaggttcctccctgcctctgccactgccacttgcacgtgaccttaggccagtgattctaattctgagggtttcgcttttcactttcttcatctgcagagtggcttctttctgctccgtcactaatgaactataagataccaggggatgacgcttgacttctgtggatccaggctcagttctcatttccccacatctgtacaattggaataatatcagcactagatgaggtgctacgtaaaacacctgggactaagtccctgctcagcaagtagcgtatctcaatatcttaataattattcgaaacttctcctaaaaagtttgacccctccttctgctgccgtgactgccctcccatgcrtggtgctgagttgaagtgagaagctgagtgttgctttgtggcttagtcaagttcccaagttgtgaaaaggacgaggctctcaacaacacaagcttttttttctcctttcaagtgagagttgtcttaaagttagcctgttgccctcagaaggtgggaaaccaaagtccctttcatcctttgaacttgaggacattggcagtttttgcttgcctgattttaaatgacaagttaaatcatagaaattaagttaaatcacagatctaatccacttggattgtgatgatggttgtacaactgagtaaatacactagaatctgttgaattgtacacttaaaaattggtgaattttataatatgtaaattatatctcaaagctgttttaaaaaggttckatcaactcgttttatgatgatgaagtagccatttatgatgccgtacagcctgatccctrctttacttatcccacctttaaccctcagaacaactctgaggggataggttggttattttaagaattgcttatcttgttagtagtacagcttgtttagaaaacctaccttctttctgatatttgtctttctgcctaaaatcttcacacaccagagtttcaggaaaaggggagaggcttatggtatggggaagagcgtagtaggctcttactgactaaacctgacacagaataaaatgggctgaggtgtatagattattagtgggaaaaatccagtaatattgtcaagttattttgactaggccgcaatgtgtacaaataaccatctttagacagcagctttaagtgtgtttgtaattatcrgaacacctagatgtaaatcagtggttctaaagttttttttaaggctttgtttttttgttttctccctttccccttgagatttggtttatattgtttattctcttcrccaagcttcttgccatcagcacagcaggtataaacctcactcagtttgtaagcaaaggtcattgttgcagagtcattgggctgctgttaatgagggaccaaggagctgctgggaaagagatgagaggagagagcctgtgagtctgaggatggacacagtcgctggacctcctataactctgggcttagggtcagccagtttggggtgtcggtttctagcctaccttatagaaaatgagtggtgtctcttctgtaactggctcaacagaatattgcagaaactcatcaatttcagaaatacatactgaatgccacaggttcttgtagctctcactgttactacagaaagtgatgtttgagggcagtattgttttctttcctgtttttcacctctgtggggtaaagttttgtttagttctcattgattcaccccctcagtagctgtgtcttggtttgattctcagctctgcattttactagatgagtaaccttgaatcatactaaatctcaggagaccacagattcttygtctgcaagatggtcaaaatagtatttacctcattagatattaggaggattaaagggtaatacttttttttaaatttaaaattttaatattttttagagatggggtcttgctctgtcccctagactggagtgcagtggttccatcatagctcactataactgtgacctcctgggctcaaaaggtcctccagtcttagcctcccaagtaactatgactacaggcatgtgccaccatgcctggctcatttttattatttatggaggtcttgatatgttgcccaggctggtgtcgaactcttgacctcaagtgatcctcctgctttagcctcctgaagttttgggattacaggtgtgagccaccaaactcagccaaaaaawtatttatttatttatttrtttgtttgtttgtttgtttgagacagagtctytytctgtcacctaggagtgcagtggcatgatcttggctcactactacctccacctcccaggttcaagcgattctcctgccttagcctcccgaatagctgggattacaggtgcacaccaccacgcctggctgtggggtttcaccatgttggccaggctggtcttgaactcctgacttcaagcgatctgcctgcctgggcctcccacagtgctgagaatattataggcctgagccactttgcccggccaagataataaatttagagtctgtttgcctgatgcctgacacttagccctcagtaaatgttagtattattgttttactactcagtacttttatataaagagatatgtctttgatctttctgtttatgggtagtaatactgttagaatcagacctgtgttagaattacagacagttccatgrttaaaataagttacacttcagatatgtaagtgttggtgcacattcaaatgtggatatgcataaagaaaggctgggtttccagcccagtccacaaaagccactttatgaatgaaaatctatagcatatttgaattatttgtcctaataatactgaatccaaaagccatttgcctatgttcccaaggaaaacttccctttacagtttaactccatattctcggtttrtaagaaagactataacttctgaagggtaactgttcayattgcttgagaagcatggattgaggtgttcaggagagcactagatagctgccaaggtatctgtagcttcttaactcagtgtctgcgttggagagagtccccgcctgggtgtgctgggccagggagggggccctgtcagtgtcagtctcactgcagatgtccgatttgggaaacaagtgcctattacctcatattctcccaggttttttgtcatttaagtttacctcatcttagtttgaggcctggctgcttatgaaaatatcagtaatagctgattattggcagtcattctccccccaacctgcctatktttcaggttcataaaattttaatcatgggcgtagaagtgagtgacttcataatctccctggtctttcccatcattctcttattgacggaggcaactggtggagtggagaggcaggggagcactgttgggccagctttgtgaagccatatatcttcttgctagttggttactaaataaaaaatatttgtgataatcatacagagtacttaagaagtatatttattattaatggtaatagattttaatcactgacaaaaatcactttggttattatttattctaatatgcattttgcatactactgccaggaatttgtttgcatgtctgatgtataatcacgagcgtgttagaattgtttaagtgctttctgtaggaaacagatggaagatttccccaactcccagagtgtttccgattagcaaagtgcacatcaggcaggatctgtgaacctctcagataggggtttttttgaagctggatttgataagrctctgtgacggatacctgtaatgagaaatatcatcagagttttatttttaaatgatctaaatttggtttgccaggagctacagtgcatatttctggggagtcatagttcttgatgattatgatcaaaacagcctgaccgaacctggtcrgaagtctgtttgcyctaagaggatatgagtgacccagattctttgtggatgagagagttccttatctttgcatatattgggtttagaaacagatggccaaatgtatccgccttgattttctgatgtgtttttttacttttcctcaggtatctctcctctttgtcacaacctctttgccctgtatgacgagaacaccaagctctggtatgctccaaatcgcaccatcaccgttgatgacaagatgtccctccggctccactaccggatgaggtatgggaagtactgacctggtacctgcctggctccctctgcactgagggacagtggtcagcctggagccctgagtcacttaccaagaagtattgtagtcatttttgtaatttgtaacttttgtatttgcttgatgtgagaaaggacttcttcagtatttggaatacaattcaagatgagtttgatcaccttcctctgccacattttagaaaagaaatcttgataaggcagaggatattttgaatagaattagtgtcctacagcagagtttttcaaatgggtaatcatagttatgaatttaatttagtggattcacagttatgaattcaatttaatttagtgaatttaagaaaaagaaacaggagacgatactatcagcatatatacataacctaagtatattttttaaacttttgagwakatatatatatatatatatatatatatatakatatatayacacactatatatataaaggtcatgatataaaatatttttcttactaaaagttgcaactaaaaagctcgagaaacattgcctgaagtgttaactagaaattctaggttggccttgctctctgggagtggatgttttgactactccttgaggatttttggctgtggagctgtaatttttcttctgatgggcacctgccttttctcccatattgcagactttgagaaatgtcacaggtgacacagacagtcagtacttcaatagctgcagtctcctgagtttgtaaacatatttgttcagtaactagaatggaaaatatgttagttacatacttgctaagcagaagttaatgtgtgtttagcagtggagattataaatagggtggatcctttttgaaaagcaggttaacttacagaggtattaaaacagtagataagctcagatgctaatagaatgcagggatttgctagaaaagccctctgaaatctcggagacttcacagtatcatagctactatttttgggagaatttggtggagttgtcaccattacacaatgactgggatgtttttctcagtggacactgaaccagatctaactttctttgataatcatcctagggctgactttttcctcttctttctatgcttaaccaaagtctcacctggagaggaaagctgtgtgccgtggagatttcaggtcccagctgagccttctggctattggctttgtttttccacatgtaatcttgctttttgtggcctggggattggctgtgtgatcagcattgaaatgggttgttgcagtttgaagtctggaaggggtatgtccctgggttctaattctttccctctaggtttctgtactcagctcagagtctagaatggtagcttttaggattggaaaagaccaaagttacctaattcaactctttcatttttttttcagtggaaaaactaatacccagaaaagggaagagagttaacccaaaaattacatctagtgaattgtctgattagctttacaattgaggcattgtagagctctttgaggcattagtcttggttgtctgagtgcctggctattaaaggctgtctttgcctgttccctctttctgttagctgcctggaagtgcagggttgcttcacttttagcaccttgactctgtacctgacatggtgcttcaacaggatattgctttgttaccacaggccctttgaacttggaaaaaaaaaataccaccctaagctaaaacatttgcctgatgacaaactacaaagattttgaaacctcataatctcaccactaaaggaggcgtaaatgaaaataaatgttggtgatgatttcagtggagtaccagttttactttgggaaatattcttgtatttcaattatcgttttctgtttttagataatgcttttgatagttgttgggtaatcatagttatcctcaggtatctctcctctttgtcacaacctctttgccccgtatgatgagaacaccaagctcttatatatatatcttagcataagacaaccatattctgtattccttttcaaaaaatattttcttgcttttttaaacaattgaatttcacagtccattaaaacattttatagaagcctaaagagagtttgttgtgtataatatctgcatataaacttaaaatatgcagttatctgtacataattttctcaaaaacttgcagtgcgtagctctgattgatgtctatttgtcttttttttctttctcctttcttcctgctttgttcctccacgtcattttgaaaaggaatataggcaggtatcattctacatttattgatgtcatttttaattttttttccattggcatgctatagtatctggaatttttgtgtaccaggtttgatgagcacctttataattaattttaaaaaggtgtgtggaatgtctgtcttcagtgtgtcttcaagcttggtcttatgggtgatagggagggtactgattctggtagtcatggatttaaaattttgttaatatttttgacatcttattaaggagaaagctgccggccttattttaggctccctcatcttctgtttacctttagcctttgttccagtggagaagctacacattatgtttggtctcctcagcctgatgctgtctgagtatctgacctaaaggcttccaagacaaagatggtcccacagggctctcagcagcctggaagaatatcgttgttcagaccagattgaagattgtgttctgcccagagggagtttgttgggccctcatctctaccagatccaaggactgtttctcacagagactcagtaggatgtggaagaagaaggccgtggctccgttggctcagggaacatctgccttttcccctcctgccacctcccctggcagtggagggtgacctgtctctctccttggcacctcatcagagattcttctctcttggacaacaccctccatcctcggaacccttttctttccttatctcgggaaaccttccatattgtacctacttctcattctcttattactgccttcctccgccatcaaacagcatttacccctcctgttggccattctgtcagaacccctctttgaacctctgtagctggttcactccttccttcctgcttgtcccagggagaggatcgtggctaagttctcctgggcacrtgttctgttctacccttgaagagcagtgccaggcctgggtacagcatgagtggcagcctccctgccagctgatagccctagctttccactgtcaccagcggagggtaagggaacagtccagcagcttcagaggcctgacgtggctcatgctgcccgtggctctgcagatgtgtgattctttctgtgtgtgagagagacaccaaagcccacagtcaaattctcagtcactttcgtaaattacaaggaagatgggctgtatagaatcattgaagattataaaaatgttggtttttacctttaaagtaacttctttgtttatcctttccatgttaattgctactccctgagtttattcatcttttgtttatctatcaagcatgtgttcagtagctgttaggtaccaggcactgggattcagtggtgagcaggacagctgcagcctttgcttccgtgcacagctcacggcattgctcgaatgatgccacaggcatctgcttctctctgccgcttccgtttctatcttccatggggcttccctcccaggagagcgtgcctcatatgtgcytggctttcgttctttgctctgcctgctttgcatggtccaggctctgtagcctggcatttaattattctgttccagcttcccttccttggtgctttttcccctcctgccacctcccctggcaatggagggcgacctgtctcctcggcacctcgccagagactgtcatatgtccaaggacaacttaycctttaagcacagtgcctagagcacacacttgttaggggcccataaaatgtctaatttcacttaaaatcagaaaacatagttgagaaatataacttgtaatattttttatggaggaagggaaaagtgtttagggcctatggaagtcacagtgtagtcctgcttgtgatacgtgccccattgtgtgttgctggatagttgctgctggacctgaccggttgctcccagagacaggaactcacagagtacgagaaacatgcctgagagccctccacatctcaggccctaactcagggcctggcttgtcttaggctctgcaaacatagcacagtgacagttgttgaagtgtagcagcagctttttgcagggaaagagggagttgtatttattgcttctccatgacatggttcttttctcattagttcatgggcaagtcaagggaaagagacctaggtagcagctgagtctgtagcctacagatggcctgggctggcttggctcagtcacttcccttagtcacttccacacattccagaaattgtgtttttcttacaggtgacagaggaagttatatatggaaggtagggttaggggcaccaaccccctgtgcaattgacaatccatgcataactttgaccctccaaaacatagctaataataatagcccactgttgactggaagccttaccaataacataaacagactagtaacctgtatatatcttatgtattcatgatgtacctttttctgaaattaaaaaaaaaaaatttctgtgctacacagttcgtcagttttttcaaactgttgcaaatctccaaaaaaattttcaatatacttattgaaaaaaaaatctgtgtatgaatggacttctgtggttcaaacccatgctgttcaagggkcaactgtagtagttaagagaacaggcttttgtagttttaggtcacctagcctcttggaatctcagttttcctcatctgtaaaatgaatgaaaccttccttgtagagttgctgtgaagattaaataacataatatatataaagtgcttgttaactcgtttcatgatgcctgtagtggtgtttgggtagctctcttttaaaatcctattcatcatgtaagatacaccatcagttgaatagcagcaatctgggaagtaggaaacactgccacgtaagctgtatatcttgattgcgtgatgaaactaagttgcaggaatgttaaaatgtcaatcaaattggtcttggattcgaggtagaatgggcttagcagtgtggctgatggtaagcgtgcagggagctgtggtcagcatggagttccagtcagcaggtgtttccctattctggaagcatagtgagaagtcagaggagctgtctttgtgatcttcgggaagtcactttagctccctgagtcatagaggaggtgctgatgggacacttctcacgcagcgctagtaagaaggaaagagatggtgaggggctacaaggggcagggttgtctgcctgcttctcagggcacttcagcctccggcactgaccactgttggtgagccaggacgccctgcccacatctgggtcccctttgccacaaytggcattcattttcctgccttccaggttctatttcaccaattggcatggaaccaacgacaatgagcagtcagtgtggcgtcattctccaaagaagcagaaaaatggctaygagaaaaaaaagattccagatgcaacccctctccttgatgccagctcactggagtatctgtttgctcaggtaggaagtttgggcccaggagaagctggagtttgtgggatgggagaggcattgtagagctcagaccccctgctgcrgctgaacttggtggtgctagagtgctttaaggcctgttctgggtaagttcttgccacacctggacttgccccaagtgaggagaaaaaaggcagcatttcagctttccaagaggctggttatccagcttgtgggctttggggcttcctttctttcctattcctttccttttccccacctcctaccattttatttttcatccgtattaatagccttatgtgcagaggtcagagggaagctctgcttgttagaagatgtaattcaacagggctgaagaaggcacttctcagcagccgtagtaatgtctggggaggaaggagatggccactctgtcactggtggtaggatagaaagattagacgctagaaaaaaaacaaaagagaaggtagaatcacctgaaattacatttactctgagattgctaagatttttagtagtatgcttcctgattttaacatgcaaatttagatactgtatagattttgaaaatattttatggttcattttgttttgtaaactgcttttttattcatctgattttttttattgtttgtccttcaaatgtcaattaaaatattgatcttcgttgttttaatgactttgtaacaattcatttattcaacaaatattgactggatgtctgcgtactatttgcctcaggcacttgtacctgctaagatgctggagatgctggagtgaacaagacagacatggcctctgcatgcatcagatgtacatcaagttagaaaacaagcaaataaaatgatacatagataatacgtaagaaattatggaaagtactgtgaaagcagaagcttgcaatagagaatatggacaggggggtttgaatgggaagacctaatttaaatcatatgatcagagaaggtctctctaaggaggtaacatttataatgaatcctgaagaataaaaaggaatctgcaattctaagagaggggtgggggactatttcttccatgtagagtgtctcagcagcagcactactgaccttttggcccagatgattctttgctgtgakggcctgccctatgcattgtagggtatttaccagcatccctgcctccacccagtagatgccagtagcactctctccttagcagtgatgaccaaaaatgtcttcaatattgccgactctcctctcagcctcagttgaaaagatctgatgtagagggaacagaatgggggaaggccctgagggccagtagagctgcaaggagagaccatgtggctgcagaccagaggagggtgatggggaaygaggctggagaggcaggtgggggcagattgcatacacagagccttgtaggagctggcaaggggttatgctttaaccctgagtgtggtgggaagccatttggaaggcttcattttatgtatgtttcaagtcgatgattcttgttacacgtggaaagcagattgtgctgggtccaagagtacactcgaaacatacaagctgagagtctgcagcaatgatcctgggagagaaaatgctggtttggcctagtgtagcaacagtggcagtggagcaaaatgagtagatctgctgttcatcttgaagatagaattgataggatttgctgttgagttggatgtggaagctgagagaatttgaggaatcaaagatgatgactgggtttctgttttgggtgatgtcggatggataatggagtcattccccacacagggaaggtcttgggggaagagggtggggaaggggcagaaatcaggagtcctttttcggagatgcctgtgaaacatacaagtggagatttcaagtaggaaattgagtaatgaggctggagtccagaggaaaagccgtcatttatttaacttagtcacccgttcctggacattttctgtttttctcgttttcccttttatgctattactttatagtctgttgtgaacaactgcatacgtaggtggtcctgtacacgttctgtttattattaccttagagtataccattatgtgtgagatcacacacgtatcagtatatctgtgtcagagttatgtcccactgtagggctttagttactaattgtccattatctccattccatctatgccttagaactgccatagagacaacagagaaaggggacagtgcacagccccaggcagatactgtgtggaaaaaaagaaaatgaacyggccatttttagatggtctttttggattcagcttcccagttttgtgtatccatagctgagatttattctttacctttcccgggagcagaggtgtaaaggaagagtgtgccatacttgaagaataagcatggcgttagattgaccttttggaggctcaggaataagtgacttgaggtagctgtacagtgaatgtttacaaaaaaaccacaggccaacaggacagtttcaggttttcctttgctcttcacacattactggcatagatcattgttcctcagaagtttttggaatgtcagtgacctttcctcacctgagagaaacaagatatcccatggtgaaaagaagagaaacgggagcagtgggagccctccatccaaaaaccattaatctgaagttcttcagggaaagagagcatctcacatatgcaggaacacttctcccaggctttgtgcctgccctgctccaagctggagaaaggcttaagagttcacactttagtgttctatgtactttaagtcatttgatgaaaaccgaatgtggctgtagcacggcattgaacagtggtcctggccaggtctagatttaatcccagcctaccacttgctaagccctgggcccccagggtactcaattcttctacttgacttggggttttataactgcctgacgttagatactcctagtcatttattcttttctttctccttagagtggaatctccaggagatcaggaacgtggtttagtttattgctgtttccctagcacctagaataacatctagcccataattagttctcaataattaccaaatgaaggagtgactgaataggggctgtttactgttttgtgccttagattcctcatctgttggagatgacgatgttaacatccacgttgtaaggtgttatgaggactaaataaaggagccaagcactgtgtggcagcactgaggcagggtttaatcagtgggagccggcactggaattatcgttttcactctgtrcaaagctgggctgggcactgctggttagccttgttttagtttttgtgtttaaagttcccgttagttcttagaatgctgtgcacctccatcagtgggggggtatattttggtgacacatttcactatgggaaactcgaacggtagatgtgggaaaatgtacatgtggtgatgatgcactgcggaacgttcccctttccctagagctacaccagaatggagggagagccccatcaactctgtacacccagctcctagacaaggccatctaagcatgtttgtggaattcatgcatgatcagacctcagcccagtgtcaccttcccttgctctggcgcagtccaggcctagtacacagtgtttgtcagcgtcacttctatggcgaagggacttcgtatgtctgtactgttccccagtgcctggcatagtgctcagtcaatgttttgttaaatgaatgagcggsggagaacatctcctgagccycttcacacccaactctgtttaaaagagctctgatgctagagaaactgccaatctgattcgtctcgttgctgtgctgcgtttctaggcggcccctccctgtgtagtagccttcttgtcaagatcaaaaacgggtgggctctcatggtttctcccccttgctcctagggacagtatgatttggtgaaatgcctggctcctattcgagaccccaagaccgagcaggatggrcatgatattgagaacgagtgtctagggatggcygtcctggccatctcacactatgccatgatgaagaagatgcagttgccagaactgcccaaggacatcaggtaaagcttcccactggctgaagaattgattgtgaggatggtggtgtttctacatgttcttacacatttcagcttaattactgccagggtttggctgacctttgctctctatgaaacccagatcttccttagaatgtttactacatacacgtagcctaattataattgtgtcttgattttggatgttggctgctaatctcagaaatttgtgcttgggtgaaatttctgagctgaggatgccaataaaattagtggcccccaggccttctccgtcccctccttgcccatggtggacactgtcgtctatcactgcattttttccttttgttttggacccatcttaaaaatccttctcagtacagttctgtaagcagctactaccatcccaagcctgaactctgaacacgttacagtagttcactacagagctgttaattctaatgtgagaattgatcaactactattaaatatctcaagaaaattgcatttacttaaaaatatcgtttgagatcaagtctctgtgaaggaatatttaagttctgtccatctatgacatccaatagttttttttcaccagtgggctattaggatggtcataaatgaagacagtctcattttgaagaagggatttcgtagctgcattgtttgtgataggcggcgtgcgtcttctcattaggttgctgcttgtttctccttgcgcttgaccagagtctagagcagatcacagcttgctcctcagtgatgcagggattgagtcgatactgctcaactgctgctttctcttttttctgtggccttcactttgggtacttcctctttattttttcataagctaaattgaaaaatgacagttcttctctaattctgttatattacattaatctaaaagaaaaataacatttgttgaggatgaatcccaaacttcacaattttctactgttctgaagccactccatgcggcagggatgacccggggccaggtgctgtctcagtcctgggagtaacaagcagatcagtctccgcatttggcccccagtggacttgttctttgtttcaggggtactcaacgttcttcttaacattgactcccgttctagcagtatatcagcttgtttagattctgtttgttgtagatastcgcccactagcacctggataggtaactaatctttcagcttacctgttgatcttttaaataatatatctgattcatattcacatggcaaacactaagtcttttgtattaattagctttagtatgtctttctctctctctctctcactctctctctctctctcttttttgtgggggtgcttggggggacggagttttgctgttgttgcccaggctgaagtacaatggcatgatcttggctcaccgcaactttggcctcccaggttcaagcgattctcctgcctcagcctcctgagtagctgggattacaggcatgtgccaccatacctggctacttttatatttttagtacagatggggtttctccatgttggtcaagctggtctctcactcccgacctcagatgatccgcccgcctcggcctcccaaagtgctgggattacaggcgtgagccaccgcccccagcctttctttctcatttttaaaataaaaaatgtgatctgtttagaaaagttataaatcagacatgcaaatagaacatacaaagcatttctcatcacacaaaatgacaattgctcctaacaccttgcagaccattttctaactgatgctcaatcctagtaacagtgtgtagatgtgagtactaatgtgcacaagaatggtgaagctagcaagcaaaaatgtagatgccctgccttggtgacccagaaaattgggcaatacttgtagcaattcccatttcagtgaaatctgtggagcatgtgctttgcttttctttcccagtttctattcacctgcatctccttatgatggtcatcttcagtgctaactccatctaacgtcctctgggaatagatctccctttcccatttggcaacatgtggattcatggacttagatttgtttctaaactattttctcctaacctgtacatgaaaaggagatgtacttttctactgtcttttagctacaagcgatatattccagaaacattgaataagtccatcagacagaggaaccttctcaccaggatgcggataaataatgttttcaaggatttcctaaaggaatttaacaacaagaccatttgtgacagcagcgtgtccacgcatgacctgaaggtgaaatacttggctaccttggaaactttgacaaaacattacggtgctgaaatatttgagacttccatgttactgatttcatcagaaaatgagatgaattggtttcattcgaatgacggtggaaacgttctctactacgaagtgatggtgactgggaatcttggaatccagtggaggcataaaccaaatgtaagtggctgttggcagtcgatcaaagagaacattcccgtgtcacatagcgtatgctgtttatccttctggagtcatctgtctgcatgtccatcactcccataggctgagtttatttaggagaccatgtatcattcatattttatttcatccctgtagcacaaggtctaaataagtatttattgagttatgtagagaaatataacaacatgtataatacgtagtagtataataataatagcagatagttcctgagtgtttaccatgtgccaagtacttttctaagtattttataagtattaactcatttatttctaaaaataaaaaaacctttgagggaagtattgctattatctccattttacggatgaatacaaagaggcacagagaagttaagaaatttgcccaaggtcataactaataagcatttgtgccaagaattgaacttaggcctctggctccgtgaaattgactaattgattttgctttatgggagcttctttatgagatatttattggatgaagaaatagagcagagtggcttaagagcatgggttttagacccacgtcgacggggttcagatcctagcttcatgacttatatggccttaggagagttatttcacctttatcagcagctaaaaattactcmtctgttaaatggaggtacctactgtctaactcataaggttgtgaagaaactaaacggcatttagcacaaagcctggcaatacaataaatgttgaataaattattatagccgttacaattattattactgtaattaataatattaaagtaaatgtgggtgggtgcagtggctcacacctgtaaccccagcactttgggaggctgaggcaggcagatcacttgagccgaggagtttgagcctagcctgggcaacatggtgaaaccctatctttacaaaatataccaaaattagcaggatgtggtggcacgtgcctgtggtcctagctacttgggaggctgagttgggaggatcgcctgagcctgggaggtcaaggctacagtgagccatgaccttgccactgtgctccagcctgggtgacagcaagacactgtctcaaaaaattaaataaatgaataaaatatgagactcattttctcctcctgttttattctcatgctaaaacaataatgcttgatacttactgarggttttctgtataataggtattatactatgttagttagcacttgtctaatctcagagaaccctgtgaagatgtaagctatttcatgaataaggaaaatgaggctcaaagagatgatgtaactagttaagtaattggcagaggcaggaacttaacctagatctctggtctccagggctcatgcgacacaaaatattttcacttgtgcagatatatattattcagtgtgtagattatttcaagcatgaaattcgtgtcttctctggaaaatcccgacttgagtactgttacaaagtcaagacgattggtgataggagaaagctcatgttcagctcagtggtaactgggaagagtatgttatctgtttgtgtcagagcatgtgtagtagtctggaagtgaggagacctgaatgtagatgcatgtctagtgagcagtgatttccctttctgagtttccgtgcacattgcgtattatatagtttagacagtgtgctcattaaggtctcttccagatatgaaagcccaggattccctgatacaacccagttctttggtcctaaccctgcaggtgccaactcccccaatcctgcaagtccagaagagctggctttctcttccttggacctaggccctgcataggtttcccagcagcactgaccttttaccaatagaaaatgaagaaagcaacttaaycctgtcccttttatgtatcttatcaggttgtttctgttgaaaaggaaaaaaataaactgaagcggaaaaaactggaaaataaacacaagaaggatgaggagaaaaacaagatccgggaagagtggaacaatttttcttacttccctgaaatcactcacattgtaataaaggagtctgtggtcagcattaacaagcaggacaacaagaaaatggtaagtttgtcccagaagctcttaagtctggatctggtgatgagagggagaattgctgagttccgttctgcagcacatgattttcagagttcctgtcctaaagagaaaacaggattttcttattgaagccaaaaagttcctattaccaaggcattctcagtgttttaaagttacaccgatacattccagtgcctttctttggtctcagaaatgtgaatctgccttaggatttgcttccctcccaaatacacctcagcatcaatatttaattcacaaagctagtggatttgaaggaaaagaaaaccagcgaatgtcagtgtttcctcccaagggttctggcacggcctctctgctgagctgaagtgcaaagcaggaagccccacgttgccctcaggcgagcctcggccacagtggcagtcatcgatatggtgtcaggcacaccccagtgactctcggacagaggaaagggtgtttaatctcacttcctcttttttggtatcacttgaggacataatctaaacaagcaggaagtgggaactctgccaaaataaacctgtttgtgtcaggggaagtcacagccaacaacatgcagagagagcggctggtgagacagctagcactcttaaggtgagtggagccaacaccaggaaaggccacattctgccaaaatgtggcagatactgtgtcacaatgataacgctcagtgctgaggaagagcctggtgatacggtttagggcagacagtcactctcttgtattcagaataacttgtctttctgatataaccttttggaaaacagtttggtaacctgttaaaagccttgaaaatatttatatatccctctgttcaggaatctagagaatgaatctatcttccagaaacaatgtgagaggcaggttatggtttatgaataagaatattcattccagtagtaattaaagtgtcaaaattctgaaaataacttaaatatacaataataggagaataggaaaataaatcacaatttgcctgagaagcagaatattagamaatcaggttgctgaattttttaatgacctggaaaaaaggtcaggggaaaaagcaggatataaaactttacctatagaatgggaccagttttgttcaaaatatcaataggtatgcatgtatatacacatgctcttagaaaaataaatattaacagctacttatttatggtggcattatgagtggttttaattttcttattctcccctccttttttttaaacaaaaaacttacattaattttattagaaaaatatagtaaaaacaaagtgaagrgggagaagtagaagagctcagatggatgttaatggaaagatgcgaaatggagggagaaaagaagaartgctgttgatggagcacatcctggatatcaggccccgtgttatatgctgcatcctggatattaggccccgtgtcatatgctgcatcctggatattaggccccgtgtyatatgctgcatcctggatattaggccccgtgtcatatgctgcatcctggattttaggccccgtgtcatatgctgcatcctggatattaggccccctgtcatatgctgcatcctggatattaggccccgtgtcatatgctgcatcctggatattaggccccgtgttatatgctgcatcctgggtattargccccgtgttatatgctgcatcgtgggtattaggcccystgttatatgctgcatcctgggtattaggccccctgttatatgctgcatcctggatattaggccccgtgtcacatgctgcatcctggatattaggccccgtgttatatgctgtgcctgtatcttggtctgtcttagtccttgtaagaaccttaggggactgagcatcagctctacttgaaatgaggaatctgagactaatcaagaggcatgggatcttgcacagggtcactcagtgagaaagtggcaggcacttgcccagctctgtctggttcctgcctgtgcattttgcctgtgttgctttggcttctaaggcgttatcatcccccagagaccccgaagggagtgagggagaggctgacatgtccatgatctggctcttcaacgtggtgtatgcctggtgcacattttatgagcctgccccatcctgtcctgtcctggttgacacagtcaagtctagcaccaacacaagttggtgcacccatcatctaagtcagagctcaccctggccacatgggccaatgactctatgccaagccacagtgctgtggagggagcaggaggagggcaggaagaaagaaatacttgattcctccattagtttgtttttctttaccacgctagcccttactrtgtgtcaggtacttcctattctgagcacttcacaaataccacctattttaattttcatgtcaaccctatgggtgagtatgataaggggaaactgaggcacgaagaggttaagtaacctgtccaaggtcacagagctgttaggttaaagcatttgaaattgccaatatttgaccattttgacctataaaaatgatgattccatatgcataaccctactagcaggtggagaggctgcgatttgaacccagagcagctggctctagagcctgagctgagggttgaccactgctccatgctgccagtttagaatctcatgccctcgttgtcccctcccagccatgggattcccaagccctttaatcaggcagtgctttgaagaaaccctgataccagcatgttgtcaagtcagaccttcatgtatcacttctctctacatctccttggcatccctcatttctgtttagactcctgttctcaggaaatgtaagtgcagatgtggtcttacttatcatgtggctgggtgaggggctgcccaggccagcctgccccttgttcagagcatcttgaatttgctcttcagggatatccgcaggtgggtgcctggtcacacccgcaaggcagtgtgctcagtgtggtttcttttttctgaagtgccattcctatggtgaccctgccctctccaggcctccttcctcatagccccaggcatgcttccttcggcattacagctgcactaggcccctgacctccctcctgccgagtggcttgtctcccctgctcctttttcccttcactgtcctctcatttctgccacctgcctctcctttctacagggctatgaaagagtcattttgcccttttttgaagcctcagatgctttttaatgtttttttgtgagtcaaagctccaaatcatggcttttgcataccttcccttgccaggaaatgttcttgattgacctgatagttcctgtcaaatgggcagtctcttcagggatcaatgatcaggacaaaagtaccccaaatctacaacacaggtgtctttcagaacaccttccttgatggaaatcccctccctcctcttctccacaggtgcctttgcctcttcccactctgagtaagacactctgctctctccaactctcagagctccctaggcttaatctagcaaactcttcactgggcctgggattattcctagattaaaatccgggagtttcaccttctagagcaagtctgctatgagatgaaccacactgcctctgtttcttttctcctaagcaggaataatgccgatttagccattcaccgttgagtgccaagatcacggtgcatgctttgccccttcccacctccacttttgtgcctctgccaccttgattcaggcttcctcttctcccatctggacccaggggacagcttctctgcatgtctccctgcctgccacagcctcccccaccgcgtcacccccaacacacacacacatacacacacacacacacacacacacacacacacacacacggacccaggggacagcttctctgcatgtctccctgcctgccacagcctcccccaccgcgtcacccccaacacacacacacacacacacacacacacacacacagagtcatctgatagtttgagataatagatgggaaaatgtgttgaacagtgaaagtcctatataaatgcaagggggatcgggcacagtggctcacggctgtaatcccagcactttgggaggccaaggtgggagwtcactcgaggtcaggagttcaagaccagcctggccaacatggtgaaaccccgtatctactaaaaatacaaaaattagccaggtgtgrtggcaggtgcctgtaatcccagctacttgggaggctgaggcagaagaatcgcttggacccaggaggcggaggttgcagtgagccgagatctcaccactgcactccagcctgggcgacagagtgaaactccatctcwaataaataaataaataaataaataaataaataaataaataaataaataaatrmatgcaaggggtatatttagtattgatgaaaaggttttccctttggggttcccattgggttataaaaatcttctcactgtgcacctccctacagagtcagccacttaagctgatagagacatgatgtaaccrtgggaatttcttctctctcaacaggaactgaagctctcttcccacgaggaggccttgtcctttgtgtccctggtagatggctacttccggctcacagcagatgcccatcattacctctgcaccgacgtggcccccccgttgatcgtccacaacatacagaatggctgtcatggtccaatctggttggtcctagaaccttatcagttgcctttggtgtgcagagagcccgtgttttagtgatggggcatgtcatcattgtttaggtcaggccagttgaccatgctgcctggtacttgttggctgtcctcctttcctccctgctgtccaagctctggtcaggccttcctgtaatctcctaccatcctctttgcagcagcccctcaatgctgcttctttacttggatctctcttcatagtttaaccccctcacctctccatagctgatcaagaagtactacactttctgatttcttgctgtgtcaaacaatgtgggcaattcaagaaacactgaacacagctgagcgtgctgccatgtgcctgtagtttcagctccttgagaggctgaggtgggaggatcacttgagcccaggagttcaattctagcctgggcaacatagcaatatcccatctctaaaatatataaaagaagaaaaagaaagatcagatgatgatctcagcatcagacagtgtaataaatggaattgtcagtcagcttgtcccaaggtgccaggtgaacagtggggaccgtgagggtaatacagccttaaggccagaaggggctgtgtgggatgccttgtcccacctgcatctcagaactggcagcctgtgctgaagtacctctggtgatgggcaatgtgtgaggcagcccatggattggagctctgactgtgagagatgtgcatacctttctgatatggagctgtagttggcttctctgtaacttctgcctactcacttgaattctgccttttgagacaacagggattcttttgactttctcttacatatgacagcccttcaggcaaaggaaaacagccagctgctgtgtttcttctgagcctctcttttcagaccacagaatatctggggaagcatctcttctgccacctttcacatgatgtgcttctcaccttcttccctcttccggctgccttgtggacaggtagcttagtagtcacatggccctggccttgagaggctcacagactcatagggaaacagacacacaaagaatggcagagcaaggggttgagcatttgaaaagcgtcttctgccaatgtcccagcyatggttgtgcttcagggcccaggcactcgctcttcccttggcccagaatgcccttcctccagaatctgcacagcctccacttccttcaggtgctagtcagatatcaccttatccgtgaagtcttccttgaccaccttatatacaatcatacctctttcccttctccatcccatacatgttggccactgcactctaccttattttccttcagtggcagttgttacctcctgagatactatgtttatttacataacataacatttrttcctggtctgactaccctcacctcccagaatatgagcttcccaaaggctggggctgcattgctcactgctttcttagcacacacagggtctgacacattgtaggccctcagtgagtatttgttgaatgaatggatatttcatgtttgatgggatgctgacattccttgcctaaagagcctgctcagagtaggtggcattcaaatctgattaaaccaaagaatcaatgatggcttgccaggccttaaagcacggaaagggtacctagatgagaggtcagcacatgcaaaggcatggcgcagttagaaagtacacaatgtccctgtctctctaaaacacacgaaccatggcggccctctctcaccagcacttagcaagcagcactcacctcatgcagggatgtattcagtcagtattcactgctctctacatgccaggactcactggtcctggggatacaaagaaatgtaagacaggcctgttcctactaacatctgtccagtcctcactgatgtattctctcagtgtgagcccatggtgatacaacaataaacaacatggcctccagttcccacccccatgaggtttgtgcttccactgggctggctaggggtggaggggaggcgtggcagatgctcatcaccagcctccagagaggctcttctgtcttgagctggagatgatgtctgtagggaatgcggggacaagcagggctcattgccttgggcaggagtctgagtcctcttctcaaccttggagactccatcggtcctgaggccactcggtatttccgctacgctcatggatggcatcagaggggactttaggatcccaggcagggcagatagtgtgatggggctgttaagacttgaggcagctcaggagagtggatagcccagaggttcaaagtcctgtttggtgtgagctctttctccctttgcctacttctccctctagtacagaatacgccatcaataaattgcggcaagaaggaagcgaggaggggatgtacgtgctgaggtggagctgcaccgactttgacaacatcctcatgaccgtcacctgctttgagaagtctgaggtcagtcaggacactggcttggaccaggccatacagccatgaggtgtccagtgtagcctggttcaggagctgctgcagacagaaccacccttggcagggtggaactgaaaagcctgggtctctgagaagatccctgggaggtcaggcaagggcccctgctctcaaaaggagactgctccccagtagccagacccctrcatcctccccctgtagggcccttcttccttcatgggacccatggtgggggtccaccatggctctggaagacagaacatgaccagaaaaccaattcacacccaacacttggaaagtatagtgtcattatttagagtggtttatttagactcagtgccaccatcatctcagacccagagctatgcctgtctacagcattcactggtacaaaccagcgcccaaatgccacttcatccacatggcctaacacagttttttccaaatggtagcttcagacactttaacaaattgccaccccatcttagaacaatgaatagagatgtcttttagtgattgaagcgtagctgaagctggggatgatgtgagatacattctgagggctaagatattcaccagaattactgactttgcctcactagaccacaaatgcctttgttattcatgtaattaaaaaaactacaaagtggaatattttcaaagacagtgagttttacaaaacactttacatcagtacactttaatcagtactggttaggctccacatgcatggggagacctgggacacggaggggcctttggcacggagggtagacgcaggaaggacagcttattggcgaacccctggggctggactcagtcaagagtgggaggaggaaacggcagaaggaaccagcgctgccaagtgtcctgggtgatgcaatgcaggaacaccaccacctgcccaggctcttgctgaacagctgggcctcggggctccgtggctcagagcctgtcaggttcattgccttcccagaatgcttgccgtctattcatcagtcattggaggaagtttaatgtgtttacgatggaggggtgcatgagacagcccagcctcctcctgaagtggaattggcctgtgcagtaccaagagtktccgtgactccctaacaatgtcacatcacccggggaaaacagcagtcatagaaatgattacttccaccgcacactgtggcccaccagaccctgtgccaagcgttgtacctacttgtgcttttttaagccttgtaatagccatattaggtaggtgatattatcccattgtacagatgaagtaactgagattttgaatatcatctcctagtttacagcttatgtaagtctttctggccctcattgtttaccactaaaatagtttagtttgtacaaaaagagcccatgagggaaaactgcttatacctcctatctggcaccacagtgtcccaaacctgggtcagacactgaacaccagctcccagtgtggttttcctcaagtggagacatggcctggaagggctcagtttgaggctgttccttgagaagttgtgccatcataattattacctcatatataatatctgctggactttataaagggcttactaagtttttcaatacaccatgttagataattgtagcaacaatcctatgaggttggattttcatgaactttatcttacaggtgaaaaaccaagtgacgcttttgtagaaatagctactgtgtctgctgtagtattaactcccttttatcaatgccttctcctggaccttgttttattatttagttagttgttggttggattatttattgataataaactttatttttgaataattttagatttacagaaatgttacagagatggtgcaaaattactcttcatgcagcttcccctaatgttaatatcttacatacccatgcctgacccyattttaaacrtgtaatttctggtcatttccygaatagcaggtgcagggtgcccagaagcagttcaagaactttcagatcgaggtgcagaagggcygctacagtctgcacggttcggaccgcagcttccccagcttgggagacctcatgagccacctcaagaagcagatyctgcgcacggataacatcagcttcatgctaaaacgctgctgccagcccaagccccgaggttcgtctccctgtgccagagccaggctgtatcccatcagtaatgtgctgagacccagatcgaccaaaacacgctgactgacttaaacaaagtggaccctccccacagtttctaggtgttttttattgagtttaattacacttctgtgcccaactcacatccaatcccttgagtgtgagcattttctgtagaagaggcatatacctttctcagcatctcattaggctgcagaaagaggcatgctcagcattagtaagcagaaaatcacttctttcttccttaagataaaatgccttgaggagtctcctgtcactggtttatttatctgagagatattcctggcacatcttttgtgggccaagaactatatcagatgcaaagaatcagaaatgcataaggtccagtccctgctctctgggggtttcccagcctaatgctgatgttacaggtaaatgaggccactgcagtttgtgatgggtgttttaactaacatagatatcataccctggagtcaaacagaaagggatggtcaaaatccctgagttccgtggcacagggggctgcctggaggaggcagctcttgaactgagtgtgggaggatgagtgggaggttgccagtgcggtcagggcatctcggcacgtgcaaacagaggcatgggcgggggctgccatgaaggtgaaggtggaaggaaggtgaaggtggaagggaggggcaggtgaggctgagcttagggtgtgggggccttgagtgctatgccatggagctgggtctttatcctgcaggctgtaggggccagggaggatcagggagtgaaatggatccaagggggagccactcagctgtttcttgttaagcctcttgaatggcgtcactgatgttctgcaggtggatttgtctcttagaatgtgaggactggaaagacacgtagaggtcacacagtcaactgtctcattttatagatgagaaaattgaggcccagaagagcgaagtgggtctcatcaaaggtcagcgtcaaagaggggcttgagtgccaggcctaacctgagtgccctagctcttgagaacggtttattttgctgctcctcacctcaagatgctgcccttcatgcgtcaggttcttcccttagaaggaggaaggcctcaaagaaggagcagcacgattgccactgaggccccatgagtgtcagaggaagaccctctgaggagtctttatctgggacacatcttgttcttccaagcgaacgtgtccataaaccctcacaccaccaggrgtgggcagaggaagcagcaccaggatagaaagggacctgggttcttgatgtttgaatcagtttttggtctcagcaaggggcttgtcactgaacttggtgaaagaggagggacttgtgttcttgatcagataggggttcctgccaggctcagagaataactgcagcctttgttttcatgcttgaggattttccgcaaaggtaaaaacacatctgccacttggctgtgagacctcagagtaagttcaaaccttaaagcccaacagccctatttattcacagcaacacactggaacgaaccccagttgaggctcctgaaactcagtgctgaatgtgtttcctgttgcctttcccacctgactgtgaactcttaagacaggacctgagtctcactcaccactctatgggctcgtggggaggacagtgcccagcacggagtcagcgtgaataatgcctgtcaagtgaaccaggtagcaggagctgctggatggtgggtgcctactgtggcccagkcagtttatgtacctacctcatttatttcatctacacagtagctttttgtagatattacaaaggtgatgaaattgagacttgagatggtaagtgacttgctcaaggccatgtagctagtagtatcggtagtaggtagaacagtagtaataattaataagaacggctgctatcatgtgagcagggcttacagtttgccaggcgttgtttggagatctttcatgttttaagtcatttagtcctcaaaataacccagaatatgttgttatcccaattatacatgcccaagatcacttaggtagaggatgagtggggatttgaactcacgttgtctgactccaagtccagtgattccttctgtaccactgcccccaccctgcccaggtcacactgtctttggaaaggtgcagccatcagcctaggactttagagcaggcaccaattctcctgaccttgggagagtaagaataaggcctgtgtgtgaggcctccttacataggtcccccaaagctctctctcttccctttgccatgtgcaaattagagaagtggggaaatcgtgaaaattagacatgagaatattgtgttgggttcttcagctcctctgctctcctaaccacggggttttgatagccagaccctgatctgggtttctcacttgaaaatgcaactaagaaactcttcatgggataaataaaaagcaaagtgaaaaagcaggaggccattcagagtgggcgtgacggctcagcaggtcccacatctctagtcctgtgtcctgtgtccagctccactacccatctcccactccagaaccctgatgatacaggaagratgatgacagtgactaagatgtaatgccagtcataatcacggcggcaaccagtcagggagcgttttactmcataccrggcactgaaggcagccgttcccttgcgtcatcccattcttccacacggtaacctatgaaggacacaactgtggcccccatttttctagtgaggaaacaccttcatggaggcactgtggcttcccccattcacattgttaaccctggtgccatgttscctgaagtgcccatgcaaagaatagtccataaatggcttcggttccatccgcctctcatttcccaagtggctctgctgcctggcctcttgcctgtggacaccagccacggggccccttcttgatgccttttctcctgagttgagttgagcctgagttgcctctgaatcggattttccccaggtaacagagtggagtcaggaaaatggtatggagggagcagcctctggaaaaagagtgcccaggttgtgagaacaaggggagcctctccctgagccctgtttctggcacccacatttgttctcccgattagggccaggtatgttgtgggaagggtagagacgagagcatctctgacttcagtgtgaatcctaagattacgaactgcctggccttgggccaattacttaatctctcagaatctctgttttctcatctataaaatggggataagaatactgtgtattccacaggattgtcataaggacaaaggagttaatgtgtataatgctcatagaacaccggctggcatggagaaaacagtcggaatatgtgagcttaaaaaattagaaaggaaaagaatgccctgtcctgagggatagcagggattagagacgtggccctgtgcagggacccggcgctcagcagccattgtctcccagcggtgtgtgtggtggcctccatgggttgtgcctggctgttctacagatgttcttttaggaacttccttctgttacagtccaggaatcaggactggaatggctacattttctcccctaacttgttattgtcttctagtgcaggaaagaggaagtgaagggaaatgcatgttcgttgtcattttgctaatattcctgcttcagttaataaaattgatgaaaacatacaagtcttcagagattcccagaatactttccctgctagtcagaatctggaaggtcctttcttgccttatgataacctcgttccttgcagtagctccatagcgggaaaggtgatttctatggattgtagatttcctggcctcgaggattttgtartgtgttgggtttgctgtttgaatcagtagaatctgggggatagtctacttaaacctgcatattgagggggcatttggtaagcgcctctccatgtcaggcactgctggtaccacgagcttcagacagggcactgttatgggtctcctgccctgatcttctggctcaaaaccagcgtttgttcacctcctcctctggttcccatcatgccctgggcccrggtactgcttcttccttccatagctctcatcctttagaaagacgccagtcattcattcactcatttaacaaataataattgagtgcctactatgtaccgggctgtggrggtggagaagaaaataagatagacagtctctgacttctttcagtttccagtcttacattttaaattttaatttcattagggaaactgtttctgacctttcttaccagaacagatcttgccatgccaaccttggagcaccacacacctgttctttagaggagctgaacaaattgtagctttccatttaattgtttatttgggagttttggctctgtcrttaccctctgagctcctggagggtaggagccatatgcctattgaataagcacttgtcgaatgactgaagcagcaagcgcccgcacaccggtcccayggccccggctcagcagacgttggctgtctgagagctcggatcttgggtgctgtgctcagactcccccaatctcttccacagaaatctccaacctgctggtggctactaagaaagcccaggagtggcagcccgtctaccccatgagccagctgagtttcgatcggatcctcaagaaggatctggtgcaggtgagtcacggctgcagggtgtgggccagctgtggtcctgcctccccacgatggagcagcttggggatctgggggaaggaaggctgtgtttggggaaatcttagtagaaaaagaacagggagactttcctttgatggcaaaagccgtacaaccattgcctccatcctcttcacccttgctgatgctcctcagagacatgttttgaggtaagtggtttggtcaggctttgtggggttacctagaacagcagggaccttctgtggtgagctgaaggggtggcagggcaggaggtggctctccacaggggagcatggccatcacmcctcgctgcctgcagcaggctgtgtgatggagcacctccagagttcagtcctgcactttctgatgatgcttccagaaggagcagagctcaggaggagagaacacagggagggaacaagaggacatgcacactctgggcctgaaggagaactatcttgagaaacagatcccagtctttggaggcctttttgcccagaatctacaggctgagcggggagcccaggatctccccaggggctgccctggagctgttgctggtggtgtgaggcccagggaaagcccactttctgttctgccrccgctccccagccctgttgcatagggccacgcgttggggtatcagggagatggtgcggcagccttggagagaagcaagcacggggccactcaccacctcgggagatggcagcgccttggaggtgttggagggtgaggcggaagctgcctgctgtgaaggagcctggggagagtggcactcgggggtttgttactttacctttttcagtgagtccccgagattgttggatggggcttgagggagtggaaatccacagctaaactgcctcacttccctcgtggtacatttcttcaccaaaggcccatcattgttctctattcctctcgtggtgtgagagctgtgtcctgagattacagtcaccagagccacagtttcatagcctcttttctgtgtagaacttgacatagtctgtggggcctgcctcttttcccttgcctcgagcctccaagcaggtaaccaccatcctccatgccttccacatccacttagccaacagagatcaagcattacacgtgcgaggcacgattgctgcttcagcaggctcctgtctattttgagggggtaatcacnttagcaagagtcaagttccaaagtagggaagtacagcaggatgtggacctaatcttgagaggacggagatagcttcctgggggaagcggtatcaaagcagagtcccagaccaggcacagcggctcacacagtggctcacacctgtcgtcccagcgctttgagaggccaaggcgggaggatcgcttgagcctaggagttcaagaccagcctgggcaacacaatgagatcccatctctactaaaaatacaaatgaaaaaatgagctgcgtgtagtggtaagcagctgtagtcccagctactcaggaggctgagttggaaggattgcataaggccaggagtttgaggttgcagtgagctatgattgtgctgctgcactcccgccaggtgttagagcgagaccctgtctggggaaaaaaaaaaatcagggtctcctcctggaggatgaactcaagtagctaggcaaggtggagggaacagcatcagaggaggatgaagtgggccatatgggcctttgtgggtccctgcagaatcctgacagcatggtgtcatgacttggccacgggaagagcaattattctgaaagcatatggcttttacgggatgttctgggaatacagcttcccataaccttgatggatcacttcatgacagatgcagctttaatgaatagccaaagaccttgccaggatacagcagacagggtggatgcatcgccattcggctctgacagatracaaatggtggcatttgtgcaaattaatatacctgattaacaatggtgtatgttcctatgggggataagactgattccctaggtatcagygacagtcccttttctgcatttccagggggtcctcaaataatagaataatggatcttcagtttacaagttttgtggtgctaatgtcaacaacttgacattgcctaagtttcgtgaatcccatttcgatttccaaatattaagaattttaaaagcagaattattgcaacttgaactggaagggtcctcagaaatagatcatggtatggctagggctttgcacggatcatctcattcagtcctcctgccactcatctgggggtattgttccctttcacatgtcaggaaatccaggacacatcaccccaggctccaccttcatcttcacattgccatctcctctgtgaggttgccagggcaaatgcaggtgtactttgcaccactaattttaaatcctarcrtgcatgcacacacatgagcacacacactggataaatggatgggaaacagatggttccagtgtgagaaactgtgcctacctgtgccagagggcttcagataacacatggatccaccagatgggtttctacgcayccccccgtgtgcctgagtctgtaccaggagcctccatccctgtttcctggtttgattcttaccacagccctatgaggtcagtaccattattacctccatttgcagaaagtgggcagagattgcccccatgtcacatggccagcgggtagtagagctgggatttgcaagcctcttcacagggtagcacagcctgtgagtagaggagctgcctgggggctcctctcttgagtcttctctggaggcctggggtgggacccatgtgkctggctgttgatggccctgtttgcagtgtcctgacatgttaggactgtgttttggccaaaggctgttcctaggggtagaaagcaaggagccgtttagggagtaggaggactgtctcctggggcccagcaaatgtcaccactgtgtttggccaaatagcttgttgttttctctggaggcctggggaccacgagctggggcagggagccctcttgcctttgccccatcccattgatagtccatgttcccattgaggacccattcccagayggtccatcacttcagggcacagagaggtcacccagccttctgcttcttccctcagggcgagcaccttgggagaggcacgagaacacacatctattctgggaccctgatggattacaaggatgacgaaggaacttctgaagagaagaagataaaagtgatcctcaaagtcttagaccccagccacagggatatttccctggcaagtgtcttcctctgaactcctcccctcccctctcccgtttctggagccagtggaacacaatgggttgagaagaacccttgcccttcttgtggcccagtggttttcaaacttgccttttactcagaatttttttctccacatatgatcttagtggaccctgcatgtagagtaagtgaggtgggttgaacagctcctcacactcagcctgtgccctcccytccacccccaacccccacctttcctaaggacaggtccaggtggcygtgctgtggagccctaggactctggccaaatggttcaaagttcctgatacagtccatggctctcaccacacagtctggaaaacgaaagcccagaggagtaaaaggactcacccaggattctacagactattagagygacacagtcaaatcttgagcagagatcggctgccttcatttcccctttgttccagcatagtgctaaatatgggtatttcccagagctgaaaggaagagagagaggtgggcatgagtatccagtgggaaaattcttagccagcttctcccaccagccctgctctgcatcctgttaggttttctaaataaacctcacatccctgccaggttggcccagagaacaaggcttgrcagtgcctctggacagccaaggccagaggattgatgttcagggcctggggtggcgacagtggtgagctttcctgggtccactggctttcccctcaacagagcccctggggagcagccccctggaggctggcctgagacattcctatgtcctgctcgcccacaggccttcttcgaggcagccagcatgatgagacaggtctcccacaaacacatcgtgtacctctatggcgtctgtgtccgygacgtggagagtaagtgtgttctctttcaaaggggtgggtggcctggctggggagcttgggtgctgtggagatggtggaggctcttcccaccctcacgttgcccaggcttcttgcctttctttttgcagttgaggagattgagggactgagcaggtcatttgcttaagttaatagtggaggtggaactaaaaccaattgcttttcattcatttgtgtaatgttttcttgtcaacgctggccaagaaccctacactgtgctagacctgggaggctgaggtgagtgaaatgaggtcaaggccacaagagtcaggcccaaggagctctgggcaggtgagcgaggtgagcgcaccccacaagcagcaagacgctggctcctcgaatggactggcttccattttaaccacaggcaggcttggccctttcttggttgtcaagccactgagccggtgggcccttgggctgctgctgcacactgagatggaggggtggccttggcctctgagttcctgacatgtaagtttggaagaagagcgattttttttttaaccccaagtgacttcttccctgtggaatccaacaatgtgagctgttccgtgtactcacacaggagtcctgttgagagggaagttttgccgtgtgagcggcctgacctctgcrtcacagtgtgttgtagaacagcagcagtggtggcggttgttcccagagcccttgttctctgtgtcaggccctccgccaaggctttccaggccttgtgacatttagccgccatctgttattacagatgagggaattgaggctcagagaagtgtcacttgctcagtgccaccgtttagaagaagagcttggggttgaacttggcctttccagctctgaagcccctgcaccattgcaccccccaaggatatctgtgtactctgaggccgagtagtgtccactgaagtggactgtcgtaaggggatgaaggagaggaccgtgccacagaccaggttccagacatggctatttttatgcctacagatatcatggtggaagagtttgtggaagggggtcctctggatctcttcatgcaccggaaaagygatgtccttaccacaccatggaaattcaaagttgccaaacagctggcsagtgccctgagctacttggtgagaatgtcctgatgtccataatggtcccaccagaaaccagagtgtcctgggaggggtggcaggaaggaggtgctarscaagcagctagaggggcctgtccttgggttccatggggccagggctctgtggttgaacaaaggtgtgcctggtgcttactgaagatggtcgtttggggccgttccctgtgctcacatgagttctgtttagtgggaaatgttagcacgtcagagggccgacttgcatactgcagcatatggatggcaaggctgaaagcagtgcagtacgtgttgagtgaatgagtgaactgccagcatctagtagctgacgtgtggagtgctcaccatgggtcagctgttcaggcgtttcacagattctaatcagtatcatgctcacgaagcccaatgagatacgtgccactatttagccacattcagtgatgagggagctggagccaaggggcacctgtgatgtgcctaagtcacacagatgattggcagcagggccaggctgtccagatctggctgtagctgggggtaggaagagatgacctgagggaccagggttggaaatagaatgcgggaaggagcagcttggctaaacttgacctttttactctgcaggaggataaagacctggtccatggaaatgtgtgtactaaaaacctcctcctggcccgtgagggcatcgacagtgagtgtggcccrttcatcaagctcagtgaccccggcatccccattacggtgctgtctaggcaaggtgtgtctcccctctcttccctctggycccaccccgagtcaggggcaagtcagcagagagaagggctgggctggggttggtctccttttagagagtcattttttttttgtattttagtagagacggggtttcaccatgttggccaggatggtcttgatctcctgccttctcttaagtccttgaacgagcccccgttcgtcctcctgccctgggtgatggcccccaccctgggatgttttgctgatcctaaggccagggcttcagaagcctggcttcacacgaccctcctggggagcttggaggcagggacccatctgctggctgtgacccagactgatgtatcagaagtgctggtggtggcttggagggctgcacgcctgcaggccccccgcacagggcctatgtggccatgggccatgtttgggcacactgcttgaagtagttccttcattggctcactgttctggctgcagtgacagtaattgaatccctaggagatcccagaaactgctccatcagtgtgtctgttgtcttccagaatgcattgaacgaatcccatggattgctcctgagtgtgttgaggactccaagaacctgagtgtggctgctgacaagtggagctttggaaccacgctctgggaaatctgctacaatggcgagatccccttgaaagacaagacgctgattgaggtgagcaggtgtttcccggggcgtgaggcaagtgagggctttcaggtgctcgtgggcttcccaggagttgtcggaagcctggcactgtgggaagagatgggcatgggtttgaatctcttcaygggcctactgggtgtgtgacctcacaaatgtaactgaacttccgtgagcctcagtttcatcatctataaaatggggataatcagtaactacttgtagggttgttgtgaagattaaataatgcatatagagtgacaggcatgcagtacaagctcgatagatgttatagtattatttatctgagattttaagtgcctgttattcagcaaaattaccacacaaatacrtatggagttcctrttgtgtatcargcatcaagcttgggaaaagctggaggttcactataaaataagatacaggccttgccttcccttgagggccttagggtatggtagggagttaggctaaaataacaacggtaagaattccagaaagaatacctgaaagtgtcaccctaagagccctgcaaattaggtaggatggtgtcattaccctcatttgacagatcaggtaactgagactcaggtagccccacttacctgggttcctcagctagaatgcaaaacaggcgaggtgtggacctcctccaaatctacctgtggaaaaagtggagactctaactccaaaggggtaaagtagtaaaaatcacaatgaaagaccattgtcccttcatctcagtgactgyaattggaatgtgctcctgttgtttagagggggcaggcatcagtttcggctgtgagagcctggtttcagtgctgtgtcgggagcctgggtagtttggtgtgcctggccttgagtgtctggagtggggaarggaataacagtgatcaggtgggaaaggccatttgggttcagatttttaaagtccctgattccaggctgcagaacctacattttactgggggtggcatgggacaaggaaggatttgggtggaggagggaggggcttggaggtcggccttgggatgttcttctggatgcagtagctgggatggacagaggagagacctggagggagacaggggccccgagtctctcagcaatgggagccccatgtccggaaatggcagcggaagtccagagtgcagggtgggagatattgaagaggtagaacctttatgacttgccagttaatgatggtgcaggacttgggaaaggatcttaaacccgcagggaaaccatcagatctacagatctgctatttggaattttcagcctaggcttttgggaaattcatatttatttttaacttccttggatccttggaaatgaaacaacataccctttgtcatcagtcagtatttattgagcacgtgctgcgtaccctgggctgaacagcatacagggtggtgtaaggaaggacccgtgtctttaataaaataggggtctctctccacctaagtccccttgggttagatggcttttctgcaggctgcactgacgcagggatgtgtgagtgacactcaaggacaagagcaattctcagctccttaattccagtcctccctcctccctgtcctctggggcctgcccaccccaccccaccccagggcccacggggaccagagaggaacttagtacccttggagtccagctatgaagtagaaactggaatgcagtggtttcacttcatcttccaaaagtagcataagttcttgtttctaaaatttaaagtaataaacagttgaagaamatttttaaaatgaaactattaaaaaaagaaaayagcaatcactgcattcttgtcatccctgaccactgttaacactttggcattttgtcttccagcctgtttgtatctctcttttttaaacaaaattggggccatgctagatagagttatataaaattctgagttttttcatttaatactgagaatgctttcctgtgagattaaatcataatttttacaaatttaatgtaagagttaattgttttgtttaatttacttgactaattttatatttggcatttaagttttcaaatttccagtgttctgtctaattctgcaggaaacatccttgtacataaatatttgttcatatctgatttatttctgagtcattcagtcattgaagttaatgcatcagagggtttgaagaatctgaagatttttgtacatgttgcccaattgtattccagaaaggctgcatgcctttacttgaatgaagctttttgggactgggctatagtgcccagtctccttgaatttggactattcagtattaggactgtgatttccccttgcaagaataaggcagcagtaacaaacacttaygaaatctacctgtaagtggagatgttgagaatcgaatgaggaattggcaattccacctgacctggggctgagaagtttgtaggtggttcctttggtttcttccatgtgcccctcttgtttacagaaagagagattctatgaaagccggtgcaggccagtgacaccatcatgtaaggagctggctgacctcatgacccgctgcatgaactatgaccccaatcagaggcctttcttccgagccatcatgagagacattaataagcttgaagagcagagtaagacctgccatgtgctgctttaacccagcttggggagaaacaggagcctgggtggcaatccctggcaatcgactgcctttcactctgttttcttttctcttctgttagatccagatattgtttcagaaaaaaaaccagcaactgaagtggaccccacacattttgaaaagcgcttcctaaagaggatccgtgacttgggagaggtaagttacacccgtgctgcttgctgctgatggcagagccctccgccatccacagcgccactctctgcacgtacngctgctctccattctttttcattctggggccaggtccatgagcgaaagcaccttactgcatttgggggccactttcatcacaagggattgtgtctttctccatgtgacacacggcacggacggaatgcacgtccctgcctgcatgcacgactgtgtatgcacacgggactctgggcagctcccttgagagacttgagttttctctacaggacagaagagaatggaaagagggagagatgggggagtaggtatagatatggtggaataggaaaatccttgcctctgactttcccgggcatatatatcctgtaagcttctctctttttcttttgcccccgagagacagggtctcgctctgtgtcccaggctggagtgagtggtgtgatcatagctcactgcagcctcaacttcccaggctcaagcaatcttcctgcctcagcctcctgagtagctggaactacaggcacacgcccccatgctggctaatattttttattttttattgtagaaatggggtcttgctatgttgactaggctgctctcagactcctggcctcaagcaaggaggcctcccaaagtgctgggattataggcataagccaccatacccagccctgtaaggctctttagagcagggataggtttattgcayagaatcccaaaatagagtrtcagcgtttctttggaccttaaatgggagtttccaaacagttaattgtgactagagaagctactgagatttgtgtctttatacagattttctgtagtctggttaatgaaacagacttgatacatctccaggatctgctgtgtgccagccactgtgccaggcattgtcagaagcatggcatccttagttccccccaccgtccccgaggccagtttctgtatgcagcgagtgcatcaggagccagctccgatttggggacttggccaccactgtcgctgtcaggtggcttggctggaacctgatctyacgtcttctaaagactcctcatgcatttgctcttttcagccatgctgtggggcctgtcctgtaacgtgagcccagggcttttagagaacggcagttgtcctgcaggcccagaaataaccttcatttcctgtggtcatagaaattgggattgatgagttggttcatcgtcacctgctactttgtcttggctcagtaactgaggggacagtttgtgaggccaagagagcgagggggctgtagtgagcaagtacagtccaggtgagaggcttctgcctgcaaggccagacagcgagaacccctggccctcaggggaacggctgtgaggagcaagacttctgtgtgttccgtggcctaygatggggcttccctgataacagcacatgcatctttccctccagggccactttgggaaggttgagctctgcaggtatgaccccgaaggggacaatacaggggagcaggtggctgttaaatctctgaagcctgagagtggaggtaaccacatagctgatctgaaaaaggaaatcgagatcttaaggaacctctatcatgagaacattgtgaagtacaaaggaatctgcacagaagacggtatgttatgcaaggctggggtccggtttaaagatttggtgactgtctagggtcataaaggccagtgcaaaacaggcactccgtggccttayctgggcrtctgacatgctagctggtggttcccacacactctcaaggcttccaagtcatatgtcaaatccctcagcagctgcagggctcctgaggaggccacccaggcccctccatccaggggctggttccagcactgtctctccacgtcacttgcacttatgccttatgaaactgattcctactctacctccacccacttcctgttctgatccaatactagccagggtatttcattttctrgttgtctaaatcaaagtggcaagtaatatttactaataattgtatcttatttgcaagccagcatctactcatggtagtgaaattgacagctgatgataatttttttttttttttttttttttttgagacggagtctcgctctgtggcccaggcgggagtgcagtggcgcaatctcggctcactgcaarctccgcctccygggttcacgccattctcctgcctcagcctcccgagtagctgggactacaggcgcccgccatcacgcccggctaatttttttgtatttttagtagagacggggtttcaccgtgttagccaggatggtctcgatctcctgacctcgtgatccgcccgcctcggcctcccaaagtgctgggattacaagcgtgagccaccgcgcccrgcccgataatttttgaaaacagtcatttgcctgtggtttacagagcactctgactgttatctcagtgagtgcttatgcckgtgaggtaggtacaccattgttaccatctccattcactgctsaggatcttgaggcataagaggtcaagtaacatgcctgtaatgaaggggcgaagctggcgtcacctcagggcctctgtctcatatcctgtgcccttgcctctcccatggttccctcatttggcagcctcagactgatggatgttttttctaaacaggaggaaatggtattaagctcatcatggaatttctgccttcgggaagccttaaggaatatcttccaaagaataagaacaaaataaacctcaaacagcagctaaaatatgccgttcagatttgtaaggtaaaaaataaagacatcatgttacagattaagacatcaggcactctgtcctgggtaattggtttgtaatttgactctaagtgggtaagtttatgataattatactgtttgtttttctctgcattatttagatgaaaagttagcttctactaagaaagtaaacggatttaaatatggttattttaatgtgtatttatttgaatcagtttgttcttaatattcttgcataaaagtcagarccaaaaaaattgtcagtgatrtgtgaatgaaatgacatttctattttttctgatgaagtgatagataatacaatctaaagtgactttagcaatgtgcttgacttttacttctctctctcaggggatggactatttgggttctcggcaatacgttcaccgggacttggcagcaagaaatgtccttgttgagagtgaacaccaagtgaaaattggagacttcggtttaaccaaagcaattgaaaccgataargagtattacacygtcaaggatgaccgggacagccctgtgttttggtaactgaatcaaaccactaggttttatcaatgcttcatagagtttacactgttttaataggccctttctggctatattaatgtgtctcattcctctggcctgaytcaaggttagagaaggtttagaacatttggaattgattgatatttatcttcaagaaacacacctttcagcctgtttcattgaaagcagcctatataaatgactgagcttcatatgacacygtcttccaaggaatgaaagaaatctaaccaccagctcaacattcctagcttyccaggagagggcattcatctgatgcagttcttaaaactgtgagcaggtggagagaatctagttcctttcttaaacacattcctgcagagggaggctgtaggacagagtgggcattgcagattcagggaactcctggacagagcagagcaaaacctacgggagacctggctgtctcatgaatcaccagaggttcccaggttagaaggccacacactggctrcaaccatgtctcagccrggaacactgtccaggggagaggctgcttacatctctaccgcaccctgccacgtaaccacataacgacataaccaatcagcactcccctaggtgcatcctacatggacacaaacatagacctctcccacttatggagcctaaacttactcattcattcatttaagaaaatgcatcaaggtcctgctttgtgccagtactggagatatggtgaacaagtaggccgagtttagagtttaacaggctaggcagccaacggcatggagcaggaaacatacagaagggttcgggcttggttttctggaagtcgtgagtrttcagaagaaacctgaaagattcatgcgggtttagacagacggttgctagacagcatgcgtgactaggaagaatgagacaagagcagtcgatttcccaggaactgaacctcagtgaggtcagatcatggaataggaggtttgcaggaggaagcttgagtcatggagctgggacttcatctcaagaacaatgggatgctgctggagagtttaaggagggagactttgttttaaaaagaccaccactgaatgaagggaacaagattggagccagggagtctggagccagggagtctggagccagggagtctgatttggctgcttcaacagctcaggccagagctagtgacagcatgaattaggacagggactgggakagtgacagtagggtttgagagaagtgagtaggttcaaggagtatataaggagattgggtgcggtggaatgccttcatttttggcttgggcaagtgggtgtcattcagcaaagtaggcaatgctggaagaggattggacagcgatgccacattgtgcagtgaggccactgctgtctcatttagagcctgcaggcaaatcagacctggggctcatcattacacggccacctcctcccataccctgagagcatgttctcagtgaaatgaagagcacagacttggcgtgttattttagggcagatacgtgctaccgagagcctgtaaaggataccgtactataggtcagatgtgcaccatagcagcgtatacatggtatgtgtaaaatatataatacacagtcagatgctgtattaaattataagaaaaaccraagaggtgatttttcagttatcctgtaatgtcggatggagtgtgcctcccaggaaatgaagttttgtgttctgcttcctttcaaggtatgctccagaatgtttaatgcaatctaaattttatattgcctctgacgtctggtcttttggagtcactctgcatgagctgctgacttactgtgattcagattctagtcccatggctgtaagtcctacttttmtcttcatttgaatccagtacccatttaaaatgtgtccatccctctgcttggttaacttttgtttttaaatggaatccaatgaatgtattataatgkaaaatgtcactttcccattaacttggtttgctacttgacagttatttgtgaatctctmaagtcttgctttcacaacgagcccggagttctataggatgaccttgactctcaaggatcttatctgtgtagagatgaagggcagttttatgggaaaatgagcaagttaagtggggtagcaytgggtagggaccagccttgtctgtgcctccttcattcctaaatcagatcattttcttgggaacagactccttgaccagcacaagcacaaggagtggttggtagagtctaagacactggttagagacagatcattgaaagctaataaggattttggatttttatttaaagttactaaggagaaaagcctttttattgctacttaaatttccagttgattgtagaaatttcaccttaatctgtttggcatttaygtaaatacttgcaaagttaaacgttttgtttgattttattttatatagttgttcctgaaaatgataggcccaacccatggccagatgacagtcacaagacttgtgaatacgttaaaagaaggaaaacgcctgccgtgcccacctaactgtccagatgaggtatctatgggccacgtcacagtaataacactccatttctattatgttttcgcagcttgagttgtccagcaatgggtagaggggagagcgaggaaatgatgcagtgaagtccttgtaaaatagttttctgaagctgaatttcacataagataactgagaaatcgcctttggggctagatgatagccaccagttaggttcagagcaaggattccctccaaaagccagcccctctttatccacttgcttgccccagagggacaggttttggtgtagccttagtgtgacaaatacatataattgcattttttgtgtgtaagtttatcccacttattagcatttataattcagttttctaagtgaattgagcctttaatactaaactcttgagactgtgtaagacacactgaacagtatgagtcagagagtgaggcagccagtctggaaagttcaagtctkaactgagattctgcttcaccctctaactggtttacaggaatgacctggattttattgcagccagtcaacccttgagcttctcaaatgttaaaatattatttatgaactagagttgtatcccattttctgtgttttaaactattcaaatactcttgtttttctagtctttaaggaaaagtcattgcatttccaaaattattttcttactcttgatatttctgttattttttaaagttcccagatctaacatttttactgttgttacttctttctttttacaggtttatcarcttatgaggaaatgctgggaattccaaccatccaatcggacaagctttcagaaccttattgaaggatttgaagcacttttaaaataagaagcatgaataacatttaaattccacagattatcaagtccttctcctgcaacaaatgcccaagtcattttttaaaaatttctaatgaaagaagtttgtgttctgtccaaaaagtcactgaactcatacttcagtacatatacatgtataaggcacactgtagtgcttaatatgtgtaaggacttcctctttaaatttggtaccagtaacttagtgacacataatgacaaccaaaatatttgaaascacttaagcactcctccttgtggaaagaatataccaccatttcatctggctagttcaccatcacaactgcattaccaaaaggggatttttgaaaacgaggagttgaccaaaataatatctgaagatgattgcttttccctgctgccagctgatctgaaatgttttgctggcacattaatcatagataaagaaagattgatggacttagccctcaaatttcagtatctatacagtactagaccatgcattcttaaaatattagataccaggtagtatatattgtttctgtacaaaaatgactgtattctctcaccagtaggacttaaactttgtttctccagtggcttagctcctgttcctttgggtgatcactagcacccatttttgagaaagctggttctacatggggggatagctgtggaatagataatttgctgcatgttaattctcaagaactaagcctgtgccagtgctttcctaagcagtatacctttaatcagaactcattcccagaacctggatgctattacacatgcttttaagaaacgtcaatgtatatccttttataactctaccactttggggcaagctattccagcactggttttgaatgctgtatgcaaccagtctgaataccacatacgctgcactgttcttagagggtttccatacttaccaccgatctacaagggttgatccctgtttttaccatcaatcatcaccctgtggtgcaacacttgaaagacccggctagaggcactatggacttcaggatccactagacagttttcagtttgcttggaggtagctgggtaatcaaaaatgtttagtcattgattcaatgtgaacgattacggtctttatgaccaagagtctgaaaatctttttgttatgctgtttagtattcgttkgatattgttacttttcacctgttgagcccaaattcaggattggttcagtggcagcaatgaagttgccatttaaatttgttcatagccyacatcaccaaggtctctgtgtcaaacctrtggccactctatatgcactttgtttactctttatacaaataaatatactaaagactttacatgcatatgccttttaatattaagatttcattttcaaagcatttcaaacaatttgcttacatagaaaaataacagtatagttttggggggaggaaggggtgggttacggtccttactacwaacaaacaaacaaacaccacttgatttgcacttcttcactgttgtgcccagtgattgataacggggcacaggccagtatggatggcatgtccactgtgctgtagtccagacacctttgtttgtttgttttagttccttcaacctcttcctgctttgactgactgactttttgcagctctgttgcaaaattcaccatctttcctttcttctgtttgtttgtttgtttgtactatagtggaggtgtgactaagcattgaagaggctgaatgcaacaggaaaatgggaaagagaagtgcagggcctgaaaaacccattagtcatctgctatatcactgaatgatgcctaattcttatcagttacttataggtagtatacttagaaattaccttaaactttctagctgtcagtcattttccaacagaagctagtatatgcaataaattagaccaagtgaaattctttacaaagcatacaacatatgtaccaattctagacttcataattaaaacaggatatccacatcatagttaaaaataacaagtccccaaagtgacgagatatttaatgatctgatttcaaaaagccccggattgagatcccaaattccctatcaattaattacagtcttataacataaacaaacttagaaatttctagatggcaaaaggtttctcatgcatttaataccaaggtcttcaagaaatggtgatgtcaaaagtcatcatagtccataaagataaaacttctttcacaagtaaattgggttaaataactgatttttcaccctaacacactatcaaaaagagtgagagagaaagcagagagtgaggtatagcttattagctcaaaatggttataaatactgtgactccttaagactccatcagaaagtgcagtattgactgctttactatactatattgtggaaatagggcatttagtgatcaaaataggccccattctagtcattagatcattactagtctacgctatgaaatgagcacagaaacccatgttcctttccacttacaagtctgtctaaaggctaaaggtctgtctttaggtgaattgaaaggaatagttgctattagaattagtgctattagatcagggatcagcaaactatatataaatggccagatacttgaaattttaggccatatggtctttgtaggccatacagtctctgttgaagctaatcagttctgcccttgtagcgtaagagtgccacagacaacacgtaaatgaatgagcatggcaacgtcccaataaaagtttatttatggacactgaaatctgaatttcatataaatttcatgtcataagttttcttttttcctccaaccatttaaaaatgtaaacattagtcttagcttgcaggcagcacaaaagcgggtggtagaccaaatgtggacccagggtgtagtttgccaaacccttttattagatcaccaaagttacttttcttaaaataccttctatttttcacagaaggtataaatggtaaacaacatcttaaagcatcggtagtagtggataccttggatatcactgtcactctcttaccgggtttaattttgcatggctggtgtgggcgtaattgagtgtgcatgtagagcatctttataatattaccatcagcacatttggtacttgcacccttgtagttctaggaaaagtcctaaaaatctataaatgcaattacttctagggaaagtaaattgaaatgcacattggcttataagaaactcattcttctaaggctcaggaaacaacactgtttcccatttattgcttcaaacttcttttatatatggtgtcagaattattcccagtcctaaatcaaggaatattggaacattgttagtttctccaatggattgtaagttagcacactgattaagatgcatctgactctagtggaaaatgtcctcaattgatgtctcttcttattgctattttttatttggcatttctgcctgctgcacaacacagttccttctgggaaactataaacccgtatttaaaggatatggctagtttgaatgaagttaaggcagcgatgaacagcagagatactgcagagaaccttagggggttattaggagagagcttaactcagtatactcgcttcttttttaagtaagtttccatgtaatatgctcctgtgccctgagaatgctggtcaacacattccactgaaccaccttctggggcagagatgagatatgatgagcctcgcttttcatttcttaaagatgacacctatgagaaaataaaattgcagctagttttaaaatctaaagttggcttattcattaaagatatttataagaaaagcattccactttgacttggtgaatatagaataacaggataaatacccaaactatcaaaaaatacacaaacccctttgttaaataagacttttaaatttctgtatcaacatcgcctttggaatttctgcaagacacaaaccagtctcagcaccttcactcccaaccccaactttttgggaaaagaaaaaattagagcactgcatgcagctgcttctgctgatcacagctagttaaacccacggactcagaatatcaacaccgaatgtcagtattcctctgaaggaggagtggctaagacatcaagctgcatattgaattagatgttaagtgtgcctggtgacaagaggagtggtgagagaataaatcaataggtgtagaaactgacaaatgacatcaaagaaaacaacatgaaacattctagagagcaatgggaaactcagagctttggtctccacaataatcgcctggcgagcatattaaaatgcaggttttcaggcaccatcccagagattctgacctgaaagtgggccacatgtcctcacaagtggtcacagtgatcagcacagtaaatcagatggtgtagcactgctcagcttaatgcctcttagtttcagcttttacaaaaataagtgcagcaagcttttatcaatgcagaattatgtgacttaatatgcaagaacttagaaatgactgatgagtaaagcttccagtaacacacaggagccttctcacgttgcaattaaaactgcaattgtttttgaaccaacaacggtcacaatttttaaaagtgcagccagcctcagagggaacagatgataggtctctctcaactccttgctaaagtagttctcagtggtccatgttagagggatgacaagactgaaagaacgctgcgtcctctggtatctcatttcaaagtggcttactgtggggacagaccaatacaaagcgtcttcacacaagcccagtgtaaaggaatgtttcacagagtgaagctgatgggcaaagaatctggcttgaatttctgcctcgacatttttttcctggtagtaaagtatgtctggggtttgtgctagaatgttagaagggaagcaggtgagagggtagatgaaaggagacctgccgtaagttgatagttgtcaaagctgagttgatggtgacgaggggttcagccctagagaagggctgctgcaccaaacagcttgctcacctcttaggtggagcctctgccccaaaaacccttcctcccagtctccagcctcttggttattctctccagctgccttcttcattagggccccttcgctggtaggtgatctttctgaatgttggaccccagccactaacaccatcagaccttacttcaggtataaagaactctttttagcagctttcctcctcttagaagtcatcagtccattctacaagtgagattttccaaagactgggggagggaagcagactgctcactctgggatctgggatgctcctgctcttctcacccaccttccccaattcttcttgccatgtagttatctattctttcatgtcttggcatgcagcaaagcaacagcctgggtttctgtctttctataccatcttcactgtcagaagccagataggaaatttattacattcttttattcaaagggcttcccaatggtgctaacaccattcacagtgagaaccaactgagacctatgaaatcagcaaaaaacttcactgagcagcacaggaaaatattagaacaggaaatgaaagtgggtgtcactcatcttacaataaagacaaagcctgcaaacattacgttgagtaaaataagacattcaaaaagagacagacatggtatgattacaccaatgtgagatataaaagttagtcccagttataaaaacagaaagtcaaatgatgttctcttcaggagctgaggagaagagggggaaaagtgcagtttattaattatcagattttacttttgtaaaatgaaaatctagagatctgttgcaaaataatgtaaatatactgaacattactaaactatacacttaaatatttaatagtaattttatgtttttatcacaattaaaaatttaaaccttaaaaaaaaaaaagaaaacgggtttcactgtagcccatgtgatactgggagaaaggtaattcttctgatacgccctatcaaagatatctaacttctagtgtaaggactggtgaatggggaatgatgatttaaaattttgaaagaaagctcagtgctctgggagaaataaattcctacataagaaccacaaccacaaccacaacaaaacacaaaagagggaaagaatataaagttagcaaatatttttccttctattttgtatttgtaggatctagacatccattccttcataagtggtctattgcgggcactgggcttgtgtgctatgaggtttacctggatgaatgaaacttggactatgccctcccacagctcatatcctaggaggggaaggaagaggaatgcaaaacataattctaaaaggggactgtcactttgacaaaagagaaatagaagtgaagtgctaaagctttttccagacaaggaaaatgggcggggggtggggggggtgggtttgaaaggtacaggcactggtttcatggataagatagcatctgagttaggatttggagatgaggtcagatatggacatgaggagataggtggtgacccttccaggagaaaggcagggcctgtgcaaaggcagatggcaaaaaagccaggcctgtgatggtagcagctggcaggcagaagagggcagtggcaaatgaggttgaaaaatgaagctggcctcagtcatggagggctggaacgccaggctaaggactgtaaacaggaccatacccttgatcttggaatatggcaagattaataagcagctctgtaaaaagtatggcaatgaaggagacaggcattattaagtctcaccaggaggctattgaacttgtccctattagatacatgcatgtgagcaaacacacagattatatgtgatttaagacttgatttaaaatgtagcatgaaacttacagatgagacagaacaaagtggtatatttagaaaatctgaaaacaattttgatgagcatttatgctttgaataccaaacaaaaggaagacctttagagaagctataatattctagttttacatgtctaatattcaggtggaaatcaaacacaatagtcattttagaggacttcatctttagcagggtcttttttagggttggctgaaaccactctatgaatagtttgcacccagtggttccattctgtactttggaactacaatccaagtctaatacttccttatcagaatgggcataacttcaacggaggcccctcaccctcatgcccctgggcaatcctactatatccccaccctaccctgcccactgatctccactcccctaagtgactattgcaagccttctcttttctcgaagctccaacagtacaccctcatcttcactctcagctgatgctttgctttctatttcaccaagaaaacaaaatcgaaagagaaatcttaagacgcacagtgactaacccctggtgtctttacttaccctcacttccttggtgatctcatccaatttcatgcaattcacaattatagcgatttacaggaatgcgatggttctcaaatatgtacctctagaggcccataactctcccctcacctccagacttgtataatgaacaccaataaaggaacatcttcacttagggatcttatgtctaaaacgtacccataaaacttgctccacccacacagtcttacccatctcaatcaataacaaattcatttttctaggccaaaactcttggggacttggctcctctcttaccctcgtataccccactgactccagcttccaaaaatgtctccagtccagccacatgtcactgcctctgttg

SEQ ID NO: 97702 - DNA, 12716 bp, Homo sapiens
aggatgactaaggaacattcccttttatctcataaattttatctagtgacatttaaaaactgtcttccggagcccagccctctgatccacagactctctttccttttgtggatggcaccgtgttctgctgtcctcacttctcctttatcgccttaatgctgagaatggcacatttttccaagttgctttgaagagcaaccatcacaagagcaaaagtaataaaaagcaatttaaaaacagatttctggatgttctaggaaataggcaattttgcatggcaagcacttgaacccaggggtgatttattattcatttgactgtagtgaatattcatggcttttgcatgttaaattagaattattgagatttttgtttaccctgaagaagtatgggaagtcgtgtctttaaaatttgaatgtactgaaattcacttttcaacgtatggagaacttcctttctagaaggaaccttaagactgatctggttaaatctgctagggaatgtgtataaaaacattcagtgttttgtaagacctgtactgatatattttatatgaggctcatacatatagagccatggtttccttccttccttccttctttccttccttccttcctttcttcttttaaagcagcattaccctttactcaaagaaaatcttgcttgaaagttaaatatgtaaaagagctagaattactttgtttgcatacagagtgggactgggctgcacactctccttatctccattcctccgtacaaagcccttggttttccataatcacagctttaaaaccattcatgtacagctgaatagtttgtcagacatgtatcagatactagtctaaacacctaacaaatattaactctttaattctcacaacaaccctcataatggttattattacttccattttgtaggtgagggaagtgaggtacaaagaagttaaatacgttgctcaagattacagcttgtcaatggcagagcctctacaatcttgtcccagcgtccctgttcttacccagaatgctttgcagcctctccctagcagcagcagcaattatgttgaactcttgttagggattaggcactctgctacaagctttacatgaattatcacagctgatcctcccaaagcagccagtgaggtaacagtattatcccccagtttacagatgtaggaaatgaagcataaataatttacataacatttctacaaggggaagaccagcatctgaaccctcacagtttgactttggagcccattctcttaatcactatttcataagttctcatacaaatgaaaacatttatatatttcttttttgttgttgtttctgagacagagtctcactctgtcgcccaggctggagtgcagtggcacaatctcggctcactgcaacctttgcctcctgggtttaagtgattctcctgcttcagcctcccaagtagctgagattacaggtacccgccaccacacctggctaaatttttgtatttttagtagagatgggcttttgccattttggccaggctggtctccaacgcctgaccttaggtgattcacctgtcttggcttcccatagtgctgggattacaagagtgagccacagcacccggcctacctttatatatttctaaagtgttttaatggttttcttttttttattattattatactttaagttctagggtacatgtgcacaacgtgcaggtttgttacatatgtatacatgtgccatgttggtgtgctgcacccattaacccgtcatttacattaggtatatctcctaatgctatccctcccacccccacaccccacaacaggccccggtgtgtgatgttccccttcttgtgtccaagtgttttcattgttcagttcccatctgtgagtgagaacatgtggtgtttggttttttgtccttgccatagtttgctgagaatgatggtttccagcttcatccatgtccctacaaaggacatgaagtcatccttttttatggctgcatagtattccattgtgtatatgtgccatattttcttaatccagtctatcattgatggacatttgggttggttccaggtctttgctattgtgaatagtgccgcaataaacatatgtgtgcatgtgtctttatagcagcaatatttataatcctttgggtatatacccagtaatgggatggctgggttaaatggtatttctagttctagatccttgaggaatcgccacactgacttccacaatggttgaagtagtttacagtcccaccaacaatgtaaaagtgttcctatttctccacatcctctccagcacctattgtttcctgactttttaatgatcgccattctaactggtgtgaggtgatatctcattgtggttttaatttgcatttctctgattgttttctttctttctttcctttctttttttttttatttaatgttgcttcacattggctagtaatgcaaagagagcatcgggttttctgaggagcctaaacatagctctgccaggcaggatcatgcccagagaaaacagtaaaggtcagcatcttactgttccttacccatgtttttatggtgttcatattgcctttctggtctttcccaaattagctggtttaatttcctcagtattctttgcagctttactaaccaatgtcatcaagtaattatacttatttgacaagggctaatgcttcttctcctaggtcaatctatgttttgacttaatcctgctgggaataaaaagtcttcatccagtttgatgtttgcaatggtggaaatgctgggttctgttgcagactaatagtagaggatgcctctttctattcagtgctggtgtagctaaagagctatgccaccagaacaattgtgtccaatgtgcaagcataaaattatttttatagtaggaccagtgagaagcctgatgttgtaatatctagtacttacagatgaatgagtttatgctattcactaaactatagtgtactttgggcctttatctgctgtacagaaagtttgcaggacgaggtcaagtgaagagtactggctgccatggggccttcagcactgacaaggcagaaggtgctgctgtgttaactctgtaattatgtgtttattttagaaaagtatagtctactccttagacttaatatgcctttgtcaattccctcttaatatttacccacgagtttagcctctttagttaaatcttgggtaaacacagggattttcagaggctggtgagtagagaaatatctacttggtcacatcagaacatatagaaatcttgcttctactagcatcctatctagatagagagaaactttaaaaaatattgtcttttactccttccccaagggaaattactgctatacgaaattaaaatagacaggccatagtcatgcctatttaaagaaaacatttttacagttagaaaaatatgcccattttatgaaggtataatttcttaagtttgcattcacttatgagggagtgacttaggtggatcagcaccttatccaagaagggattgaagaatgaatgaaattaaattcatattggagtagtagcctctattatacctggttcaactttctataaaaatactcaagaagatatatgccaaaaagaagtcgctgccactaaaaatttgtttttatagtcaagctagtcttgattcttgtagagaattctactaatgagatgtttggtggaactagaatgaacaatttcaacaggtgattcccttatgctgtggccaaacagagggaagacctttaatcatttggctgctatctttcccctgcttcagaaacatgcaaacgctaatcagaaaagtgaacaagaattactatgcatgtaagtacttttgtgaagcatcacttttaatgaagacatcttttgcatatgcatgtgaagaatgcaaatagtggttactcaaataaatggtcatatattagttttctgtggctgctgtaataaattaacacaaactttgaggttcaaaatgacatagatttattattttacagtttgggaggtcagaagtttgaaatagatggatattagtgggctaagatgttaggctgaattcctttctgaggtctctaagggaaaatgtgtttccttgtccttcctaccttccagaagctgcctgcattccttagcttgtggccccctttcatcttcaatatcagcaatggccagtcaactctttttcctattgcattgctctgactattctacttctgtttttgagatttaatgacccttgtgattacattggtcccaccctggtactggaggataatctccctgttttaaggtcagacgattagcaaacttaattctatctgctaccttaattttcctttgccatgtaatctaacacattcacagattttagggactaggatgtagacacctttggaagrccattatcctgcttactaaatagggcagtaatatttttggaaatatgtttgtcaggatctgtcacagttaaagcactatatctatgctgaaactacgagggccttggggattgttgtttttcataatacagatgcaggtagtgatacaagatgagtctatgccaatcccaacaggtatgctaggtggaaaacctgctagaggatggaaattaggatataagttttgtaaaccaacatgtcatttagctgtaagagatttatgtttaagtgacacataaagacaatcttcatctttttcttggcaaacacggtctctttcatgataaactaaagtaaaaagaaatcattatggacaaggaaaagggaacagtatctcagagactcagagtaaatgttgacctcccaagatgatatgtcacagaaatctgaagggattttttgtcatcctcaacagcatcaggaaacagaaagtgaaatgagagaataagtttagattgtaaaaagtaggattatttggaaaaggagatggattagtcaagaaaatattgtaaagagaccagaatgtcataacacaattgaagtctgtgttggaagctgaaaagaaatcactatttaaaaaacactcatggccaggtgtggtacctcaagcctgtaatctcagcactttgggagacaatgcaggcagattgctcaagcccaggagtttgagaccagcctgggcaacatgtaaacctgtcacttcaaaaaaggcaaaaattagccaggtgtggtggcacacacctgcagtcccagctacttaggaggctgaggtgggtagatcacctgagcctggggaggtggaggctacagtgagctgtggctgtgccattgccctccagcctggatgacagagaccctgtctcaagaaaaaaaaaaagaagaaaaagaaaaaatcaagaggggaaaaaaattgataatttctgttgaaatgaacaggtgcaataaaaattaaaataacaaaagagatgattaaaaatatagaaaatagagatcatagatttgaacacccagaaccaaagtaagaatcacagatgttcttgaggcagaagcaattagaacacaaatagtagtgaaagattaataaaagctcttcggagcacaacgaacaaacaaaaacaaaacccgataccaaaaaacaaaaattgaagggactttccrtactccaggcaacattaatgaaaagggttttatatcatttcaacttggtaattttttaaagaataaagtaaaaaaaatccttcacacacacaggcaaacaaaacagttagccttataaaggagcaaaaaatcagatattttttttttggccacactatatggtacaaaatattgctataaaacctactgcttagaacagttaggactctggatgaactgtagcaatctgtgcattaacagtctctctaggagattcttaaacatactaacatttaggaagcactgcccaggtaactgagagagaaattgaagttaagaattcagtaacagagacttcacagatggtgctgccactgggagccccgtattaccagctatggtcaaccccactgttttcttcgacattgctgtcaatagcgagcccttgggctgcgtctccttcgagctgtttgcagacaagcttccaaagacagcagaaaattttcatgctctgagcactggagaaaaaggatttgattatgagggttactgctttcacagaattattccagggtttgtatgtcagggtggtgacttcacatgccataatggcactggtagcaagtccatctacagggagaaatttgatgacgagaacttcatcctgaagcatacaggtcctggcatcctgtccatggcaaatgctggacccaacgcaaatggttcccagtttttcatgtgccctgccaagaccaagtggttggatggcaagcaagtggtctttggcagggtgaaagaaggcatggatattgtggaggccatggagcgctttgtgttcaggaatggcaagactagcaagaaggtcactattgctgactgtggacagctctaataagtttgacttgtgttttatcttaaccaccagaccatttcttctgttgctcaggggagcacccctccaccccatttgctcgcagtatcctagaatctttgtgctttcactgcagttccctttgggttccatgttttccttgttcccttccatgcctagctggattgcagagttaagtttatgattatgaaataaaaactaaataacaaccacaacagcaacaaaagaattcagtaacagagaagtggctggttgttaataattaaaccaagttaacaaaaagtgagatttaagtgattgtaactttaattataatactgaatgcaaatgtaaaactatgcttttgaaagagaaaatatgtcacacaaaataatgctttaataagcattaaatatttaataccttaatatttaacactaagcaataagaaacccaggatcatatttacaaggtccagaaataaatttgtgacaaattctcatttttctaggggtagactcaaatattctaaatatttgaaagttttaaaatgtattcgttcaacaaatattaatattctttttgatataccaggtgccactattagaaacaaaagtaggatgcatgacttccaaaccaatggagagagaaaagaatgtgcagcctgatctaaatcaccaagtactgtcgtcccttggtatctgtgaaggattgcttccagataccaaaatttgtggatgctcaagtccctggaataaaatggcataatatttgcatgtaacctacagactactttaaattatctctagactacttataatacctaatgcagtgtaaatgctatataaatagttgtattgtttagggaataatgacaataaaatgtctgtacatattcagtatagatgccatttttttttcctgagtgtattagtcctttttactgctgctgataaagacatacctgagactgggcaattcacaaacaaagacgtttatttgacttgcagttccacgtggctggggaggcctcacaatcatggcagaaggtgaaaggcaaggaggagcaagtcacatcttatgtggatggcagcaggcaaaaagagagagcttgtgcagggaaactcctgtttttaaaaccatcagatcttgtgagacttattcactatcaggagaacagcatgagaaagacccaccccccatgattcaattgtcttccaccaagtccctcctacaacacaagggaattatgggagctacaagatgagatttgggtggggacacagagccacaccatatcactgagcattttcaatccatgattggttgaatccacagatgtggaacccacagacaaggagggccaatagtatataaaacaaagaaaaaagagtaaagcataaactacacaaagcatgaaataagattacagtgttacaaacatatcatttacggcaataaaaataaatagtataaagtcccccagtggaagaaaaattagataatttgaccatggccggacacaggggcttacacctgtaatcccagcactttgggaggctgaggtgggtggatcacctggggccaggagtttgagaccagcctggccaatatggagaaaccccaactctactaaaaatacaaaaattagcctggccttgtggtgagtgcctgtaatcccagctactcaagaggctgaggcgggagaatcacttgaacccaggaggtgaagggtgcagtgagctgagattgcaccattgcattccagccggggcagtaagagcgaaactctgtctaaaaaaaaaaacaaaaaaaaaaacacaaaacataatttgaccaaatagtctatctgaatattgatgttcagcaaggggatagtatatgtttgtaaaaagccattttcttagtattatcatcctttggttaagtcttgccactgccatatattacctgaatgaccttgggaaatgcatctaacctatctggctttgaatttccttatgcataacataggaatgacatttcccctgtacctgatatgttgaaaagaggaaatataaatgtgaaagcattgtgtaaagctgaatctcattgtgaaatgtttattaaactagtctattaaaatacaacaactgtatatttcagctaaaaagcaaaatctaactgtagggtactgagaagaaatatacctaaaacaaagtaactcattagattaaaaaagaaagaacaatagaatggacaagatttattaggcagaagcgaaattaaaaaaaaaagtaatcttggcaatatttagatgaaatagaatcaaaggctataaaaatattaaatgcaatcaagaaggttatattttctttaagatagacttcacaatgaagataaggcagttctgaatttttattgacttggtaacagcctcaaaatacatgaaacaaaggctgttagaaatataaggaaaaattgatggaagtagaattgttgtatgacactttaatacacttttattgatctttcatgggtcaaataaacacagaattgatagaatattttaataatctaacaaagatgatttaataaatatttattaaattttgttctctagaaataagcaatacacttttttaaggagccatgaagcatttagaaaaaaattgatcatatattatatctcaaagaaaccatattaaattatgaaatataaagtgttaacagcctccatgttctgcytacactgaaatagagctagacattaatagcaaaagtttaaatgcaaaaatcagtagcttggaaaagagaaataatgataacaaaaaccaaatttttttctaaaaactccagattcaaacaggaaaggaaactatataataaactgttaggagagtaagaactctatgtatcaatattttaaatggctaaagctgtatttagcagaaaattaatagccctgagaactttcattattaaaggagagtaacaaaatcaatctgtggaaaataaaactaatgaattaataaatagagactccttttttttctgttaaataagaccaacaagcaaataatatttatttaatgagctagaaataggaggagcttacgcagcataatacaagatatttactggaaacctgtagcaaggtatgttatttaacgttaacgttgtaaatattactttcactgccacaaatgagatgagtgcttgtgatttttgtaaaagttaaatcccaaagaacaatttctgcttcccatgtagtctgtaaaccctcacaaaacacaaacagtagcaacaacaaaactctctgagggatctgaagaatgaacaaaggcagcaagattctcgaagggggttgaagacacctggaagtagtataggttaaatttcttatgactattatcctgaggtcaagccacaggtagggccacacagagtggctgaaactcctgtaggaagctcagtctttctggccttatgaaccaggggacagagtttggagcaaccccagctactggaaagtaagggaggaatgtcattaaaaagagggccagaaaaggagcattacaaatttttggtgtaaattctgctcaaatctctggctgacctttggaatatacatacacaggcagaccaaagcagtcagtgaatttgataatatcaatatagattttctctatgaagaacagagattgtatttttaaaaaggattaaaaaaaaagcaaccagagcctcaggttcctatgggataattcttttaacatatgagtaattggttccccagaaggaaaggtgatagagaatgggtcataaaaatattaggttggtgcaaaagtaatcgtggttttgcaattacttttcattacaaaacccacaattacttttgtgccaacctaatatttgaagaaacagtggccccacacacttcccaaaattggtgagagataaatgtacacgttcaagatgctgaggcacattgtaatcaaactgctgaaaacccaagacactatcttgaaaatagccggagaaaaacaacacactatatacatgaaactgcactgctaaatactgccaacctaccttcaaaaactatgaaagcaagaagacaatgaaacaatatcttcaatgtgctgtaaggagatawgactatccaatcccgaagtccatatccaaagatactcatacttcaggaacggagtcaaaataaagttgcattcagaaaaacaaaaacagaatatttattgccagcagaccaacttacactgtaaaaaatgctttgttctttgggatgacaagaaaaaatagatgaaaactcagatccttatgtaaaaataaagaaatcataaatagtaagataaatataaaaatcaattttttcctcctaatgttttaagaatatgtatgtttgtttaagtaaaaactatagcatcatttttatgggatttataatacaggtagatgtaatttcaatgacaacttgaatttagagggagtttgtaaatagattcatacatgtgtgaggtttccatattgtatgtaaatagtataatagtaattctaggtagactgtaaaaagagaggttggattgaattcctggtaatatgtgtttaaatggaatgaatactcgttcttagaatgaagagaagtgtgcagaatggaactttgcaaacccttactggcccatatgtcacggggtggagatgtcaccattttctatatggctccagatcaagcaatctcttgacaaaaagcaagctggcttcgagtaaccttcaaacggagtgtaccaggccaatgcagaagacataacatggtttgctttctttctcccgtccattttagtatcttaagtaccagcagatagaaggtccagaaaaaagaaagaggatgatattgtaggggaggccaaattttctctcttagggttttttagctgggcctgaggattgaattgacataaggcagatcagcgggagaaaagcatacaaatttaattcattcaatttttatgtgagcacaagagccctcttaaggaaatgaaacccaaagacagagttgaaagttgaacacctatgtactgaattgggaaaggaatagaaaattgtgagtatgtgacaaagccaacgggcttgggctagggaggttaattgggtagagaagtaactaggaagataagggttactttaataaggtgtgtttgttcagatttctctcagcatcaacttctcgtctttgatgataagaacgctactttccctctggcgtagggaggacaagttatctcctgtttctaaggaaaagaagaaagctcagagtatattttttgtatctgctgtttttccaagtgtctttaagctcaaaatagtcaatatactagagcaacatattttggagtattgtgttctgaactccttcaatctttagcatttctcttctgtcattcttcaggctcttgagcacttttgagaaactaatatgaatgggaaagatgtaatatttactcccaggaaggttgctttggtgatctagtctgtgaactagactcaggaaactgtctgggtattggaaaggaagtcacggatgcgcaatggaatttgtaaaggggtggcacagctcttgaatactctccttggaagagaccctggcatggagagaacagagtattaacctcactctgaggttgggaagactaagggaatctgaggtgtgaggagggatggagacgacaggtcacacaatgtgatggaaaaccgcacatggagtggaaagaacatgaactctggagtctggaactcctatatctggacttgacaccgtattctgctatgtggccttcggtgagtgtgccaagtagaatattggctctgcaaacgtatccacatcaaatttctagagcttgtgaatgtgaccttgtttgcaaaaaaaatggtccttgcagatatgattaaattgaggatcttgagatgaggaaatcatcctggattattttgggagacctaaatgctattacaagagtcccaccaaccaccagaagctgaaagtggcaaggaatggaatccctcctagagcctctggagggatctttgctcttaaacatcttaattttgggcttctggcttccagagctgtgagagccacaaagtttgtggttattttttattgcagccacagtgaagaagataataaagccagctactgacctctctgaatctcagtgccctcatctgtaagatagaa

SEQ ID NO: 97703 - DNA, 13379 bp, Homo sapiens
tcaaaaatggaattacagctcaggaatgcaagagaagagaacctaaccagtaaaagtggccaagtttcaagaggccagaatagaataaaataaggatcccagagaatgattccataccaaattgaagctatagacaaaaagatggtccctttgattcattctggtggggatgccagcttaactatctgtagttagttactctaatatctgtgagaaatgacaaaatggccacaaattccctctatccctgttacatgtgcctttacaacttgactttgccctcctctatggaaagtgtacaccaattattccattctttgaaattgggcttgtccatatgtcttgctttagtgaatggagaattagtgaacatgatgcagacacaagctcataaaacactcagattctttggaatcctaagatcaaatgaagaattccaagttagcctattaaaggatgagcgactacaaggagtagacataggtagtcctagctaacgttcttctagactcactggcctgccatcaccagacaggtgagtgagtccatttgagaccatccagcctcagtggaaccatctgcagtccacagagatgggctgaactagccatacccacaactgaccagccaacctactgacccataaaacgatctgttttaactaactggaatcatttggtacacagcaaaatttagccattagtttccatgagttgtatgcaaaggtaaaaaatgagaaacaggctatgataccagtagttttttgaaacaatatatctggcttacggtttgtcttaaaagtttcccagtaatattccacatcacaagacacaacatttgctggccacctgatcaactcatgtgctcctccaaaaaggtgttatcccttctctaccatggcaatgtttctcagatactctgatcttggatcctgaatgagagggaatattttatagtcagggggaccactatggtttgaatgtatccccaacatttcacgtgttggaaacttaattcccagtgcaacagtgttgagaagtaggacctttaagaagtgactaggtcatgagggttctgccctcatgaatagattatcatcattattgctagagggaatttgttataaaagtgagtttggcccccttgcaaccccctcttgctctctcacattctctctcttgttcatgtgatacgcgttgccatggttacaatgcagcaagaaagccttgccagatgtcagggccattctcttggacttctcagcctccagaaccgttaaccaaatacatttctgttcattataaattacccagtgtggcattctgtgacagcagcacaaaaaagactacgacaggaactttttaatgcatttagtattatctgataatgtgaaggctcaaagaaagtgtttctaatcttccatgactgatacacaccaataatatttgtaggctatgcaaaaggaaaacaaccagtcaacctagcccaggttcaatttttggtcacttctgattacagcttctccatgtctgatactcagacttcacctcatctgagctcaggaacgtgaccccagattctaaacaactgcacaaatgcaaagccttctacaacatccattcagctcccatcgtcttcactggtggttaatatggctggggttgagaagatgaatgaggagaaaaggagagaaaatggagattattggctggtcaaagtaacttactaataatactgagctcattctctggtctatgtcttggttccaaaagtcagggtggggaatccaaagagcatgctaataagtggatttgttccagtcaggcataaccctaactgaaataatccctttcactcactgtttcaatcaatttgccacttaaaaaaaaattcatgggcataagctaagcaattttggcagcttttaaatatgacaacagtgaagagggctgtattagcaacctgtgtttacattttattctccatctaggatgcaggaggccagggatggggaaaatatggaattctgagtcaggtatggatgctttcagctttagtgtccttgtctgtgaaatggggatacagtctcataatgttgtcatgaggattaaacgtttaaagtttagagtataatgctgagtacaaatgccacatccaataaaggacaataacaccgggcaacaagttgacctaacacttgaatttaaatgaatgacaaacaaatgcaatttatccctgagcttgtcaatgtgcttggctctgaaagtaatatctccctgagttcaaatttcaaaagatccaaatttatgttttacttgacatccactcaattttgtaatatgctgttccttttaaagccacatgagaagtgatcctggctcttgaaatttgcttccttccactttaagatcaaaggagttatgcagtaatacggagaaggcagcaattgcacaaatgagcttaaaatggactagaagaaacagacaccccctttccctgcagagttcgtactctcattgcaaaacttcgctcctggcacttccacttcagagcagctttcgtggcattagtcatcttcaaaaagatggcacacaaactcgaaaaagggctctgaattaaagcttttcagttgtctttagatacaaccaaagtatatagagatactgacaatacagaaaaaccatgaaacctaggttcggactgaaggccaaattcacataaacgctcatgaaatctaaacttcgtaacattttcttttcaattaatagcccaccataaggatccacacaattatcaaattagtagccaagctatcaataatctctagagatatgtttacctggaggctctacaggagggcctgtgtttactcttgcttgaagtaaaatgaaaaggaagcacagagaccccatcagacgacatgtgcctgcgttcagatatgtgctgccatttacttctactgtcccccatgccatttggcccttgacttggatcctaataatttttgctctatcaagtcctggccatctgctaaataggatggtcaagacaacctacttgccttgaatccgacaccgccagctgctcctttagttccataaacatcacatccagccgatatcctcttgtgggaaaaaaggatttatgcatgctgagggtgaatggctataccgttaaccatggctgcagaggaaagtgacaaagggcaggaccagagactccacatggccttccagaattgcagagaagaggattcacccaccccagcagttagcaggtaactgtgtattcagaagctaatttgctgtatgaggacaagggcaagcacttctcaggatgtttgatttcacatctgaatctcccctccttccgtggctcttacctaaagagccacgtggcaaggatgctgtagcttctttcattctgacttcaacatcctagtgaccactaactagattttggttcacgttgctgtcagaaagcatttataatgtggttattttgcatccttgcattttggttagcccttacccagaaagagatcactgcctggcttcctttattaataagttaaacacttggcaataatttaggaaatgtggccatgttcaagaagacaattttagcatgaaaccactaaccactgagctatattgaaaacaattttcttttcctgacttttctttttagtcttcacaaatattaccttccttcttgtatagccaatggtcttagtttctgatatagaaatgtagtttttcccttttgacattccaacatcattttctagtgtctcttatcactgctgcaatgtgatattacaaaaagcagaatcagagatgttggcacatgtggcatcccaaactgccatgaaataagtcggagaggaatacagagacacaattgagagtgatgaatggcaaaggaaaaaggagctctgtaaacctgtaggacttttcatgaaatcccgataaagatgagtaaccaagtgtggattcctggtctagagaattgctttaaatgcaactactaaattccaggatcatacattaagcctaatctaacagataagcaaaatgtcaccgaggcctctcacagaagtgcccctgactgaagcaaaaggtatggccctgtatcatcatctattttccaggatttgacagggacagactcctaggactggtttccatcggcagatgagaaaactcctaattcctcagccttgggaagggattaatatgaaaacgaaacacaattataaatgctaataggattcaccctccccacttcaaacgcagcttgagcacggacatggcttacttactgttaattcataatattaatggaaactagttaattcacaggttattcatctccagagaattgagattcatggtcagagaaggccacttgaggaaatgaattttgtgcttttgatctacttaaactgaccattctctggcctcctgcccctgcctccccaacccaccagagtatttaccatctcattgtcagacttggcttggaggagtgcattactggaaaaaccaatccccgcagggtgacagcaaggctggtagcaaatccgtacaaaatggcagattttgccaggagcagtcttgcagattgtcaatacatgcaatttctcattttcatgaggatcaaactttggattctctcaacacgccatttcaaagccagagcagaagagagggaggaagtgggatggctggggtgcctggcaaatggtactcccgtgggggcccgcatggtgatttttgtccttctgtctttttaatacactgtgtttcagagacaagaaggttttgggaaaggctttacagcatttcaagccggggtcccagaacctgtctgtcccacccctgccaatcttctcaaagtgcaggctgctcctgaaccggagaggtaaaacagaaattccagctttgcaaagcatgacctagagtcttaagctacgttgcaaactgtttcacacagatattgtcatgacgtttgaatttaaaaaaaaaaaaaaaaaaggtatgagatctggggaagcctggggcaaaaggagcttatttcaggttcagtgacttgcctacaagtttctcctgattctgtgtggcagtgctggacaactttgactttcccttgttaataatcccgccatacactgaaaagccccaacaatatcaaaggcttagtggagaaggcagagccgactgttttcacatgtagcaagtgacttcaaccaaaacacattagatgtgaactctcacccttgttttttcattccctggaagcaaaaagctactcaggggcactccatttacaaaaggctcgaaatccagaaaacactgagtggggatggctttaaattcccatcatgcatgcagcatgaaaaatataagagacaaggcacattggatcaaacaggttgccaggttgatccttcttttgaaaaagaatccctccataggagtaggtaagattatcattttgcagtattaggaacgggggaagaccatgtaaatatcatgtaggtatcatatgtagaatgttaaaatgacgtaaatgaccttaaatacccctttatagttatataaaaaggtgacagggggacaaagctaggggccctcagctcaaattataagcactggctccttaaactcattgattcaaccaatatgtactgaattctactgcagactgtgatgggctcactctaagatgatccttcaaagacccctgactccaggtattcagatccttatgtaatcaccttcccttgagggtgggctagatctagtggcttagttttattcagtagaataaggcaaaagcaatgttatgaaagattctggccatgcgcagtggctcatgcctgtaatcccagcactttgggaggctgaggcaggaggatcatttgaggccaggagtttgagaccagcctgggcaacacaacatctctagaaaagaattttaaaaattagccagtgtgattctgagccaagtccggtgccaagcrcagctagctcagcaggcggcagcggtggcctgagcttcaggacagccagctccctcccggtctcaccttccctcgcggtcagcatgaaagccttcagtcccgtgaggtccattaggaaaaacagcctgttggaccaccgcctgggcatctcccagagcaaaaccccggtggatgacctgatgagcctgctgtaaaacatgaatgactgctactccaagctcaaggagctggtgcccagcatcccccagaacaagaatgtgagcaagatggaaatcctgcagcacgtcatcgactacatcttggacctgcagatcaccctggacttgcatcccactattgtcagcctgcatcaccagagacccgggcagaaccaggcatccaggatgccgctgaccaccctyaacacggacatcagcatcctgtccttgcaggcttctgaattcccttcggagttaatgtcaaatgacaggaaagcactgtgtggctgaataatcatgacttcttttttttctttgcacaacaacgacaacaacaaattcacagaaccttttaagcgctgaacttatttttcaaccatttcacaaggaggacaagttgaatggacctttttaaaaagaaaaaaaaaagggaaggaaaactaagaatgatcatcttcccagggtgttctctcacttggactgtgatattcgttatttatgaaaaagacttttaaatgccctttctgcagttggaaggtttttttcatatactattcccaccatggggagcgaaaacgttaaaatcacaaggaattgcccaatctaagcagactttgccttttttcaaaggtggagtgtcaataccagaaggatccagtattcagtcacttaaatgaagtcttttggtcagaaattacctttttgacacaagcctactgaatgccgtgtatatatttatatataaatatatctatttaagtgaaaccttgttaactctttaattagagttttcttgtatagtggcagagatgtctatttctgcattaaaaagtgtaatgatgtacttattcatgmtaaactttttatamaagtttaaacttttagttgtaaacgtaacccttttatacaaaataaatcaagtgtgtttattgaatggtgattgcctgctttatttcagaggaccagtgctttgatttttattatgctatgttataactgaacccaaataaatacaagttcaaatttatgtagactgtataagattataataaaacatgtctgaagtcaaaaataaaaaacattagccagtgtttggtggtgcacatctatagtcctagctaccccagaggctgagacgggaggatagctggagcctgggagttagtggctacagtgagctatgataatgccaaaaggaagtgacagcagcctttggccaacagctaaagagaagctaagctcctcagtcaaatagcccttgaggaactgggttctgctagcaatctaagtaaaattagaagtgaatcattccccagttgaactttcggatgagatcatagtcccagttgacaccttgattgtagctttgtgagaaaccttgaatctgaggacacacagaaactgagatgataaatgtgtgttattttaagctgctgagtttgtagtaatttgctccatatcagtagataaccgtatgccaagaactgagtagcggaatagaatatgtcattgaacaaatcacagtgctctgccctcatagaactgatgatctagttctagctcccacaagacaggttgggggccctggcttctgtaatgaacccacacaacaccattttccttacactgctgcatcagctatcaaaaggcatttcccctccttctagatgagttcttgcccctcatggacctcagctgctatgtcaccgtttctagagtttgaaaagaagcagtttgtttaaaatccaagttccaaccaagaaaacttggcaaaaataatgagcgaaccccaaatggagcaaataaacatcgataatcaattctgggatatagaattttcagtagcttttatgtttaaacaaacatagaaaaccaattaattgcagcacagaacctaagtgaaaggtgccactgaacaagtcacagagtgttatgcagtggcgtgggtgctgctgtttcatatccacagcaattaagtgtaaactaattacatatcctaaagcttttttttcttttaagagggggtagttttactctgtgctttcttggagcactgaatgattgctctcataatgtagtctctgcagattaagtatcaattcactctcctaagcaatacctcacaggccattccctattccaaaccatgggctcatggaaggggtttgctgcctgatactacaagagaaacttaagctccttgtcatcatcctctatgaaataaacctgctaactcacctaaacattgtacttcattcacagacaaactagtgaaaactgtttttagggagctactgttaaagctgtcggagcatttgatttaagggtctcagtaaagctatgttttttcagggtggggggttacagatagcttatttaagtagacaaacatctcaaaatccacaaattagggaaattcctttctgggaagaggcagtctaaacaaaatccagccccatctcgaggaggacatagattaatgctaactgaagagttcagctttgtatttaacatgcacctgagttcaacagaggttaaaattaaattgcaatgaggaaagacaaaatctttcctggcaggccttgattgatagaacgtgccatttgtagcagaacaaaatggaaaaccagaaagtttgttcccagcaatcatttcctcactgggccaactctctctcctctgagaaaataatatgatttcttcatagagcatgtagtctacttatttaagcaactgtgctcaggatctttcaattcttccagcagtttggatggaaaaaaatggtcccagtaggggagagggtggtgtaggtaacatttagccaggaagaggcttatcttatgaaaactgccattgacagtaacctgggaataagtaactccatagaaaacgtgcagatggatcccctgtaggtgaacacgatgagctcattttaaactgcaagctgggtacctaagactagtgtagtggttaagtacagggtttctgaaaccaggatgctagagcccgattcacaacccagctcttctacttagcagctgtatagtcatgggaaagtgaattacaatctagttgtgcctcaatttcctcatatgtaatgttgagatcacccccctgaaaaacctcatagggttgttaagaggattaaatgagtatttagcacagttcctaacacatccaagatccgtgagtatttagcacagttcctaacacatccaagatccttaaaagctgtagctataggctgggcgcggtggctcacgcctgtaatcccagcactttgggaggccgagacgggtggatcacgaggtcaggagatcgagatcatcctggctaacatggtgaaaccccgtctttactaaaaatacaaaaaaaaaaaaaaaattagccaggctagtggcgggcgcctgtagtcccagctactcgggaggctgaggcaggagaatggcatgaacccggggggcacagcttgcagtgagccgagatagggccactgcactccagcctgggcgacagagctggctgtcttgtgaaaaaaaacctatagctataagccattctttctcccaaataagcaggcatgccctgctggtacccaaccaggaacacacaaagttccaaaaatactccaacttctggctatagacaggtcaatcatttttgagtcctgaactaaattcagtcaatcataatcgtctacccacaccccaatctttcatcttccaatctttttcttttttttttttttgagatggagtcttgctgtcacccaggctggagtgcagtggcactatctcggctcactacaacctccacctctgggttcaagcgattctcctgcctcaggctccccagtagctggaattacaggtgcatgccaccattcttggctaatttttgtatttttagtagggatggggtttaaccatgttggccaggctggtctcgaactcctgacctcaagtgatccacccacctcggcctcccaaagcactgggattacaggcgtgagccactgcacctggccttcaatcttttattttaatacaattttaacatttttccatccagcagactaaatccccaaacctaggaattattttgattccacccctttcctaacccattcacttcctttcttgacgcccaaaattctggaagattctacctcctaaatgcatcttaaatatgaccaccacttctctgcagttcctctggtctaaccgtatcctggatcaacaccatcttgtacctaaaccacttccagaagcctgacctaactggtttgcctgctttctctgctgtaccctccaattctttctctgcctgatagaccagtagttgttttaccctggctgcccactggaatcatctttaaccagcttaaaaaaaaacccaaaaaactaaaaacaaaagtagactacaacaatgacaaaacactattctgattgacctgagggtgtggcctgggcatctggatgttgaaaagctcccttgatgattctgatgtgcaggcagggatgagaaccactgagtcagaatgagcttttaaaaataaatctggccgggcacggtggctcacgcctgtaattccagcactttgggagcccaaggtgggcagatcacgaggtcaggagatcgagaccatcctggccaacatggtgaaaccccgcctctactaaaatacaaaaaaaaaaaaaaaaaaaaattagccaggcgtggtggcccatgcctgtagtcctagctactcgagaggctgaggcaggagaattacttgaacccaggacgtggagtttgcagtgagccaagactgtgccactgcactgcagcctgggtgacaaagcaagactctgtctcaaaataaataaaaaaataaaaaaattaaaaaaaaaaaatctaatcacaacccatgccagcgtaaaagctctcccagatctgggcccagccgacctctggattcttccaggatttccatggttccctacaggactccagggcctccttcctcttcctcaaatactcggagcatttcactgcctctaggcctttgcccgcattgttcccactgattaggccgctcattcctcagctctttgcagggcaagttctcagtcatcagagctaagctcaatgtggctcccatgggaggccttccctggcccattccaaatgtttgctaactcagtactcttgttagttccttcctggcaccagtctgtttgtcaattcctaaagctcagggtacagcccaactggttgcgtcagctgaggaaatccaggctggagagtctctgaaatttaagcaggtcagaaatgctcacacccacctgtaacacaacctctctcctgcacttcctacccttcattgtaattacctgtttagaaatctgatcgcttgactggaccagaagctccctgagggcagggcttgcactttatttagtttgtttcgtattcccagctctatcttagtgccaatacagagctggtgctaacaagatgtttgcttcctagaagaaaagcagatagctattaaagaggtgaagcagggaaaagacgttaaggaggatgaagctaaaagaagactttaatcagggtatctagagagttcaaagagttctgggatttatgtccaaaagatgtgatccaagtcttggctgtgtgacctgaggtaagtgactttaatcactctgggcaagtggacaatgacacacacctcctgggttgttctgcaggggtaaaatgaaaagatgcctgtgacacaggcattatttttccactgtatacagaccaggggattatcacattgtggtgagatttctttttattttcttttaatccatgactgaaaagtggtatggaattaagaaggaaaggtaaaagcaaaaaacataaaatttaaaaaataatagtcgtcattattaacgaggacttctaaagcaagtttctagcctttttcctttttctagatcagaatttgctcctaacacttctcagccttttggctaagatcaagtgtagaatttgctcttaactggttaaacacaaggtcttccaagtcaggttgccttggttcaaattacacttctatcatggatgaggtgtgacaagggccagcacactatgaccaccaaggcaaatcccacccacagactgcatctgtaaataaagttttattggaacacagtcaggtccactcatttacatatcgttggtggctgtttttgtgctacaaaaccacaatcaagcaattggaacagagagctcatggcctgcaaagtcaaaaatattacaatctggccctttggccctttatagaaaaagtttgccaattccagttttacacaaacaaattacttaactgtcctaagcctcagattcttcagtctggaaaacggagatattaataatacttccctcttagggctgtactttcctcagagggctgaggagagaccaatgagataatccacataaaatacttcacacgatgccaggcacatggcaagaattcactgatgaaattactgaacagtaaacattactgttaaaattatcagtgctaaacttcatccatccacctattcattaattcacccactaattcatacattcaacaaatatttactaagcacctaataagtgccaacaattatactaggatgtattgtactgcaaatatatctattagacaaacaaaagtacagacaaaagaaaatgaaatttttctgccagtcagatgctcgaaccctgtgaattgtgtaattgtgatattagtagatatagtattaatactatgttaaccagactacaagttttgttttgtttgaagatatactgcaataggaaacccagtgcctcttccacagtaagccttcaaaatatctttgtggaatgactgatagattgatagttgttaccaaccggggaggcttctaatgataaaaaactgcacaagttttatggcacagtaaatgaaccatacctgtaaacatcacaggaaaatctccaaaaatctagaaacagctttttacaagtgttgtgttaatcagatcttggtatccctgcaaatgtaatttaaaagactgagcatgctctgagaaacgtgacagttattttagaatgttaaatatgcgaagttcaacatttatata

SEQ ID NO: 97704 - DNA, 23396 bp, Homo sapiens
cctggggtctggagttcaggaggccctgtcctcaaaagggggacctaggggttccctcttcccccaggaccctaggaagggtcccagcgattgttcccttgcccctccagtcttggggtctgcagttctggaagctcctttccctggaggtgatccaggggtccacctgccctcacccctgggaactcaggaaagacttaagtgatttctcctcccaccttccagttaagagatgggaattcagggggctccttcccctggaggcaatctaagggttcctctgcccctgatgcaggaggggtcccaggtcttgtttcccccactctccaactatggggtctgggttgaggaccgccgtccaggaactcggctctgtttgcctgcacactcccagctatggggttgtggctcagtgtattcctttccccagaaggggagccacaggtccccccacagcttctcccaggagcagatcattcattgttgacacctcaacacccagccatggggtggggagctcaaggcatcctcccggcaggtcatcctgggctcccattgctccccagaagtggttccagcttttgtccctctacctcccagtctgcccctagccacaagctggcaattcagttcaggatccttcctgcaggaagggctacaagtgtgctgacactacccgccatgtcccagccatgggaggagatgactcaggcgttcccccattaacttcagagggtccccaggtattatttttgcctatcctccagctagaagttaaaatgcaggaccttctagccaatagggaaaacaggtatactggccgggcatggtggctcatgcctgtaatcaccatactttgggaggctgaggtgggaggatcatttgagcccaggagtttgagtccagcctgggcaacataccaagaccccatctcaaacataaataaataaataaaacaggtatactaacaactgtccccaccatcctgcctatggggttcatgagtctccctacccatccctcctcaccaggaggggtcccaaatatcactctaccatgctcactatctggctgtaggaaagggcatttccgatctgtctaagagagaggatttgacactgactcccacctggagctgtgagctctggaattcaggttttcttttccccagagggcaagccagagtcttcttgtctttccccagtgacttgggagggatacctgatgttatttgttccatattcttatcccccagacatgggttctagagctcagaatgctgctgctggaggggggcctccctaccagaactcgccccctaaattaatctgccgcctccaagtatgggacaagaattcaggccatgtgctcaggagcacagaaacgctgacacccacactgttccccatgtggggacgcccagcaagggggtaggaagctaggactgtctcctccacaggaccccagcttcccacaagaggagcccaggttggagagaggtgcagagccatggagttggggactagaaacctctagtgctgggtctcatgacctccgtccaggtttggggctgagaggggagggtcctaccatgtcccacctggttccctcaactccctgccctggctggggtaagtcagaaatctccttgcagtcagagacaagggaaggatccacgtgtatgctcagaagtgagtggggtttggccaggcacagtggctcatgcctgtaatcccagcactttctgaggccaaggccagaggtttgcttgagtccaggagtttgataccagcctgggcaacatagcgacaccccatctcaaaaaagagagacagagggagagagaaaggaaagaaggaaggaaagaaggaagaagagagagaaggaaggaaaagaaggaaggaaggaaagaaagaaagaaagagagagagagagaaagaaagaaagaaagaaagaaagaaagaaagaaagaaagaaagaaagaaagaattgaagttagctgagtgtggtggtgcatctgtaattccagctacttgagaggccgaggtgggaggatcgcttgagcccgggagttccagtctgcagtgagctatgtatgatcacatcactgcactctagcctgggtgacagagtgagaccccatctcaaaaaaataaaaataaagaagtggggctgggcgcggtggctcacgcctgtaatcccagcactttgggaggctgaggcatgcagatcacctgaggtcaggagtttgagaccagcctgtctaacatgctgaaatcccatctctactaaaaatacaaaaattagccaggcatggtggtggacacctgtaatcccagctactcaggaggctgaggcaggagagttgtttgaacctgggaggcggaggttgcagtgagccgagatggtacctttgcactccagccttggcaacagaacgagaccccatctcaaaaaaaaaaaaaaaaaaaaaaagaagtgggttctgggggcacaatcgggtcccgtctctcatccctaaccagactccaaaagacacccccgctcccacagaacccacctaccctctaccctctatccttgcccttgcaggtcttgccccagaagctgcgggcacatccacgcctgaaatgcggcgctcagtcctggtcaggaacccaggccacaaaggcctgagacccgtttatgaagagctcgactctgactccgaggacctagaccccaatcctgaagatctggacccggtttctgaagacccagagcctgatcctgaagacctcaacactgtcccggaagacgtggaccccagctatgaagatctggagcccgtctcggaggatctggaccccgacgccgaagctccgggctcggaaccccaagatcccgaccccatgtcttcgagtttcgacctcgatccagatgtgattggccccgtacccctgattctcgatcctaacagcgacaccctcagccccggcgatccaaaagtggaccccatctcctctggcctcactgccaccccccaggtcttggccaccagccccgcggtgctccccgcccccgccagcccgccccggcccttctcctgcccggattgcgggcgagccttccgccgcagctccgggctgagccagcatcgccgcacgcacagcggcgagaagccgtaccgctgccccgactgcgggaagtccttcagccacggtgccaccctggctcagcaccgtggcatccacactggggcgcggccgtaccagtgcgcggcctgcggcaaggccttcggctggcgctccacgctgctgaaacatcgcagcagccacagcggggagaagccgcaccactgcccggtgtgtggcaaggccttcgggcacggctcgctcctggcacagcacctgcgcacgcacggcggcccgcggccccacaagtgcccggtgtgcgccaagggcttcggccagggctctgcgctgctcaaacacctgcgcacgcacacgggcgagcggccctacccgtgtccgcagtgcggcaaggccttcgggcagagctcggcgctgctgcagcaccagcgcacacacacggccgagcgcccctaccgctgcccccactgcggcaaagccttcgggcagagctccaacttgcaacaccacctgcgcatccacacgggcgagcggccctacgcctgcccgcactgctccaaggccttcggccagagctcagcgctgctccagcacctgcacgtgcattcgggcgagcgtccctatcgctgtcagctctgcgggaaggccttcggccaggcctccagcctcaccaagcacaaacgggtgcatgagggtgcagccgctgctgcagctgccgcggccgctgcagctgcagcagcggccgccggcctgggcctcgggcctggcctaagccctgcatccatgatgaggccggggcaggtctccctcctgggtcctgatgctgtttctgtgctcggctctggcttgggcctcagccctggcaccagctctggccgcaaccctgaccctggctctgggccgggcactctgccggatcccagctccaaacccctccccggctccagatccacccccagccctactcctgtggaatcttctgacccaaaggctgggcacgacgctggtcccgaccttgtgcccagcccagaccttgatcctgtgcccagcccagaccctgatcctgtgcccagccctgatcccaaccctgtgtcctgccctgacccctgttctcccactcgtggcactgtcagcccagccctccctaccggcgagagtccagagtgggtacaggagcaaggggcactgctggggcctgatggctgaaggagacgccggcatcctcgggggcctggggaagttgtgtgttgtgcagtcagtaaaatcctcccactgcctccgggctctgtgtcgtggcttgccttttgtgctttctttctgagcacagccccttgctccggagatgggacattgtggccagggccagccacaatctggagctccagtgtcctggcttccttcttgggcccaccagctagactttccagcttaacccacagtgtctcatcctggtccatcccactagtcaccactctctgttcctctcacttaccccttgctcttcaaagcccatacagtaggtatacaagtggacaaaaaaagttgctcatttatgcaatcaacaaacatctctggattgctggggtctcagcagggaacaagataaatatggcctcgacctgcatggagctcatagatactaaattcagaatacttaaaaaataattacggggtatagtacattctaggagaagcataacaagacttctgatataaatggcaggcagctttctcaatgaaggattttgtaatcccaataatcactaatttaataatcagtactgtttgcccagccttatgcgatagtttttgcattctctcatttaatcctctcaacagccccagtaggtagatgactttgaatatccccattttgcaaatgagaaaattgaggcacatttttttttttttttttagacagtcttgctctgttgcccaggctggagtgcagtggtgtgatcatagctcactgcagcctcgacctcctgggctcaagcgatcctcccaccttagcctcccgagtagctgggattgccggtgcatgccaccgcccactgcgctcagcttggagttgaagggactctggaagatgtagaagtggcattgtcagtgcctagatttaaatcccaattgccctccagggtccaaattcttaaccattacgctccagggcaaaagtatgcaaaggctctggggctatagaaagatgagctttggatggaggtaggagccagatcagagggccctgatagacgagagtggggactctgcctgtcattacagagcaatgggaagccgagggcaggttctcgcaggaaggataggaattattctttgaagatgcttgtggctgctgggtagagagtggagtggagggaggctgagatcggggaggaggttgctgcaaagatccaggccaggaatgttggaagactctgggctgggggccatggggtggggataagtggttctatttgatacataattaggaaatcgtgtttgctgaagatgcgcaggagaagggtaaaaggagtttctgggagaaagaggaagacagcgttgagatagtaggcagggtcatcaccaggcaccaaggaggataaggggtcaagctctggacatggaagtcacaagcctggcaccggattcggggcatggccgggagccagggcagagctcgtcgttgccaaactcagagtcagcccatcccccgccacccagagcgcgtcggcgctaggacctagcgactgccttcgacccagagggcgccggcagaggcacgcatgcgcgctgttccggcaggggttgtcgtggcgcagggggcgggaccagaggcggtcacgtgaggggctctgggctaccgggtcacgtgaccgaggcacagatcagctgatgccggagggtttgaagccgcgccgcgagggagcgaggtcgcagtgacagcggcgggcgatcggacccaggctgccccgccgtacccgcctgcgtcccgcgctcccgccccagcatgacagccccggcgkgtccgcgcggctcaggtgagggcgcgggcggcaccgtggggccccgaactcaggcgggcgggctgtgtctcccacctggggcggcggagctcctagtctctttttttctaagctccagcgctgacttttcacggtggagaaaarggcagacggctcctagaacttgggcggcgggtgggcaccagcctctccaattcttcctcctgaacccaggctctgctgggttcccaaactcaggcagggatcgcgccgggccgccagcttctccctctggggcggcgaggttcctgggattcccactgggagcctaggttccgattgctcaacttcgtctggaactcagacagcgggcaccagcttctccaacccgcacgtgagactcccaggcttcccctcctgattccaggggacaaatgctcagcttccctaagctcaagcctggagagctggagggattgcccccaggcgattaactcagttttagctttccaaaccgctggaagcgcagccttcttaaattcgggcttctagccaattctgatgccacccctcctcggggaggctggaggaagaccccttgtgttagcttccccttctggagctagctggggacccctacctgatagatgtcccggtgtcccagctagtagggtctggggtgggttagctgtaatctcagctctgtaagcgggccctgccctctggctttgtcgtaaacagccacagcagcatctcattgcaaagggaggggccgggaacttgtccctctctgcaagggaggttctgacagtgcacacatttatcctgactgctttgctaggcaggaggccaggccctagaaagcagcacggggccaggccctagaaagcacatccccatgggggtgtgacagggacagttttgggctactgtgactggttttgactccagcagttgctgaaagcttagatctaaccattaggctggaaaaaaataaacagtgattagaacagcttgtgtttgctgaagaggtctttatctgctgtgtctcactgaattctcagagcagcttcaggatctcaacctcaaggctcagggagagggtggactttttttttttttaataaacttttttttgttgcccaggctgtagtgcagtggcataatcctagctcattgtaacatcgaactcctgggctcaagtgatcctcccaactcagcctcccgggtagatggggtcccagctactaactacgggcatgagccgtcacacctgactatttaaaaaaaatgttttttttttgtagacagggaggtctcgctgtattacctaggctggatcctcccaccttggcctcccaaagccgttgggataacaggcatgagccactgagcccagccaaggggtcgcctttttaaaatttccactcttcagatgaggagatggaggctcagggaggtacctggagtcaacctactgtaaagtggcaggtctgggatttgatgctagggctgcatgatttctaggagctggtgcttttcagggagataaaatgagtctttagcgaatgtgttccattattattacttatgttgtcaattacctcttctccaggtccttggcttctgagagtgtcagctgatgggccaggttataatgaacccagaggtcatcttttgggtatttgtccagacaaacctagaatacaggctgagttctatgctcatgtctggaagctggagttgggataagcccagcagscttgaacgcccagtgaaaagccagtgggagcagttcattctctccccactgatcaataacgggaacattgatgaaatgttctgacattcaccatggaccagcccctgtgatcaatgcttcataagcatccagtccttagcgttcccatgagacatattattgccccatttcgcagatgaggaaactgaggctcagagagctggtgagcaggaggggcaggaatcagcccaggccctgtacctcccaaacccaaactcataacctctgagcaggacgggtgcatagatacctacaatgtcacaggttttctggttttctttagacctctcagagctcttccttggcaggagcatggggacatgaagatagggcgtgtgctgccttcctggttggagaaaggggaaaaggggagttgcccaggcctcaccccagtgccctctcctattcccacagagaccgagcggcttctgacccccaaccccgggtatgggacccaggcggggccttcaccggcccctccgacacccccagaagaggaagaccttcgccgtcgtctcaaatactttttcatgagtccctgcgacaagtttcgagccaagggccgcaagccctgcaagctgatgctgcaagtggtcaagatcctggtggtcacggtgcaggtgaggccagccaagcaggggccccagctgaaggccacctgtggctgctgtgctccttgaagagagtcttaaagcagcactttggaaggccgaggccggtggatcgcttgaggctgggagttcaagaccagtctggccagcatggtgaaaccccatctctactaaaaatacaaaaaaattagccgtgcgtggtggcgggtgcctgtaatcccagctacttggcaggctgaggcaggagaatcgcttgaattgggaggcggaggttgccgtgagctgaaatcatgccactgcactccagcctgggcaacagagcaagactgtctcaaaaaaaaaaagaagccgactctgaggctcagagaggttaggagacttgcccaaagtcacacagcaatagaacattgggagctgggatttgaacccaggcagtctgacaccatgttgacccaatggctgcacagatagttctccctcccccatgccagaccctgtgctgggctctgggaaccccaagatgaatcagacccagccactgccctaagtgcttacttcatgttttgggctgactttagcatgtcaccatgcctctaattttccctctgaaaagggacccaattgtccaggcatggtggctcatgcctgtaatgccagcactttgggaggctgagttgggtggatcatttgaggccaggagtttgagaccagcctggccaacattgcaaaaccccgtctctactaaaaatacaaaaattagctgggtttggtggcaggtacctgtaactcagctactcaggargctgagacaggagaattgcttgaacccagggggtggaggttgtagtgagctgagatcataccatggcactccaacttgggcaacagagtgagactctgtctcaaaaaagaaaagaaaagggacccagtcatggtacttaccctgaaagtttgggtttaacacagaatcggacatccagtaaacatttaatgaacgttagtccctgcagtgagatagatgagtccccaccctgtgttgtacgggggaggacacagtggtgggcgtggcatggagcttatgccaggaggtggggtgaaattaatcaaagcaaagaaatgcacaagtgaaatccgtgtttgtggcccaagttagcagggccctgccccaccccagtggacatctgcagggccctccctgtcctcttccagggcctgtgccctgagggagatacaccccaacccccatcctagccatgccaacctctactaccctctccccagctcatcctgtttgggctcagtaatcagctggctgtgacattccgggaagagaacaccatcgccttcygacacctcttcctgctgggctactcggacggagcggatgacaccttcgcagcctacacgcgggagcagctgtaccaggccatcttccatgctgtggaccaggtgctggtgggcgggcaggtgctggtgggcaggcaggtgcaggtgggcgggcaggtgcagttgggcgggcaggtgctggtgggcgggcaggtgcaggtgggtgggctgcagagagcgggccggactcacaggccctccccttctctgcccacagtacctggcgttgcctgacgtgtcactgggccggtatgcgtatgtccgtggtgggggtgacccttggaccaatggctcagggcttgctctctgccagcggtactaccacygaggccacgtggacccggccaacgacacatttgacattgatccgatggtggttactggtgagtgggcaggacgaggcttcactgttgggagcctgagctgctgggattaaaatcaacagctgtggctgggcacggtggctcacgcctrtaataccagcactttgggaggctgaggaggaaggattgcttgaggccagaagtttgagaccagcctgggccacgtaggaagaccttgtctctacgcacaaacaaattagctgggcgtggtggcgtgcccctgtggtcccagctactcaggaggctgaggcaggaggatcgcttgagtccgggaggttgaggctgcagtaagctatgaccacgctgctgcactccaccctgggtgacagagtgagaccctgtctcaaaaaaaaaaaaaaaaaaaaaaaacaagtatgcttagtgtgagtgtgactcttgccacgtagaaagcaccagatgttatattttaatatggctcattcagtaaaacatccgcaggcccagagagtgccaggcctgtaggaatgacccaaccctggggaagcacagggaagaaggccactggggactctggggagaccagcctggcctccccggccccctgaggcccttccctgactccctgtccttagactgcatccaggtggatccccccgagcggccccctccgccccccagcgacgatctcaccctcttggaaagcagctccagttacaagaacctcacgctcaaattccacaagtactgcctgctcwctcgaggggggcccagggtgggggaggcagcacactaggcactctcaccccagcaactacttccctaaggtggggacagggcccccccgcccgygctggtgcctgctgggtgagcacttcccctgccagctgcagagtcagcacgtggcaggggacgctggcacttggggccggaagggacccgaagacgcccctgaccctcacccgagcctcctgcctaggctggtcaatgtcmccatccacttccggctgaagaccattaacctccagagcctcatcaataatgagatcccggactgctataccttcagcgtcctggtgaggccccccgggaacccacagggctcctgagttccagggcagggacctggtcagggagtgtcttgggagcactggccaagggcaagcgtgygggtratgagggagggagcccggggtctgtcaggccacctgtcatgtggaccttggggcttggggctgccaaggtttactctgcccccaactggcccccacagatcacgtttgacaacaaagcacacagtgggcggatccccatcagcctggagacccaggcccacatccaggagtgtaagcaccccagtgtcttccagcacggtgagcccctgagccccagaccagcrctgmccaggggccctggcctgtcctgggattccccaagccccagatcagcgctgcctgggggccgtgacctccccaggaatccgctgagcctcagatcagcacagaccagggaccccgtcctgtgctgagatcccccaagccccagaccagcactgaccggggttcttgactcaccccaagcaagccctgagcccactgaccaaccaaaaccagccgtgcagccccctaggtctccagcctggcctggcaccaatgctagcctcccaaggctccatgccatccttggccctacccgctctgccctccccgcaggagacaacagcttccggctcctgtttgacgtggtggtcatcctcacctgctccctgtccttcctcctctgcgcccgctcactccttcgmggcttcctgctgcagaaygtgaggcttctgcgtcatgtgtgctggtgtcctccccgcctggccctggggcgataaaagccagggctttgagggtcctgtgcctggtcaggccctcaccccgcctgccttctgcaggagtttgtggggttcatgtggcggcagcggggacgggtcatcagcctgtgggagcggctggaatttgtcaatggctggtacatcctgctcgtcaccagckatgtgctcaccatctcgggcaccatcatgaagatcggcatcgaggccaaggtgcgtcctgccaacaccctgggccccaggtcccatccctgctgtcagtgccyatccggggccatatcctcccccaggccccccaaaggaagggctgggccagataggttgacgcagctcccacccgcagaacttggcgagctacgacgtctgcagcatcctcctgggcacctcgacgctgctggtgtgggtgggcgtgatccgctacctgaccttcttccacaactacaatgtgagttttgcacatgcagctgggccttccacatggttactccacaccctccaaataaatccctacacacrcagccctcaccagccccggccaatggccccttgcaagcctcctcctcctacctgcccacaccagatatatctgtcactgcacctgcgcggggccccgggagcctgctcctttgtgcccacccagctgagtctagccgtgcgttgccctcggaccccctcagacgtggccacgccccctctaggcacccactggctcccatgaccacaccggctgtgccctcggcaaggccccgcccctcccamccccatctgggtgcccacagctgacctgagttgtggccacaccctcaacgaggctccctctgccccaacccagatcctcatcgccacactgcgggtggccctgcccagcgtcatgcgcttctgctgctgcgtggctgtcatctacctgggctactgcttctgtggctggatcgtgctggggccctatcatgtgaaggtacatctaacccctgatgtccctgacattgaccctgtgaccttgtcattgacactgtgacccccagatgaccccttggtgactgctgggagtctgtccactgtcccctgtggtccttggtgaccctgacactgaccctgtgccattattgttgtcacagttgttgatgaccctatttcgacctgaattactcccctcctgctctatctacccagaccctaggtcggccctgtggccctgtcattgacccgtggtcccggccattcacatgggaccccagcctgggacctggccattcacatagtgaccccagcctgggacccggccattcacgtgggaccccagcctgggtcccggccattcacgtgggaccccagcctgggacccggccattcacaggggccctagcctggaacccgaccattcacatggtgaccgcagcccgggacccggccattcatgtggggccccagccrccagctcctagccatttgcatgggaccccagcctgaccccagccccyggttcctggccrtgccttggctccctctgaccccgccrcccctctggcagttccgctcactctccatggtgtctgagtgcctgttstcgctcatcaatggggacgacatgtttgtgacgttcgccgccatgcaggcgcagcagggccgcagcagcctggtgtggctcttctcccagctctacctttactccttcatcagcctcttcatctacatggtgctcagcctcttcatcgcgctcatcaccggcgcctacgacaccatcaaggtcagccgcatgcacccagccctgagctcgggctctgggtgccctggagtctgccatgagggggtcttrgggacaccgcagggtgaacagagaagacccaggagagaatatgggagactctatgaaaccaaaaagagggtggttcagaactggggggcgcagggggatgtcaaggtgggcttgggccaggagggggcctgagtcagtctttgccaacagggcaaccgagtcatagagtttatttatttatttgtttatttgagacggagtcttgctctgtcacccagggtggagtgcagtggtgcgatcttgactcactgcaacctccacctcccgggttcaagcaattctgtctcagcctcctgagtagctgggactacaggcacacgccaccacgtccagctaatttttgtatttttagtagagatggcatttcaccgcattggtcaggctggtctcaaactcctggcctcaggagatctactgccttggcctcccaaagtgttgggattacaggcgtgagccaccacgcccggcctattttattttattattaaagtattgttctttattttattagagacaagggtctcactgtgttacccaggctggtttcaaactcctgaggtcaagtgatcctcccactttggcctcccaaagtgctgggattacaggcgtaagccaccacacccagcctattattattattttttttttgaaatggaatcttaccctgtggcccaggctggagtgcaatggcatgatctcggctcactgcaacctccaccttctgagttgaagcgatccttgtgcctcagcctcctgagtagctgggattacttgcacgtgccaccacacctggctaatttttgtatttttactagagatggggtttcaccacgttggccaggctggtctcgaactcctgacctcaggtgatccmcctgccttggcctcccaaggtgctgggatttcaggcatgagccactgaacccagctaagtcatacagtttcaatgaccttgtcattgaccctgggacgttgccattaacatggtgatcctcagctggccccattcctatggcggacctctaaaaacccaaccctgaccccagcccccagccatgcccccgactccctctgaccctgcccaaggttagcttctttatttatttattttttttgagacggagtctcgctgtgtcacccaggctggagtgcagtggtgcaatctcggctcactgcaacctctgcctcccgggttcaagcgattctcctgcctcagcctmctgagtagctgggattataggcacacgccaccatgcctggctaatttttgtatttttagtagagatggggtttcaccatgttgaccaggctggtctcaaactcctgaccttgtgatccgcccacctcaggctcccaaagtgctgggattacgggcgtgagccactgtgcccggcccaggttagcttctgagcagtaaaactgggctcaacccagggctgtctgattccagaagccgtgctcctaacccctctgtcctcagtttagtagggtggctgggaacagtggtttccctgcaagctgcaagggtcaggggacagagcaggatgcggaagtggcaggtagataggattctttcagcagatatatctaagggccaagatctgtgctgggttctgggcatggaggaaaatcaggtgtgcatgatccgtccaaggcctgtgggcaaggatggcacaggaacagacatcccatgaccaatgacctacttgtaacaggtatgaaggaagagtggaaggttgcagagggacccctgctttagattggtatgacaggagatccaggagagcttctagaatgttctatccatcactagtctctagccctatgcagctatttaaattttgattttaattccggctgggcacggtgactcacgcctgtaatcccagccctttgggaggccgagggggggtgggggtggatcacctgaggttaggagttcgagaccagcctggccaacatggcaaaaccccatctctactaaaaatacaaaaaattagcggacgtggtggcaggcacctgtaatcccagctactccggaggctgaggcagtagaattgcttgaacctgggacgtagaggttgcagtgagccgagatcaagccactgcactccaacgtgggcgagagaccgagactctgcttcaaagacaaaacaacaattttttaaaaattttaattcaaatgaagtacaattgcaaatttagcctctgacttgcaccatcctgtatccagtgctcaaaagccagtgtggctggtggctgccatattggacagcatagatattgaatacttccatcgcctctagactgaagagatgggagcccaggggcagtgcaccgaggggaaggaatagctaaagcaaaggtctagtagcctgaaaaaacttggagaaaagatggcccctccatgaggccgagtgagaggaaggaagccttggctgggaccctgccacatccaatgtcaccggcagatgggtacacccccttttccccatgcatggattcagctgtcccacagacacattgactcaggcccttggaactacttcctgtcttgccttagcacgtagacatcacacacatgcatccactcaggtgggcagtctcaggccctgctcccactgctgtgctcagcgtgcatccagctcactcaatagatggtttctgagcatcgaggtcatgtcagccctggctctaggtctgtaggtgctggacctacagcagaaggcaaagacacagactggcaaagacacagcttgtatccaggttcaggggtcagggaaggtccctctgtgcaagcaaactgtggaacaacgggtggagcaggcccagcaagtgcaaaggcccggaggtgggaagcgatgcagatatggctggaggggagggcggacttcaagggccttggaggttgggagccactttcrggctgagcctcccggcttctctccccagcatcccggcggcgcaggcgcagaggagagcgagctgcaggcctacatcgcacagtgccaggacagccccacctccggcaagttccgccgcgggagcggctcggcctgcagccttctctgctgctgcggaaggttcgagtcccgggtctggcacattcagattggaggttasggaatggggaaaggggagcgagccagagaaaactgacgcccctcttccctgcttccttcctccagggacccctcggaggagcattcgctgctggtgaattgattcgacctgactgccgttggaccgtaggccctggactgcagagacccccgcccccgaccccgcttatttatttgtagggtttgcttttaaggatcggctccctgtcgcgcccgaggagggcctggacctttcgtgtcggacccttgggggcggggagactgggtggggagggtgttgaataaaagggaaaataaatgtgtcgttttcatttttagcgggaggagcagtccttgcgttaagcggtgtgaggccctttaaggcgcggccacactcagcatggcggcctcagtcggccttccaagcatggcgcggggaggaggggtgggagggtcgggagggactgcggtgcgactaggagtgaataatttaaaggggccgcgcctgcggagccgggcggaacgctagcggtgttggcgcggagtggaccccggctgcggcccctgggtgagtctgggtttccgttagcctcgcaggggtgtcccttcgagggtcgttagcgagcctccgctttcccacgatctgtcctccgattcttgttaactctagactttctgatgttcccataccccccacgtctcggcaggtgtttccacaccggtagccagctgtgccctgaggtggaagaggaccggccacccaggaattttccaagtaacgactcggagtctccgggattcctatctcccggcccccgaatttccattaatattctagcgatgtcagaaacatcctcagcttcccagaaaaatcccagtaatattccagcatctctcagtatcttccaaggagcccggacgccctccccaggcccgctctcataagcaccccaggaatgtgcccacccacctcctggttttcccagcagtagtattgtaatcctcagaatctcagtaactttccagtgaccccgcatccccacccactaatcccagcgtctctggttacgcctcccagcaatggcgccaccatcggtcccggagtcccagtgatgctctgtgccatagagcccccataacttcactactacgtgatagtaaatccccggcaaaaaccagcagcgccttgcaagcccacgccaccccaagcatcccaggactcttctgaaacgtgggtatcagacgccttccgcggatgccccggcagtactcccgtgcctcccagctcctgggtcttccccggggcaggcttgcgtcgggagccgagtatctaggtgcccactcccggaccccacggtttgcgggcccgttttcctggggtggggcattcagtcttcgacggagtagggggtgcggcctggggggtggggtggtcaggcttgatcaaccctgcagagggcagtgacccgggaggaagtcaccaggtgcagaggaccgtgccctgtggggacctgcctgcaggctgctgacagtgggtaccaggtcggcctttggccccggggtggggttggacaggcgggcgtctggtaggccctacgcgtaggcgaagggagcaggaagccggggacccgcctcatctcctggccagggccgagaggtcggtttgctccatcccttagtcccgcagcgcccctctagcctcgcccctggcagctggagacgcttcccccgccaccccagagggcagggcttgagctgggggcagggcttgaggcaggggagaggtgggcccagattgacgacttgcacgggttccttcgactccttgatttcccaggactccgggctaccagatcggccgtccagctggaatcaaccgatggaggctccgctgcaaactggaatggtaaggggtggggcggagaccgggtaggtgccggcgtggggcgccaagaggactacaactcccggcgtgctcagcgcgcattacgtggtctggcgataacgcgctgcgtccgctcgggcggaactacgtttcccggcatgcactgcgggccgccgggcctcagggaagagtcgcgcccccggggagggagcagcactggcccattctgcagatggggacatcgagtcacgggctggctacgaactcctcgggggcgaaggtggcggagagggatgggttccaggacgtcctggcgcccggggaaggctcggcgggacggatttgcggtgcgcagccagtgccgttcgtccctcaggtgcttggcgtgatgatcggggccggagtggcggtggtggtcacggccgtgctcatcctcctggtggtgcggaggctgcgagtgccaagtgagcacccgaggggcccctcttgggaggctgtatggtggggggcccaaatgcccgggtcccgaggcggcagagatggggatttgctggcgtctgttcgcggtaccccagctctggcagggtggagtctgcacagagctcggagtgcccctgtccccacctatccccagaaaccccagccccggatggcccccggtatcggttccggaagagggacaaagtgctcttctatggccggaagattatgcggaaggtgagtccgggacccctggggtccgccctgaccacacagaggccgcgccccttccctatttacacttcttagtgtccgccaccgctccttccttgatggagaccccctggatccgtctgcctcttctccaaggtctgaattagcaattcacccatctccgccttcattctcccaggtgtcacaatccacctcctccctcgtggatacctctgtctccgccacctcccggccacgcatgaggaagaaactgaagatgctcaacattgccaagaagtaaggctgtgctgggtgtgacctggtattaggggttatctcaggggccttttgagtaatcagcttacaccaaagtgttgtggaagtcttcccatattggctgcgcgctgtggctcatgcctgtaattcccagcactttgggaggctaaggcgggcagatcacctgagatcaggagtttgaggccagcctggccaacatggcaaacctcatctgtactaaaaatacaaaaattagctgggcgtggtggcatgggcctgtaatcccagctactcagaagggtgagacaggagaatcacttgaatctgggaggtggaggttgcagtgagctgagatcatgccactgcactccagcctgggcaatagagtgagactctgtctcaaaaaaaaaaaaaaaaaaaaaaaaagaagaagaagaagaagaaagtcttcctgtttcagagagacatctctggactctcctctcagagctcttccacaccagacatgctgtctctagggtatctcttccctgagggctacctcagtgaccttctccttccactggagtatctgagctatttgttcccaagtcaatatctcagaggtcttgccatatacttagtgggggggtctacatcaggggtttccatgtaggttatttcatgagtctcttcacatgagtggttttcttccagggtacctcactgaggtaattgtgtttctacgatctcctaaaggggctatctccagcctccagcctctcttctccgggggttatctcaggcatctctgtacatcagaaggcatctttcctatgttatggaccttgaagttcttcccacactaaggaggctgtctcaggagtttctgttccctaggggctatcttatgaattttcttgcactagaaatataggaaggatgcatcagagatccctgttggcagcaaggtctgcgagaaaggctctccaactctctttgcaagttgggtgctggctctgggatccctgtgcgtcatgtagtctacctggaggtctgcctcaagggtttcttcacaccagggcagggctctccatgatcaatagtcctgcaatggcagtcctttcttttttgtttgtttgtttgtttgtttttgagatggagtcttgctctgtcgctaggctagagtgcactggcacgatctcggctcactgcaacctccacctcctcggttcaaaagattctcctgcctcagcctcccgagtagctgggactacaggctcataccaccatgcccagctaatttttgcatttttagtagagacggggtttcaccatgttggccaggatggtctcgatctcttgaccttgtgatccgtccgcctcggcctcctaaagtgctgggattacaggcatgagcgactgagcccggccaatggcagggctttctgtgagttgagtagaaggactatctcaaagttccccatgatcagttgagggtctatacctcaggtttctccacatcacaggagctgtctgtagtgtttgcacactcttaagggactaccctgatatcttcatgattgtcagagggctgtctgagctttctgtgacctagggaagagttagcccaagatctccctgatcaaaaaaggaataatcataacaattataattattattattattttggagacaggatcacactttgttgttgaggctagagtgcagtggcacaatcacagctcactgcagcctttacctcctgggctcaagagatctctcctgcctcagcctcttaagtagctgagaccatgggcatgcaccaccatgcctggctaatttttaaatttttttgtagagatgggagtctcactgtgttgcctgggctagtcttgaactcctggcctcaagcaatcctcccacctcggcctcccaaagtgctggtattacaggcatgagccaccacgcccagccaaaaaaggaattatatctgaatttcttgatttcactgagtttaactcagggtcccatcctccaaggtctatctcagggatcttttgccagcggagggtctttctcagcaatcactgtgacttgtggggaagggctctcccaggtccacgattagcagaggggctatctggattctccacttataatgagggctacttcagggacctctgtggctgtcagaggggctgtctcaaggttctctgagactgggaggaaggtctatctcaggaatgtttatgtagaacagagagactgtatctgcggtcttctcatatattggaagctatgtcaaaggcatactcacgttaaggggactatctcaggaatctactctgtgactactggaaggaccgtttcaggacccccatgataaacacaggtaccatttctgggcctacccttatcttggaagctatgtcaggggtctgccttcctaaagggttcagctcaggggcctatgcctagtggaggggccatctcagagaactttaggtctggggtcatagggtttttccataaagggccagatagtaaatgtttcaggctttgctggccacatatggtccccattgcaactcttcaactctgctgcatgggagcagccataatgatatgcaaatacatgaatgtggctttgtaccaataaaactttatttaccaaaataaatgtggccagccgggtgcagtggctcacgcctgtaatcctagcactttgggaggctgaggcgggaggatcacttgagttcaggagtttgagaccagcctggccaacatggggaaacctcatctctactaaaaatacaaaaaattagctgggcgtggtggcacccacctgtagtcccagctacttgggaggccgaggcaggagaatcgctttagcctgggaggtggaggttgcagtgggccgagatttcgccactgcactccagcctgggtaaaagagcgagactcctgaggcagggcacagtggctcacacctttaatcccagcctttgggaggccgagtcgggcggatcacctgaggtcaggagttcgagaccagcctgcccaacatggagaaaccccatctctactaaaaatgcaaaattagctgggcgtggtggcacatgcctgtaatcccagctactagggaggctgaggcaggagaatcgcttgaaccctggaggtggaggttgcagtgagccgagatcgcaccattgcactccagcctgggaaacaagagcaaaacttcgtctcaaaaaaaaaaaaaaaaaaaaaaaggtggccagcctgatttggccagcgggccagagtttgctgtacatgagccctggggaaaggggtatgcgggggtcttaggtttgcctgagccttctccgtgcccccctcacccccggcacccctcccctcccaccaggatcctgcgcatccagaaagagacgcccacgctgcagcggaaggagcccccgcccgcagtgctagaagctgacctgaccgagggcgacctgg

SEQ ID NO: 97705 - DNA, 42929 bp, Homo sapiens
tttttgagatggagtctccctctgtcacccaggctggagtgcaatggcgcgttcttggctcaccgcaacctttacctcctgggttcaagcaattctcctgcctcagcctcttgagtagctgggattacaagcatgcaccaccatgcccggctaattttgtatttttagtagagatggggtttctctattggtcaggctggtctcgaactcccgacctcaggtgatccgcccacctcggcttcccaaagggctgggattataggcgtgagccactgtgcccagcccgtagtgtaatttatactcacagcacatctcttgtgttttttggtcatccaggctggagtgcagtggcatgatctcagctcaatgcaacctccctgcctcctgggctcaagccactctcccacctcagcctcccgagtagctgggattacaggcatgggccaccgcatccagctaatttttgtattttttgtagagacagggtttcgccatgttgcccaggctggtctcaaattcctgagctcaggcaatcagcccacctcagcatccaacagtgctgggattacaagtgtgagccaccgcgccaggccatcacagtacatctcagtttggtctagccacatctaaaatgctcaaccatcattattaggcaacacagctccagatctttcccttactccgagcttatggactgactttaagatgaaataagccccctccccccaaatctttacccatttgccaaagaaaggactgtccaggcccttaaccagagtctaacaggtggaaactacctccttaaggcatacagaactactcaagggatacctgttttgagggtgctgatgtaaattcccattgcttctcttagaagtttcaccccttcttccttcattaaggccacgagatttgtgtcaggctcatctttggcaaggctcacactaatctgggtgaaagatgagaagtaggtggtaaataacttgaggggcaccctcattatggaatgtgggggctgagcaatcaggtgactgctgacatttccaaaggaaatgcatgagtactgcggtattcgtacaatccccattagtgttccttcttgagtcctctctgtcaagtggctaatgttagttagaacccatgtcactagctaaagtgaagaaattaaagaagtgcaaattgctctagaagtttccaacggcaccatatgcctagaaaattatctgcaggctagggttctgaatgcttggaccaagcctgggctatgaatcctgaatgacaggtcacttttctcatctgagaataagaggatatagaggactcggattaggagttatgaagcacaaacctccacttcatccacgctgttttcatcagacaaattggggatctccacatgtcctttgtattgtactcctgacttagaagtacctgtcaaaaccaatgcaatgtcattagtccactccttggcaggaaaggtctctgctccagggtcctaactgctacctcacttctgctgcttttggatggctgaactgatcctctttattctgagaatgccacatgccagatgcaatcaacacccgcacccccaaaagaaatgtctttcctcaccaggttactggaaaccaactatgttattacaatgtgggacaaagagctacagatttggtactagcatgagttataccatgagaacttgggtcaaaagccagtagttctgctagaatacttgttttgaaaatatcaatttatttcagtgcaactgaaatattagggaacaatttgattataatgagaagttcatgtttgcttatatgtgactccatccatgagaaacactaggtgaatacggaaagcctcacccagctacacaggatacataaaacacacacatctcaaacacctatctgccaatgacctcagtttacagcgtgtgttgtgagccatacccatcctcaacgagtgtaatgttccctctgattgtggatgactctccttctaccattccatagtagtcctcaagctgcaacccttctgatgcccaccttttccccccgcaagacagagtcttgctctgtcgctcaggctggattgcagtggcatgatcttggctcattgcaacctccacctcccaggttcaagcaattcttctgcttcagcctcccaagtagctgggattacaggtgcgtgccactacacacggctaatttttgtattttttagtagagatggggtttcaccatgttggccaggtgtgtctccaattcctgacctcgtgatccacctgcctcagtctcccaaagtgctgagattacaggcgtgagccgccgcgcctggctttgatgcccactttcacaaataaacttcaggtctttttcatggtaaagcaccatatttattgtagtattcacctattttttattttttttgagatggagtctcactctgttgcccaggctggagtgcaacggtgcgatcccagctcactgcaacctccgcctcctgggttcaagcgattctcctgcctcagcctcccgagtagctgggactacaggcacatgccaccacgccgggctaattttttgtatttttagtagagacggggtttcactgtgtcagccaggatggtcttgatctcctgacctcgtgatccgcccaccttggcctcccaaagtgctgggattacaggcgttagccaccacgcccggcctatatttatctatttcttaccatttaatgtgcacaaaactatgctaccaatttttagtccctatattaaaaaaaaaaagcgtcggccagacacagttcgagaccagcctggccaacatggtgaaacccatctctaataaaaatacaaaattagccgggcgtggtggcgggcacctgtaatcctacttgggaggctgaggcaggagaactggttaaacccgggaagtggaggttgcagtgagccaagatcgtgccactgcactccagcctgggtgacgagcaaaactctgtctaaaaaaaaaaaaggaggtctgagcaagatgacaccgaagattccttccacactactatgcttcgagtgtactttaaaaacaaattaacaaaaatcatggacagatagatctacttgcacccttctttatgatatgactgttcacttcggaaatgtttatcaaagcacaaatttcatgctttgccccatacacagacagtagctatctcatactcccttagctttagtgcctttttacattcaggctcccgacagtcaggactgtccaaaacggtcatacgcatgacctcaattttttcctaatgtcatacacaagggacataaaactagaagatagataaaacagccccaaattactgtcacacacaagcttcattagcgcagtggtttaatctgttaagattcacactgaagacagtgcacaaagatcaagaccaaaaaaatcctctccttcctccttttaaatcactcacaagatacatgtagctagtctgaagaaatatcatcgtaggtgtcccaacaaagaccaaggcccaaagatgcagtggcccggccacttcatggatgggacttatgagacccagacacaggaaatccatttagcatcccacaatggcaaagaaattccaggactcgatactgctttacataggactccaaagcagcaacatctgccttctcccttcaaggtctgtaactcctcaaaactgttctctccagctacttaacaggttaaacaaaacacagttaatctctctgacagcccagcttagacttacctgtccagtttagtttgacgctccattcataaaagaagataagtttccctttgcgattgttaatggatgcctctccatcaagcttactcacttccgtcacctcacacttgccttcttcattttgaacctgcactgccaggaacagtgttttcagcttatccgtggaccaatttgaagcatctctctccgtcctgcaaagcagaaacagagctatgaaccagcagtcaaacggaggatacgctgctctatgcaagagaatacgaggttaaaggaggcctgacaaatagtttgaaaagaacacaaaaactcccagtcgcactccagtatgtccacaaacatgtcattcttttttaggaagacaaggggttgcacactgtcaacaaagacagctgctgtagaaaatggtataaactcaatggaaaattatgctctcctttctcggcatgatggtgcgggggaatacttgatactttaacatggcgcccccatttgaccaagtggaaaactgcacatattgctgagatcaggaacacagactggaccatgaaagaatagtacttagctaaaaggcccagaaaggattaaaccaataaccctgacctcattggcacggtgttctgacctatcagattcgcacttgcattataaacttcctacacattcactgtcccctagatggccacaaaaacgttaagtccagggcttcaaaacaaacaacaaaaattaggtcaagtactctgcatgttaagaagagagaatacaaagtgagatatggaaaagaaacatcactatctgccttcctacttatcaactattagagaaaacaacagcaaaaaaggctgcaacaaagtaacggtacaatacaaacattacgaaaaaagttcagtggaattcaaaaataaggaaactaatattactttgggaagatttcatgaaggagggcagttattttaagaacggtcaggttataaaaccacggctgctcggcaacctggagttccaacacacccgacctgatagttccgggtgagaggccgcagctatctgagctctgagcacctgcacaacacgttctcaatctcccgcgggaccgctgcagcggtcccctatgaatgacttttaattttaccgcaggccgcaaaataggaattacagacccctggccttaggcctttcacagctatctcccaacacaatcaaaggaggttccagtctcagtgactcctctggccacgtgtaataagcacctccctgctcgggctggatgcagcagccagggcgttatctcctagtctctctgacaaccctcctctggggcgcagccctccacgtccatctccctcccctcaaacactgagaaggtgaccgcggagtggagaggcctggggctacggacccctgccacaggaaggacccacccccatctccggacagggctacctcagccccagctctgtccgggccgaggttctaggaaccctgaaaccctggcccggccgcaggtctcccaaggccggcctgcttttctggccctcaccagtgccagttgttgacgttggtggcgtccgcccgctcctccacgatccagcgtgggtctccctcaccccacttggccatcggctctcctatcgcggcgccaccagctccggagcagccgtagccacagcctcaggaccgcttagtgccagccgcccggcagcgcctggaaactactagaagcggccgcaagcacctcctggcttgcttttccctccaccccctcccctccttaacttccggctcctccccactcccaccggttacttccgtcccaactcgccgcaccgtgggttccgcctgatttagagatccttcagactccatcgggttctccccaaaaagcgtcccgaaacccaactgctcatacaaccattcctcacccataggaaaacaaagaacacgtctcattgcttccctggaccctaaatcgcccttgctgagcctcatgggaattgtagtcttgctacgtgactcgctggataaccgcggaaggtctcgcggaaaggagaggaaatgacctagcacggtgcttggggtttctgggggctgtagtcaagaagccttgtggttcgtcgggacagcgcctgacagcagaggcagaagaaactacgacttccagcatgccctgcggtctcgttattcgtgttttctctccgccctacgattattcccttccgcccccttctctaagctgcacagcctgaatagaagggctggtccagcggcgkcggaggctggcgctgtcctgagagggagggctctgtgcggaagaggtgagggtgtcccaagccccttgggtcgcgtatctggstggatccagcctctccrcatcttgatcttttcccctcttctaggrggcatccctacaccctatgactacaggcctgattctcttctttcagtcagggcgacccttgggcgctggagtacgcttgggactggggctgcgagtgagcaccagcgattggttcggaagcggacatttggttcagaacgagcatttaactctgccagggatccgctgggctctgacgactgcggtagatccatggcttcctggacgttcacccgtagagtcatcctagcttaactcttgttccctggtctcagttcacaagcctcacctgtatcttcctggctcggaagataattgaaaccaagtctgacttctcagtaggtggtttttggagttttctgaggcagggagcatgttgtggttttcttgctgattcttctgttttcctttgtaaagttcctgttctcccctgaggtctctcaccctgccttgtgggctgtcagtaaacaagagacgataaagacaaacctctgaagtattttaaatcatgttgaagcacctgtcactcttaagagtgacaatcgtacctgattactttataactctagagccactagatcattatctatacttgccaagtaaacctagcttctcatttggcgttataaatacaaattgatggcagttgtctactgccattgcatggttaaaaagattccagaaatcctctggtagattattgtgtttgttagacasattctatgtctatctgtagataattactrtagtgaaggaatgatctctagttttctggaaagtgaaaaataggtagaaggaccatgcaagacactagaaatggtmtaggagccagaaagcctggattgtaatttgaaataggagcatttaacaaagtggctttgatactgaactcttttgtgcctcactttccccatgagtaacatggaaatggaatctcccaggcctaccttacargattgttctgaggatcaaacgaatgacagagtgatttatgaactgacatgtgtgccagagacatttatatgttctatacacatcttcagcatttgtggctactcagaatttttgtattttttttaatctttaggattgctaaaaaatattttcttttttagcttttcccaaggtaccaggatgatgtattaataataaaagttactattgagtgttaattttgggtcaggcactaagcactttacatgtattaactggtttactcctcagaaccatttctaaggtaggtcatctgttatgcccatttaacagacgggaaaaccaagacagaaaaatgtcagtatgatattccatattaaaaggaaataacatttagtatttactttctgctagacacttttatagatgttccctgcaaccctgtgagataggatataattttctccaaggcttagaagtaaagtcatttatccactttgctcagaattaagagaaaccaggatttgaactcaaggttgcctgactacaatgtctgtgtgggatgatttcatggtgtctgccagcatttttggtttatctccctaaaattaaatacagaaaaggatttttaaacaaccctgtaccagtagaaatcaattagtgatgtctgccgtgagaagggaccagatagtagaaaatccccacaatacccttgctatccctatatcccctgagttgaaaacaaagtcaggaagtaacagtagagtatctttaagggctatcaaaagcctcaacaggactaccatgacaaggcttttctcaagcttttattgatgaaggtgctattaaaaggaaaagcaaatggttcttttagaacttgatgctgtttagcctttacagttatttttggtgctgtgggagttttatacccagtccttggcttaaatcatagttttcattctaatcctgttggcattgatagtttactttgtaattctgtttccttatttggagatagggagggtctcactgtgtcacccaggctggagtgcagtggtgtaatctcagctcatagcagcctcgacgtcccaagctcaggtgatcctcccaccttagcctcccaagcagctgggactacgtcaccatgtccagctagttttttgttttgttttttaaatttttttgtagagacagttttacaatgttgcccaggctagtcttgaacttgggctcaggtgatcctcccacctcagtctcccaaagtgctgagattacagatatgagccactgtgccctgcctagtttgtaattctagggcaaaacttgtttttgcagggcaaaattgaattttatagtagttataacagggacttgtggtcttttgactacttctttatatacttgcttttcttggccatcccctcatttctcaaattttggccaacagttgttaataaaatagtcataatttgaagatttaggtgagataattctgcttcttttaattgctttgctttccgttctttcaggcatttaaaaagcatacatgagggtggaatatttgttcattcactgtagtattcccagagcctagaacagtgcctcagagatggtgctcaataagtatttgttgaaaatgtgaatgcaatttttgtctgttttgtgcatgttctgattgctcttccttgtgtattcagcaaagttttttgatagattcttatagcatttgcctgccttgcactgttgcttttaatacatacctatgctgaatgccctagctctgttgtagggtccccacgtctgacacttttttttttttttttttttggagacggagtttcgctcttgttgcccaggctggagtgcaatggtgcgatctctgctcaccgcaacctctgcctcctgggttcaagcgattctcctgcctcagcctcctgagtagctgggattacaggcatgcgccaccatgcccggctaattttgtatttttagtagagacggggtttctccatgttggtcaggctggtctcgaactcctgacctcaggtgttctgcctgcctcggcctcccaaagtgctgggattaaaggcctgagccactgcacccagcctctggcacttttttatataccttacaacacctgagagagtgccctggacaaagtggatgctcttaagaatggatgactacttatgggtaattagaagattagaagtatgatttgatcagttggagacccaagaatctggttttatatggcaggttcaatatttgttttaccagattcttttctgcatcctwgatttttgggatcagttagtggtgcaggaaactaaagcttttggaactctttagggagagacccagaaaggggcaatgtatgttttcctgtcactgtagatgaatcggacaaagggtgatgaggaggagtattggaacagctccaagttcaaggcttttacctttgacgatgaagacgatgagctttcacaggtaggtcaactgctgaagtttrtactcttctccacagtgccactataaaattccttcctcttgcattctgggtaactaggcttttgaccatgtatgtcttcattaggytcagaaaagagccagaaggattgtaaaatccagctcactgcctttcttactttacctttttaagatgatttattcctacaggtttttttttcttttgaagaaccccaagtcttttatttatgtgatatatatttttttatttttgaaagatgaactggattggaagatttatctttgttgtgtctattttgcaattgaggaatcatttatttttagagaggtgaataaattcactcaggtttacatagcaagtcactgccaggaatatgatgagaattcaaaagtgactttgattcctcctaactcttttatcactggactgtagtgttggctaaaaatcagtttgttttcttggcaaatatgtagtatgctaggctttcgattgcacagggcgagtgttggccaccttcaggccccaattcctcagccttcttgattgtcagaagagaggtgggaaatgatgatttgcctgagcaccctagccttgtgtccctctgcagttaaaggagtccaagcgggcggtgaacagcctccgagacttcgtggatgatgatgacgatgatgacctggagcgagtcagctggagtggggaacctgtgggaagtaagtagaagagtccctaggcagggatagatgttgaggattcttatcactgatraaggctctacttgtttgtttcttcaatgctagttaggagagggactaggataagactattttcagakaagcatacatctggaaacttaactccaggagaagatacttgggaaatccagcaggagttcccacatggctatataggtctgctcttcaggggttgactcttrgctggctatttcattctcatttggggtgcttgttaaaatgacatactcctaggctttatcccagagattctgttcattaggtcttctgcggagtagagggggtctcaaattttaataaacactgcaggtgattctgatatatagccatatttgggaactactgacttgactcagtatactaataactgattgacagaacggacttccttacccaccaagtctcactgcttagctgtatatgataccacttaatactttttcagagtccatttgattttttttttttttttttttttgagatggagtcttactctgttgcctagtctggagtgcaatggcgcgatcctgactcactgcaacctccgcctcccaggttcaagcgattctcatgcttcagcytccctagtagctgggattaaaggtgccaaccaccatgcctggctaatttttgtatttttagtagagatggagttttaccatgttggccaggctggtcttgaactgctgacctcaagtgatccgcctgccttggcctcccaaatgctgggattataggtatgagccaccatccctggtccccatctgatttttaagaaatatttttaattgaaagtttttaaaaaataggccatactataatgtgactaaagattaaaaaaaaaaaattaaaggtctacagtgaaaagtttccgttccatattgttatgtatcttctcagttttcagttcatgtcctcccaaaaaacaatcgttgcttggttcctgtgtattcatctaaagactctttttgcatctggaaaagtatatagaaacatgtattcttatcccatttttacacaagcagtagcatgcttcataccttgctctttttatgtgttaatatagcttggagatctttccatgtcagtatataaagagtgttctcattttctctttcttttttttaaatagcagcatagtattaaattgtatgggtttaccatcattttttagccagcccactgttgaattttagatttttcaatcttttgctctttatatttctatcattgactttatattctgaccatagatgcataaatgaaagagcaattcttagagtggaattactcacataggatgtttgcatctgtattgggtagatattgccaaattgacctccacaggggttgtaccaattcatactaccaccagcaatggaggagggttccagtttccctatagcctggctaacacggtattatcaagcttttggatctttccccatcttataggggactaatggtttctcattatatttttaatttgtagtactcttagcaaagctgggggcaggtggtgtgtgcctctggagggtagtggcgatggatggcttgaggccaggagttgaggctgacgtgagacatgactgttagatatgattgtgaatagccactgtactccagagctccggcaatgtagtgagaccctgtctctaaaaaaaaagaaaaaaagagaaaaaagagtaaggttgagcatcttttcatatgttgaagagccatttgaattttctgtgatccacctattcatgtccttggtccatttttctgctgattagtctatttgattctatcttttctccctgccccaagttggccaagggaccagggcttctggtgaaaagcttttagagtttattgaatgttggatgtcaaggctttattgtggatgagaattgctgatgtagttcttactatctcacaggtatctcatggtccatcagagagactgctggtaatagyggctcaacccacgaggggcgtgaacagctaaagagccgaaacagcttctcctcctatgcacaactacccaagcctacttctacctactccctgagcagcttttttagaggtaaagagagatgcttaaatggatagggaagtccttctctttttccagaaaaatcttaggccataattttcatttactttgtaagaaaaagattattgaagggtaaagcattctcatyggaggtggcagctgggtgttaggagcgagataaatgagagaaattcagaggagttggactggttttctatagcatgatgaatgaaattgacattaaccctgtgactggtactgaaaaaatttgcctagatcaaaattcctccctactccttgtgcattgctgttggaaaaccttgttggtgggaatgccaaatggtgcagccaccgtggaagacagtatggtggttttttaaaaaaaattaaacagtaaacatataactggctaggcgtggtggctcacgcctgtaatcccagcacttttgggaggctgaggcaggtggatcacctgaggtcaagagttctagaccagcctaccaatatggtgaaaccccgtctctactaaaaatacaaaaattagcygggcatggtgggggcttctgtaatcccagctgctcaggaggctgagggaggcagattgctagaacctgggaggcaaaggttgtagtgaaccgagattgcactactgcagtctagcctgggtgacagagcaaaactccatctcaataaataaataaataacatatgatctagcaattttacttctgggtatatctcaaaaagaatggaaagcaggtacttgaacatatatttgtacctccatgttgatagtagcattattcacaatagycaaaagatggaaacaacccaaatgtccattgatggatgaatggataaacaaaatgtgccatatacatgcagcggaatgttactcagcattaaagaagaacgacattcccatacatgctgccatatggatgatccttgaggatgtgatactaaataaaatgaggcacaaagggacaaatattgtatgactccatttacgtatgacctagaatagtcagattcatagagacaggaagtagaatggtggttaccaagagctggggtggagggaatggagagttattgtttaaagggtgtagagttggttaaagggtagagagtctcagtttgggatgatgaaaaagttctggagatggatagtggtgatggttgtacaacagtgtgaatgtacttaatgctactgacttatacacttaaaaatggttaaaatggtaaattttgttatgtatattttaccataattaaaaaaaattttctccctgctccattttttaatggcacttcagatttctacagatgaataaaaccttttttaagccttragttcctatattgcgttattgagttggttacacattgtgtctttaaccaagcctggatggctctgattgaaactgttgaccttttccctcttgtgttctttacctttaggtagaactagacctggaagtttccagtccctttctgatggtaggcattgaaccctcttttaattgctgtgggaaatgttactgatctggtacagtctggggagttatggggacaggtagtaattagatgacaagatgaactttcttctgcatctactgtcattattagaggaattttctgatactgactaaggaggtagaaatcattctagctacaggggcaaaggtgacttctagggatgctgtctttggggaagaayggagatctgcttttggccataaagttaacattgggagcccacaagtcaaaaaaatgtgagaasgaagaagtagagggaaggaatgacaagcaggattcatggtgcccttctgaaccagctgcttattctttttcagctctgtcagacacacctgccaaaagctatgctccagagctggggagacccaaaggggagtatagggtgagttacagcatacactggtgtgacactttccacagtataaagtaccttgacatatgttacctggcttgattttcccaactatttgagtagatatttttttaaccctgttttatagattagaaaactgggyttctaaacatgagggcttacctggggtctcagagctgggaaagggtgcaacttagacttataatctctatattctgactcagctctgccatactttgcttactcattatgctcccacttgaaggctgtactttgaaacccagtgatcatcactgcagtctggaagcctggtagagctcatattcccatgaaacaaataaagcaaattgattcataaggaagaaaccatatcctaaggtcggaaaaggaacatgtctccaacatctctctctttccttctgttggccaaaggcattaattgttagaatcctaaaacgtgattctaattcatctagaggttgcagtcctgaactggtaggcatggggctactggctttgtcaattggctcctccctctttgatccatctcctcctatctatattgcccctgctctagttccttcagaaactcaaaacaaaaccgtcccatttcttcatttttttcacatccattccctcccacaaaktatttcccccttagacactaagactgagtttgagttgaggagcgggtaygctgataaatttgattccttaacttcctgggattcacgtattgctaatattccaggattacagcaatgactggagccccagtgatacagtgcgacgtctccggaagggcaaggtaaggacagagaatttttgtgaggttctttgggaagctgggcagcttgttcacacagggaagatttcttgacctctcttcagtyctcatttgttcaatgaatttcagggggaaawtaaatccactaaggttgaaagtcagtggcaaaatttctgattctccrttactgttgctttgatggggtagtggggaaagagtgatggatgagagggaaaagtacatttaagagtgagaggccagggccaggggtggtggctcacgcctgtaatcccagcactttgggaggccgaggagggtggatcacgaggtcaagagatcaagaccatcctggccaacatggtgaaaccccatctgtactaaaaatataaaaaattagccgggtgtggtggcaggcacctgtagtcccagctactcgggaggctgaggcaggagaatcacttgaacccaggaggtggaggttgcagtgagctgagattgcaccactgcatttcagcctggtgagtgagactccgtctcaaaaaaaaaaaagagaagccgggcatggtggctcacgcctgtaatcccagcactttgggaggccaaggcaggcagatcacctgaggtcaggagttctagaccagcctggccaacatggtgaaaccccatctctactaaaaatacaaaaaattaggcgggcgtggtggcgtgcacctgtaatcccagctactcgggaggctgaggcaggagaatcacttgaatctgggaagtggaggttgtagtgagctgagatcgtgccactgcactccagcctgggcaacaagagtgaaactccgcccccctgcccaaaaaaagagagtgagaacaatcttttatgttagatctgtgattcattgagttcatttttgcatatggtgtgatgtaagggtttgagtttaattgttttccccatgtagatctccatttgttccagcactatttgttgaaaaaactatcctttccccattgaattatcctgctgatgcttttgttgaaaatcgggccagtcacagtggctcatgcctgtaatcccagaacttggggaggccaaggtgggaggatctgtcgagcccaggagttcaagactaggctgggcaacatagtgagaccgtgtctctacaaatgataaaaaaaaaaaaattagccaggtgtgcggccgggcacggtggttcatgcctgtaatcccagcactttggaaggccaagacaggcagatcacctgaggttgggagtttaagaccagcctgaccaacatggagaaaccccgtctctactaaaaatacaaaattagctgggcgtggtggcacatgcctgtaaatcacagcttctcaggaggctgaggcaagagaatcgtttgaacctggtggccgagattgtgcaattgcactccagcctgggcaacaagagcgaaactccatcttaaaaaaaaaaaaagccaggtgtggctaatttataatataaatgtatattataatttataattataaatatataaatgtaacttataatcttatagcaggatatgtttttagtcacagttgcttgagaggctgagatggaaggattgcttgagccctgaaggtcgaggctgcaatgagccgagattgtgccactccattccagcttaggcaacagagcaagaccctgtctcaagaagaaaaaaataagaagaaaattaatgatcatatatgtgtaggcctatttctggactctttattctagttcattggattatttatccttaagctaatactacagtcttgattattatataaatgttgaaatcaagatacttcaactttgttgaagctttcaaccttcaatgttgttctcttccaaaattgttttggctgttctagatcctttatacttccatatcgattttagtagcaccttggcagtgtctacaaaagagttgttgagatttttattgggattgccttgaatgtacagatcaatttkggtagaattggcaatgatcataataattaatggatcaaaatggatcataatgccaggtgtggtggcttgtgcctataatcctagctactcaggaggctgaggcaggaagatcagttgagccctggaggctgaggctgcagtgagctgtgattgcatcactgcactccaacctgggcgagagagcgagaccctctctctaaaaaaaaagcagataaaatggattatacttcacaggttctaaggattgggaatgaaaaaatgaataaataaaatggatcatagacctaaatgtaaattaattgttaaagctataaaacttctagaagaaaatatagacgaaaatctttatgatcttgacttaggcaaagatttattacctaggacacaaaaagcatgaaccataaatgaaaaaattgataaaatggacttcatcaaaatttaaaacttttattttttttttagaaaccactgttaaagccatgaaaggaccaccatagctcagagaaagtagtttcaaaacacgtatattataaaggactttcatccagaatatatataaaactttttttttttttttttgagatggagtctccttctgtcgcccgggctggagtgcagtggtgcgatctcagctcactgcaacctacgcctcccaggttcaagtgattctcctgcttcagcctcctgagtagctggaattaacaggtgagtgccaccatgcctggctaatttttgtatttttagtagagaggaggtttcaccatgttggccagactggtctcaaactcctgacctcaggtgatctgcctgccttggcctcccaaagtgctgggattatatgcgtgagccactgtacttggccagaatatatatacaacttttattaaacctggcaatatagcaagaccccatctctacaaaataaaaattagccaggtgtgatggcacttacctatggtcccagctactcaggaggcttgaggtgggaggattgcttgagcccaggaagtcgaggctgcactgagccatgatcatgccactgcactccagcctgggcaatacagtgagaccctgtctcagataaaacaacaacaacaacaaaactcttagcttagtgataagtacagtctgataaaaaaattggcacaagagttgaccagacacatcacaaaagaagatacatgaatgaccaataatcactttaaaagatacttaaaattatagttatcaagaaaatgtgagttgaaactatgagatactggctgggcatggtggctcacgcctgtaatcccagcaccttgggaggccgaggcaggtggatcacggggtcaggagatcaagaccatcctggctaacatggtgaaaccctgtctctactaaaaatacaaaaaaattagccgggtgtggtggcaggtgcccatagtcccagctactcgggaggctgaggcaggagaatggtgtgaacccgggaagcggggyttgcagtgagccaagattgcgccactgcactccaacctgggcgacagagcgagactccgtctcaaaaaaaaaaaaaatcactgaactatatacttaaatagggtatgttttactgtatgcaaattatgaataagggttcttaaaaaagaacaagtgattggctgggcgcggtggctcatgsctgtaatcccagcactttgggaggctgaggtgggcggatgacgaggtcaggagatcgagaccatmctggctaacacagtgaaaccccgtctctactaaaaattaaattactaaaaaaaaattagccgggcatggtggcgggcacctctagtcccagctacttaggacgctgaggcaggagaatggtgtgaacctgggaggcggagcttgcagtgagccgagattgagccactgcactccagcctgggtgacagagcaagactccgtctcaaaaagaacaagtgatttctgttgactttatcaagacttcaggacattagcatcttatagggcagcaggctgaactagagagggtggtgggagccaactgttttataagtgctggggaccatagggtaaaaataaagagactctccttggggacattttgtttcattattgcttattctttagtatccagcaacaaaggaataaagaaaactgtcttcttgtrtactaattctagtgttattctgccaggtttgctcactagagagattccgctccttacaggacaaactacaactcctagaagaggcagtaagcatgcatgatggaaacgtcattactgcagtgagttgtcggatttgttgttgtttgtttaattattgttttcactagtttctgaaaatccaatcaaatagactaacattttgtgttaaatgttaagtaaagatcctggattccccttggaggtgtaggattctaagtaatctgtgctttaagggcttagctggtgccacatgcactaagcgtggaaccctgtttttttttttttttggagacagggtcttgctctgttgcccaggttgaagtgcagtggtgtgatgatggctcgctgtagcctcgacctcctgagcttaagtgatcctctcacctcaggtccccgagtagctgggaccacaggtgcataccaccattcctggctagttttttttttttttttttgagatggagtctcactctgtcgcccaggctagtgtgcagtaggacaatcttggctcactgtgtgatactcctgcctcagcctcccaagtagttgggattacaggcgtgggccaccatgcccagctaatttttgtatttttagtagatatggggtttcactacattggctgggctggtctcaaactcctgacctcaggtgatccaccagcctcggcctcccaaagagctgggattataggcgtgagctaccacgcttggccttgcctggctaatttttaaatttttttgtagagacagggtcttgctatgttgcccaagctgatctcacactcctgggctcaagtaatctccctgccttagcctcccaaagtgttggaattatgggcatgagtcaccatgcccagcctatgtgaaaccgttgattgtaaccaagacacacaagrttggctactatgtgttatataaaacaatctgagggagaagagatgtgagcgtatcctctttcagagggaggtgtctctcagcagcatgggcacrggtgtgtggactctcaagacacagctcagttccagatagccattggctttccttgcatcacatacagagctgttggctataccttcagagattgctaatgagttgctggccccgtgtctgtagtgctcrgggcatgactctgtgttggaaagtttgcacagtctttgttcttttttcctgtaggttctgattttcctgaagaggacactgagcaaaggtgagaatggcttgcaggaaatcttcagtcagcaaggtgtctgccacattcgaggggagaatgccatgtgcctttcataccagaattcattagtcaagtctatttcagagacaagtggggtggcctgagacttcagagcacaaatcacatctctgagggcgtcctttagggtgatgactacattaaccacagagccccctcagatggctgtgttggtttgaagaagtcagagtccrtgctaagtgcctgctgtttgggttggtgtgaaatgaaaagctgatttaatggctatgagctgagtgtgttgatggtgaattaagwcataggggtaaaccattcttagcttttgttagggtttgatgagataatatttggaatgtgtgagtagggagaccaatttcacacttgactaattggctttaatctttctcaacttaactcctgactgtctgacagagatcctcttccgagagctggaggtgcgacaggttgccctgagacatcttattcacttccttaaggaaataggggatcaaaagttgcttttagacctcttcaggtaagaactgatcatctggtctataaagtttagtaagtacttgtttcaaagcactctgagggatacaaaggaatagaagacgccaactgcccttttcctggaagtgcttggaagacaagctattgaagtgtgaggggataactagcagtacagcatagcttatgataaggtgcaagttggttaagaaccaggctttggagtcacatgcacttgggttgaatgctattataggtctcccacatcattcattgagtgaccttggccaagttatcaaccctcttcatgagtttttcacatcgatcaaatggagatgaygacacctacccacagggttattatgaagatgaagggctagtatgtgagccagcacttagcataatacctagtttgtagtattagtatttattaagtgttttcttacaaaagacctagaataaaggtatcttttattacttgattctaagtgataccagtgggaagtacagtagaagagaagaagaaaatattttcagtcaggatacccagggaaagcctcatggaagtgattaggatttgcatgggcctatgaaactaggtaggattctgataggtgagaggtaggcatgtctgctgggggtaaagagggctgaggtcttctatcatgtttttcttccctctaattccagtcagtggggactatttcccacctttggattaaaatatgtgcacatgatgtcttttcttcagtgtcagagaaagggttagaacctctgtttagactgacatgtggcccaaggtgactgatatccagtgactccagcacagcaatgagctccccaaaagactgaggtggggaaaagcaggttacctggttagggtcaagattacagatgttagccaggaatttgcaaaagaagacatggtcacagaggctggctgcttcctccctccttccttccctcccttactctttcccaaccaacagggctttatcaggcatcacctccatgccaaaatggtaatgttaattatggtggtctattcagagtaaagaagaatcagaagacaaaagtcctggtgctccaaggtctgggggagacaaaacacattgtactctgtccatgaaaacagtaaagaacaatatagaaaatctgttttcaagattgtattgacagagaatagtgctttaatcttaggaaaaaaaaaaacaacaaccaagttttctgtgggctagagtaggtggctctgagcctccctgtcagaactgttaacaaagttattagttccttgcagtaccttcttgtccttgctttttgttcagccagagagaccaggggaacaatgatatctgatcaaccatttatcttgtgtatagagggaaatgagtttgaattgtgtttctcctagaggaggcactcgattttgtgaggttatactgccacacatcaatagatacaaatgccctgctcccttctgcttcttcccaggttcctagatagaacagaagagcttgcggtaagtgtggcctttgtttcagttgggtacctgtttaacagaaatctaggctgggcacagtggctcacgcctgtaatcccagcactttgggaggccgaggtgggtggatcacctgaggtcaggagttcaagaccagcctggccaacatggtgaaaccctgtctctactaaaaatacaaaaattagctgggtgtggtggcacgcacctgtaatcccagctacttgggaggctgaggcaggagaattgcttgaacctgggatggggaggttgcagtgatctgagatcgtgccattgcactccagcctgggcaacagagtgagactctgtctcacgaacccagaaatctaagccaaacccccgcctccaagatcccagactgattgaactatttcctttgatattgattatatacagaagagagaggcacctggaaaacctgaaaacttaatccaaatgatgtattctttctttttrtatgctcttttggttgggcttatgaataaattttaaaaaataaacatgtgaaaattggcctggtcaatttgtaatttgtttttcggttgttttcaggtcctggttgttaggagttttggggttttggcttctcacaaagaaaatgttgaaggctaagaggataagaaaccagatataggtcaagaaggaagataggtcaagttgatgatacacccaatacacgttttggctgagaattcaatggccaggcgttaagattaaattttggcagattttcacaatcatggaatgaactcctggaatacaagaataaatctgaaattttaccaaaaactcagttgtattattaaaacttcagcaattcatgttaaaaaaaaaaaaaaaaacttggcaggaataagaatttccagccaagcacggtagcttatgcctgtaatgccagcacttgggaggctgaggtgggaggaacactagagtccaggagttagagaacagcctgggcaacatagtgagatcccatctctaaaaaaaaatttaaaaaattarcaaagcatggtggcgcatgcctgtagtcccagctacctgggaagctgaggtaggagaatcgcttaagtctgggaggtcatgtctgggtgaaagmatgagaccttgtctcaaagaatttctcagcactgtcgatggcaggattgcttttttagttattgtacaacacatttgtgatatccatacagacattcagttggcacattaaatattgttaacctttgaacagcataattatatatataatactgaaaatgcttttcagaaacatggtttttttttttcgagacaggctggagtacagtggtgcgtgatcatatagtttactgcagactctcaattcctggctcaagccttaggctcccaagtagctgggactacaggtgcacacgaccacacctgactaatttttaaaaatctttttgtagagacgggggtctcactttgtttgccaggctggtcttgaactcctagcctcaagctatcctcccaccttggcctcccaaagttctgggattacagatgtgaaccacctcacctggctcagtaacatgttttctgaaaggaacttgtacttaatattcaaagcatgagagaatctgaaaaatccattttcttaatcaactaaaaatgattggcagcctgtagtaatcatttgaaaagctgtttgtttatatttttaaatctctgtaagttcaaaactataaggatttttcttcttacagcattcttataaagttttttgttttgattttcattagtgagaataaatgtgttttgggtaactcatttttatctaaaactttattttctttatactcattatgttcraattgaagatgatttatcatgcatgttgttgtatatagattttgagtttttcaaccttgtaaactttggaagtggcaaagctgatagtacacttttagtgtatgcccacagaatatgaaggtttcccatgtagaacttttcttgaaagacctaaggatgaaatggaattgaataacaaaaaattaactatagctcttaaaggttactttctttaatattaggaatgattgtataccaactattttatatgaactattttacgaagattggattacgatatgtaatttctgttattctgtcttatgttatttacatttttacatttacatttttatatacatttacatttttgtatacatctgttggctcaatctgagaatatttatgaacagtgagtcagaatgacatgccctatttatattactgatgttaattgttagatatttacatgatcatactaccattgatcatgtacatggtcaaggatgccaaaaataacactgaaataggtatttagctcttggacttttcaaaatctaaagctgaagcaaaatattcatttttggttaaatactgaggctaaagtgaaacttaaaggtaaagcttggtactctatctactcagtgcttcattataggtcagcactggccaatagaactttctacaatgatagaaatattccatatttgggccgggcgtggtggctcacgcctgtaatcccagcacactgggagaccaagttgggcaggtcacctgaggtctggagttcgagaccagcctggccatcatagtgaaaccctgcctctactaaaagtacaaaaattagccaggcatggtggtgggcacctgtaatcccagctacttgggaggctgaggcaggagaatcgcttgaacctgggaggcagaggttgcaatgagctgagattgtgccattgcactccagcctgggcaacaagagtgagacttcgtctcaaaaaaaaaaaaaaaaaaattttccatatttgtgttgtccaatatagtagctcctagtcacatgtagctgttgagttctttaaaagtggttagtgttaactaaggaggtgaatttttacattaattaatttaaatttaaagaaacagttgtagctagtggctattgtatcgtacagtgcagttatagataaacctactaatgatacttagtcactctttgcctatccccccacccgcctccaataaccatctatacccagaaatgaagaatttgtttttttaaagcatgggaagttcagttaatcagctatctccctcatctaaggagacaaaatacctcaaagcctttttctgctttttgtagctatctcattatcgagagcatttgaacattcaggaccctgacaaacgaaaagaatttcttaaaacctgtgttgggtaagtatgggggaraaatgattttaagtataaatacctttacccagaaggaatgaagaaaattaaaaagggtggaatggataggcaggaaggggagggctaacaatgaatcataccagcatcattcagggtcrcctcatgcagtggtgttcacacactagtccccagcagagtttccactgcttgatggtaaactgaggaaaaaaaaagacaaatgtagagagattttttttcctaaagctaaatttatttaatttgaaaggttatcttttattgtaggattttgtcctcactcttctcttcttctttggtactaaaatgagctgtacctttttttatgaccttaggtaataaaaagatagcaatactttagggacctgatgcattttttcagtgttactggtccttgaaaccccaaagtccaagaaccactgatccagggcaagctttcatccagaatttaacttattgcaaaacccagctccacatattcctgtgacaggatgcccgttgctcttgaaacagctcagtttgtttttgaacaaccttcgttattggaaagtgcttccttacgttaagctgaaatttgcttccctgtatctttcaagacaggtgtagagtctacccagtagtccttgcttcttcaggttcagtactcatggttgtttcaaccattcctcatgtgacatgatttcccggcttcatgtttagaaatttgattatatcagtgaaatccatttaatgttaccaaatactgagatatgttatatggcctctggaaaacaaggagaaaagttaaaatagtgaagtaactagaatttatagcatctctctttatctcttctaaaaattcactatggctaaaacttatctggaatagtgtaattaaaactcagaattcttcctggagtgagcagagtatggggaataatgcagcactttctaaaagatatatctgtgaactgggcatttaaaatctggcttctattcttggccttccccattgaccacatgactttttggcaagacgctgtccctcagcatcttcatgtataacaataatgtggccgggcgcagcagctcacgcctgtaatcccagcgccttgggaggttgaggcaggtggatcacgaggttaggagatcaagaccgtcctggcgaacatggtgaaaccctgtctctactaaaaatacaaaaataagctgggcgtggcagcataygcctgtagtcccagctactctggaggctgaggcaggagaattgcttgaactcaggaggtggaggttgtagtgagccaagatcatgccactgcactccagcctgggtgacacagagaaactccatctcaaaacaagcagacaaacaaaaaacataatgcagtgttgaagatgggacccttgacatytgtgatatttgctgatctataaacataccaccatggcatgtaatttaatttaccttttgtactctgccataaaaaaatggctaacaaatctaggtgtcccctcagtaagttaagcacaagccacagaatttcactgggatgtggatgatgggcagttgcctaggctcactcattagctttgtgactcattcaccaaatattccaactctcaaaatgagaggattctaattcatttatcagcaaaattatgagtgactataagtattttgtggactctcaggatccctcttgaattggcaaaacctttaatatgaaattcacgccattcaygcgatgtctttctttaagggacgctctaaaggtgaactgagatcagacttgtgaggyaccgtgagcctcttatacttatgctggcgatttggtttagttgggtttgtttccttgtttgaatagagaaaggtactaaccttctggcactctaccagtttgccattttcagcagaagattccgcacacatacaggaccattacacgctcctggaacgtcagatcattattgaggttagactcttcatctctatatcttttgcttcagtgccaaggctcagtgccgttcagcatctaggagatttctatgctctgcacgtgggtcatttcttactggtttctaaaagcctttcattttctgcctgtacacaatagcccccttcctccattgtttttaggatcctttttcctcttaccagctgttaacctggaagtatttcttcttcatcccgaatctcccatgtcctccccacttctatttgtttccatccaatgtggattcatgatcatttkatggattttaaactactctggggatatcctaggcaatttctttctttttctgttctttgtttctctcctagggtgggaaacacaactgctgtagtattaaaagatttttctcctgcctctactccatggacattgtttttttttttttttttcacttggctcactccaccacaggcaaatgatcgccatctagaatcagcaggacagactgagatcttccgaaagcacccccgcaaagcctccatcctcaacatgccactagtgacaacacttttctactcctgcttctatcactacacagaggctgaggtacaggcaaaatatggaagattccacaaactctcattgcacaaaaagaagatagttcaaatccagtacttttatgtactctattaataatgggtatgtatagttctcagaaatccacctggaagctttcctggccctcaccaggkgtaagagggcctcatctggccaggagggaaaagaggtttgtaaggtttgtagcttcaagtgagctggcatgctagcatagcaagttctgtccctggtgctgttacctgtagaagtctctgttcaaaggtccacaatatcaaatggattagcatgatgtggagaaaagcagtagggtggcaagtagctatggatactttttttttttttttctctgagatggagtcttgctctgtcgcccaggctggagtgcagtggtgmgatcttggctcactgtaacctccgcctcctgggttcaagcaattctcctgcctcagcctcctgagtagctgggatcacaggtgtgcgccaccactccccgctaatttttttttttttgtatttttagtagagacagggtttcaccatgttggccaggctggtgttgaactcctgacctcgtgatccacctgcctcagcctcccaaagtgctgggattataggtgagagccaccgcgcctggctactctttttttctttctaaatttttcaaagaagtatggattccatgataacaggcagacattttctccttatttggattagcagaaaatgggaaaaggcaccatacttattactccagttcttgataagccagcttatagtggtatctgactattcccaatggagcttttccctgaaattaatttctatgtttaaatggcagcagagtaagatgtagaaagtctctgtagtgggaaagaaaatgagagcttgggtggtacttgggaaagtcaatatcactaaagttcctttttcactttcatcctaggggacattcagcagtcccgtcaacctgaagaagacatttaaggtagatacaaattggtcagtgttatgaaactagtgatcagggtaactacatggagtggatgttgctttgtaaccctgtacagtgtgtcctttgatattcaaggttaaaggtggamaggaatgagtttgggaaagtgagagaagactgaatggcctatagcagtgctggggcttgggaattaagaagttcttgaactgagaaattttttgatttttaaggggcagagtcaatatcaggaaatatttaatgtctgtcttttctaaaattcttaagcacccccattgatgtatttctasttccccttaatttttctcggtctctgctttccagatcccagataaacagtatgtgctgacagccctggctgctcgtgccaagcttcgagcctggaatgatgtagatgccctattcaccacaaaggtgtgtgccctgcccctgtrctgctgaggccttgggagacagaagggttctatcatgttataagttctagttaccggtttacatttttcctccaactttttattttccaaaatttcaaacctaaagaaaagttgaaagaatgaattttatagttcatataataatcaaatatatactataatagtataatagtctttatccacatcactaatttattaacaattttgccatgtatgctttctctttttctatacctatgtgtttttcttttctgaatcatttgaaagtaagttgtagacatcttaacacctctcctttaatactacgtaagcacaatattgggctgggcgcggtggctcacgcctataatcccagcactttgggaggccgaggcgggtggatcacctgaggtcaggagtttgagaccatcctggccaacatggtgaaaccccgtctctactgaaaatacaaaaattagctgggtgtggtggtgtgcacctgtaatcccagctactcaggaggctgaggcgagagaattgcttgaatccaggaggcggaggttgcagtgagccaagattgcaccattgcactccagcctgggcaacaagagcaaaaccctgtctcaaaaaaaaagaagcacaatataattatcactaaaaaaatttaacattaatataataatacatatttaatcatggtccatatttaaattagttatttatagctacttttggtttgcttctgtatttttttctatcaggatccaatcaaagaccttggattgagtttggttgtcatgtctttactgatttacctttttttaaattaatttttattgtatatatttaaggtacaacataatgttttgatctacatatacatagtgaaatgattatacagtcatgccaattaacccatcatctcacagttagccattttttgtgagtgtggtaagaacccctaaaattcactctcttagcaaatttccagtatacactacactattattaactgtattcctcatgctgtacattagatttctagatttattcatcctgcataactacaactttgtatcctttgacctacttttttccccctctggaaactactttctatgtgtttgacttttttagatcctacatgagtgagatcatgaggttattttcctttctgtctggcttatttcacttagcataatgtcctccaggttcatccatgctgtcacatgtcaggatctccttattttttaagttctgaatatattccattgtatatatgtaccacaatttctttatccactcatccatcaatggacacttaggttgtttccatatcttggctcttgtgaataatgccacaataaacatgggagtgtagatgtctctgtgagatgctgattgcatttcctttggatttatatgcaatagtgggattgctggatcatatagtagttctgtttaaacatttttgaggaacgcctatactgtttttcatgatggctgcactaatttacattcccaccgacaacagtgtaccagggtcccttttctctatacccttgccaacacttgttatctttcttctttttttaagataaatgttattatatattgtatatacttaagttatacgataagatgttatgagatacatgtagagagtaaaatggttactacagtgaagcaaattaacatatctatcatctcaaattatttttttgtggcaaaaacagctaaaatctactcatttagcaaaactcctgattacagtacagtactattaactacagtcctcatcttgtaattagatctctaaagctaatattccagcatgtatgtatatatataccatagttccatagtttctgtatccatttgtttgtcaatggacacttaagttgtttccttatcttggctattttttagggagagggaattatttatttgtttattatttttgtaagttacagatatttaaattctcagcaataatttataatagttacatttcatgaatagttaacatctcatgaatagtgttacaatgaatgtggaaatgcaagtatctttatgaggtgatgatttcatttattttgggcatatacycaaaagaaagattgattactgggtcatatgatagttctatttttatttttatttttacttttttgagagagggtctcactctgtcacccaggctgaagtgcagtggcatgaccgtagctcactgcagcctgttttccacattggctacaccaatctacattcccaccgacagggtacaagagttccctttccccacacccttgctaacacatcatttgtctttttgataacagtcatcttaacaggtgtgaggtgatatcttattatagttttgatttgcatttccctgatgtttagtgatactgatcaccttttcatgtacttcttggccatttccatgtcttctttggagaaatgtccattcaagtcttttgcccatttttaaatctggcaatttttgtttctgctattgcattgtgtgagttctttatatgttttagatactaatcccttatcagatatgtggtttacaaatattctaatccataggctgcctttcattttgattgtttcctttgccatgcgcagctttttagtttgatgtaatcccatttatttttgcttttgtagcctgagcctttggtgtgatatccaaaaaaatcattgccaaggccaatgtcaaggagctttttcccatgttttcttctatgagttttatggcttcaggtcttatgcttaggtatattatccattttgagttgatttttgtgtatggtgtaagataaaggtctaatttcattcttttgcatgtggaaatccagttttcccagcaccactcattgaagagactatcctttccccattgggtcctcttggtgcttttgttgaaaattagctgaccatatatgcttgggtttatttctaggctctctattctattccactggtctatgtgtttgtttttatgccagccccgtactgttttgattaatatatgtaactttgtaatataatttgaaatcatgaagcatgttgcctcctacccctacccccccttttttttttttttcttttttgagacagagtcttgctctgtcacccaggctggagtgcagtggtgcaatctcagctcactgcaacctctgcctccagggttccactgaatctcctgcctcaacctcccgagtagctgggattaaaggcatgcgccaccctgcccggctaatttttgtatttttagtaaagatggggtttcaccatgttggccaggctggtctcgaactcctggcctcaagtgatccgcccacctcggcctccaaaagtgctgggattacagacatgagccaccgcacctggcctccattttgtttttctttaacattgattgctttggctatgtgggatctttggcggttcaatatgaattagtttacgttttaaatatctgtttttccattatgggtttaaaaattttctgtttttcctatttgttaattatttaattagttatattaacaaagcaatatgtgtctgttgtcaaaatcaaacactgtattaaagtatagaaagagtgaagttcctttttcattttctacctactcctatctcaccccctttctcaaggcaaacactgttaaaagtttaatgggtagctttccagaccttccctcatgaatttgcaaataaacatctgtacttacaaagatatggaagatggaattattttctacattgataagttcatactacaaatattaagtaagttacttatcccatttagtagtatttcaagacttttccctgcattcgtttctatagatctaagaagttatttcaaacctgattcatytccactctctcaaatcccttgatttttctgaaaaattcatttctcattatttctgtatccctcagcacccccactcacccaccacattattctggtctgatcgtawaacatagactaacctagaatgtgttgagtgtgcctggcctacctgccgctaccccatcttcctctttcagaactggctgggctataccaagaagagagcacccattggcttccatcgggttgtcgaaattttgcacaagaacaatgcccctgtgcaggtaatgggtcctgaagagagttgggtacaggatattcttggagacctaactttaagcctcttactggtcagtgatgggagacccgatctgctcttgttttcccttaaaggcagcacaatggctgcaataggcctcaagacagaaaaggccagggagtgaaattctctccctttctcccctttagaaacaattccaaactgtcctctctgagtagcatctactgtgttagcccaagtggaatactgatgtactgttcaaatgatagaaaaggagaactcgtggagaaaagacatcagggagaaatgagcagagcactggatcacagctagagcactcattgctggcatgtgtatctggctcgaggatcaggagaagtgtgctctttmctgcttactgaggcagcatggaagtactgtgtagcgttacctcattcccattgyagaactagtcctgtggttgatgatggaaactggaaacattagctattgaactcttttgccttcttcaggactttcttttctaccttgtagagctctgtgccttatgggtgtttgaatcattaatcggaagtacctcttcccacagatattacaggagtatgtcaatctggtggaagatgtggacacgaagttgaacttagccactaagttcaagtgccatgatgtcgtcattgatgtgagtccccaagaaatgggagtcctccgttagatcctcagtggcgaagcagggtggggattataatattctctgtccaagatcctgaggtgctcccaccaggtttgactgaatggacagaataatctggcaagagtttgtttggagaccagcactcctgtattattttcccagccctctgactgctttctctgtgtttttataaacttgtcgtacttggagaattcatrgaactaaatcaagctatacaagctgtgtagtcttctctccaacatggagttctgtgggcactggaccccactgttatcccactatagcctcttagcctctccttgagcgttgggtcaaagtgataatgacaaaaagaaataagccctcatgtgtacacagtagcacacaccagtagttccagctactcaggagcctaaggagagaggattgcttgagcccaggagtttgagaccatcctgggcaaaaagaaccctgtacagaggctsattggaggtttgtattgtttgttttgatgcacagacctaccgggacctgaaggatcgtcaacagttgctagcatacaggagtaaggtagataaaggatcagcagaggaggagaagattgatgctcttctcagcagctcggtgagcagctacagttcacccctccagcaggctcaggagacagacagttcacaaaatagtaccaaatgtatgttcccaaggtctggaaggattgcagttggctaagccacatggatgtaaggctctcctctggccacaatgtcaaaagcactgctttgaatagcagaaattactcctgagatgcggtatgataggggggtaatctggggacctcaagctaagacttaactgtaatgctgtgataatagttaaacctagcatgtaggagaaactaaatattgaaagtatgaaaacatgttacagattcagaatatccaaactgtatggtctcgtggggatggatgggacctaccagttgaaaataagaagtgggtgaaatagatgttagctacctggggagcacagctggttcgtctctcacagcaggaaattactgagctctttgttaatatgaaagttagttccctgttaggtattttggaacctaccttagggtcaaatgaccaaaattaggcttgtaaaatacaaaataggtgtttaatgcatctttgaataaatgaactcccccatatattttaaaaaatttctcaacatcccccacctcctgatctgattctactttttcttttccttacattatctagctgagccttgttttgttgcattttctctgccttgctgtagggataagtgaaaactgatcacacactttcattgtttcctctttccacagcaaattcgatggaagaattaagtggcattgactaccttgaagcctgcctcatttcctcctctcctgcctgtgaaagcagagagagctcttctttgggagagctgcggcatcacatcgcttgggcccattacccatgggcagtgccagctactcttgacacagataacttcagactgatcttctgtccaaggaacatcatctgaggatcgagatctaaagctttgagtcatgagaatgattctctccacctggtgctcatatgaaggtgggagtgatttctagattgggcccctactgggtaagatctcacttggtctgagaaaagtgactgctccagaaaggaagaggtatgggagtcatagggtggctactgcattccactcagctaattatgatccaggacttggcgctggacattggcagttctgctctgaatgaagtcagaacagaaccaaaatggcctcaggaaggaatgccagtgtttcccaagacctcctggagatgcactcacaccagactgcacagacccctccacattatgccacacacggcctagacgttgtgtttcctcagccattttccctctgctgccccagtttactctgtccaaaaccctaaggttcttctctcacttgaacacagacgaccttgcttgggtgatgagacatcccctttatctcttcctctactgctggccaagaccygtcactttataagaagctcagatgcagcagtgctggagagctctctctttatgcaaaaatctcatttcaccaggagctttcagaagtttcacctgggctaaattcagcagcatttctgttaggatatttagatggaggttttattttcacacttggattcttgctctgtaccaatatttgcctccttttctgtgactgaactgggtttttctgacatgcctagactcctaataaaggtatttcttccttggtgccttctctcccgctcctggtggttttgtgtagaatgatgaaataattgctcaggatcttaggatcattacaagtcttcctcagtgactgcatttagcagcctgtcggcacatgtcaggttatagagtaacagtgctatggcaaagcagggctgtgtggttaacagaaacagcacggtgctgggagacacaagacctgactttttccagctctaccactaaatagttatgtgatgctgggtgagtccctttctttctctggattcattagataatctaaaattttgtagagtttgtttgtttgtgagatggtgtctcgctctgtcgcccaggctggagtgcagtggcgctctcagctcactgcaacctccacctcccaggttcagatgattctcctgcctcagcctcccaagtagctgggattacaggcacctgccaccacgcccagctaatttttgtatttttagtagagacagggtttcgccatgttggccaggctggtctcaaactcctgacctcagttgatccgcctgccttggcctcccaaagtgctgggattataggcatgagccaccgcacccggcctgtttttaaatagacatggtctgtcacccaggctggagtgcagcggcaccgtcatggctcactgcagccttgacatcccagactcaagcaatcttcctgcttcagcctcctgagtagctgggactacaggcacgtgccaccacacccagctaacattttgtagagttctgtgctcctgtgactgtggagtgggtgaagtcatagaaggcaaagagaagatgctcctacagaggcacatgccatgccttaaggcaatatggctctcaactggaggcagttttgcccctcaagagacatttggcaatgttcgaagttgctttctgttgccacactaggcgtgctactggcatccagtgggtagaggtcagggacgctgctaaacgccctacaatccacaggacagccccacaacaaaggattatcctgcccacatgttagcaacaccagtgttgagaaactgctttaaggggatcagactccatcttttgctcctccactttgcaattccaggtaacctcatatttagttcctttcttgatcatccttcttgctattgaagaaacaagagtttaatttgctagattgtactaaaattattggttcatcttcaaacaaacagtggttactttattaactagtatattggttagggttcatttagagaagcagaaccactaggcatatatatgcattatctaatctaatctaatctaatctatatctgctgtttgttagagaattttgacctttctctgacctgtttagagaaattggatgagaagtaccgaggagtagagcctgtcttttctgtttgagtacttccactcaagtatggcagctggagggtgtgtttaacgtagttgtcttcatgtccagtggtagagcttgaaatccatagggaaggccgtgaagaagggaagatcattataaagtgagtgagcagggacaagctagaaaccatgagaagggactgggacccatgtcagttctcacagcctcaaaccttgatgaggtgggtgtcccgctgctggaaaagctagtggcctttgtcatggaaatgaaaaacacctggcccaggagtgagcaactgaagaaggaaccagggaagatgtagcagttacaggcccaactgttgcccctcaccaacaaggtactcagcagataaacaacaacatgtgtgaactacaaaagtacttcccctgattatgcacactgaaacacagactggttactgttcatttccaccctcctgatcttgcatagaaatatctctggtggtccaccttaactggaaacatacagggaaggacattctggaaattgcagttcagcctagccaaggtgacataatacaaaatataacaactgatccccacttttgagaatgcataagtaaaggataggcctagaattcatgtctgtacaacttgtatgctgcattggtcatgctaatctaggttttgagcttctttttccttcggagcaggaagcattacttggcaacattaggatgacctactgactgttttggtgtaagaaaatgtttcttaggtttgatgagaacgtccatgcccctcatttcaagtgcagagactttgcttttactttattttattttttatttttttgagatggagtctccctctgccgcccaggctggagtacaatggcgcaatctcagctcactgcaaccaacgtccatctcccaggttcaagcaattctcctgcctcagcctcctgagtagctgagattacagacgtgccaccacacccagctaataagtagctgccaccatgcccagctttttagtagagatggggtttcaccgtgttagtcaggctggtcaaactcctgacctcaagcgatccgcctgcctcggcctcccaaagtgctgcgattacaggcgtgagccaccacgccagggtgagactttgcttttaaagagatggtgtcgtcatataacagccttcctataaaagggattagagaagccagacacaaaaggtcacatattgtatgattccatttatataaaatatctggaataggtaaatccattcagacagaaagcagattggtggttccagaggctgagggtggggagggatagggagtaactgcttaatgggtgtaggcgttccttttgggaatatgaaagtattttgcaacaagatagaggtggtggcacaacattctgaatgtactgatgaattgttcactttaaaatggctaattttatgttatgtggatttcacctgaaaaaattttattggtttcttgaacacaaaaagaaggagttgtaaactaactcaagtagtgctaagatctgtaagatattctagtctgcaaaaaaaacccctagaaatccagaatcttctgttgggaaaaggagggtctcatactgctctagtgtagtactcctagaaatagtggaaggaactcatgtcctgatacgcagctcaggaaaacctctaagtggggctggcctctttaagacttagagactgtaatctggtagttaaggagtcataatcacaagtttcttgggtaattctccttagaaatgtagttcttaccttccaggatcagaagtactgaggagcagagccaatcttctctgtttggtgatagatatatgtagatgggtttatatgactttgagtttagtttgtaaaatctagatgtccctgccctagacaggggacaatgatatttagtttgggttattttgtaccctgtggagaacagagtttagtgaaagggaagcatttctttgaaatgtggttctatgtgttcagtcctatttccaaaacgcaggagggaatggaagggaaaacgtcctggcccaagaatacctgtaaaactcaattgctgttgtaaattcatctgccgaaaacagtgcctgtaacctgtgtggagaaacaatactttgggtttctgtacaggtttttcatgagtccaggattcatgggcagccagtgattaggaatcctcaaacactcacactctagagtgtgaattcaagagaggtgaattccaaattcagaatctgggagtagagaggtgctgaagcccatcatcatgagtgcttgtgacctgggcacacacaccatcatacacacacctcctacatagacccctcttctaccgggacagggagccaaattgattagtgtctatcactgcaggaaatagtggcttggaaatggacatgctccaggaccttgagtccctgcagtttgagtatggggttccagaggaagatcgtatctggctgtatttgcagggccgttctcggggactgatgatcgaggcttgtgcccatgcaaccttcttctgcaaactattatataatttgaggtaagccgagtatccaaattcaggaagatggacaagaatctcactgctgagaattcaaatgtcttaaattttttttatattggagggtaagtttggctggtggattgtcatcctatcttttccaacccagagtcaatgactcctggtctaaaaggacaggaaaatctataccagggtcccctggctgtggttacataataaagcatggattagtagtgattaccttttagtggatggattgattaaatgatcatttattcatccattcactcagtcatcatgaccaccagcttgccctccacagttgctaatgtctagccattccttatctattggcaaggaatgcaaatggaatcagttctttcttttggggctgaggtaatagtggaatgctcccttacaggaagctacccaggacttcacaggccctgtgccagtgacttccttgaaaccaggaatattgatttgcagaaaagctgtcagtccagtcttgattctgatatctttctacaatatggcttcagacacttaaataggaaatgtgtgtgaagcaggtacctataattaggcttctgaattctgcaactccaggtcactctgggagcatatgtcacctcctcactctacttcttagtttttctctgaagttagattaattcctagatggtgggaccaaatttgaattgaacatgtttatagatacagcacatgtccaaggaggcaggcttctcagtgaatttactgactggcttactgataaggatgcataaacctattggtggtactcaatatgactgggagaaaacaatatatgaaacttgcaggtggcattttatatttggaaggatcaggcactaagagaaaatgctctttcaaccaggagagaaggcttaaatagagtgtgacttatgttgcttagaagcaaaatccagagctttaagacactggtttttacagaaatacagaacaaatataaggctgtcatatagcaacgaaagtataccttatgtattcagaagtctgactttgttaatcttgcgccaaggaaacacatccagcaccaacagtaagtgaacctctggaaatagtggtctgaaatcttcatccttagtttctcagttctgttcttttttgttttgtttttgtagtttaaagttgtaccctgaatgaacactgttttgtttttataaaccatttatgtgtataagtcataaccttcttaaaaagccaagttatctggtttctcaagtctgcagatttgaaatagcaaactagaaagagtgggtgtatcgtaggaaaggaatgcactcacatctaatagcaataaaaattgacatctgtctcagattggtatcagtaagatgaagaaataggaagctccagactctgtaacctcaagacactaacttaacaacaatatatggtccaaaaagcctttatgaaacctccagcaagcacttaagaaattgtagtgccctggagaggtacaaatccaagaacagctgcatttacaggggtaagaaaagccattgcagttcacctaagatatccctttcctcaagccagcctcaggtgatcaggagaaaatgcctaatttgtggcttctcctttggagggaaaaagaaaaatggaatgtttgtccactgttctgcctttttgggggctgcctgagggattggtttctgtctcacatgacttggagcactgatgaggaaccaacatattttggatgaaaacaaaggatcactcagtggcttgttgcagtacagagaacctgcagtactgcagatagataccaaagtgaggaaaagattatcagcccctgcaatagaaacaggcaaaactctttaattgggaaattccaaactcaagcccagagaagacacattcctggaaagatttgacaggccccagaatctctagctgggctgattgggaaagatcttcccctgtatggtgccagtctgtaaagattgggagaggcctgactgttttttcaaatgcccaaattccaccaaaaattaaaaaggcaatattgctcaaccataagaacaaactactgcagaaa

SEQ ID NO: 97706 - DNA, 17749 bp, Homo sapiens
ctggaccatccggccatgaggaagctgcctaaggagcccgaagaattctgctgctcaccaggacccagctctgggagtgcagctggaatggaacccagcattggagagagccgggagagagccgcagctccgtccacagcaccacggagaggacagcgcctcttgggctgctccctcgtgcacagcgcaggggaggatgggtgccagagggtgggagtgggtgcgcgtgtgtgtatgtgagggcatgttgtccatatccctgtggaatacagaccgtgtaactggacagctgagtgtcataaactctaaaatagtccaggctatagtaatattttctggtatttttttctgttggatttctttggttttggtttgtaagatccatcaaaaattctcagacctctgagagggccttgagggcagagaatactgacctcaccttgggatgtcaccaaaggcagagcagatgggactgtcaaagttgtgctgccctccctcccacaaacaaatgaatccagcgtggaggaaggcgcgccgccccgagctggagggcctggctcccaccatgccccccagtggctgcaggtagctggacttcctgcctgtgacgcacagagagcagcggactccggagcgtcagcctgccttagcccttggttcctcgttttttgggattgtcacactgtgacactcgggaggaacgatgtcctatcctgggctgctcagtgttcccaggccctgtgtgccagaggccaggtctctccaagtgcatctagcctggcctggagggcaaggcagatgcattctcctggctgctgggagagcccatgggaaccttgcttagcgcccaaggtagatgagagacagggcagggaatctgcgtggtgctgggatgtggggactctggcctctccagactaatgttcctgtcacctgctgagctttcccagtgtcacttctgcagtcctcctctgctcacccctccctcactccgtgggcaattccctttctctctgtcactgcttcagcagtgaagacccatggcacctagaaatgcatgccagcttcctgcgtctaccactctgcagctcaaacaagaagctcagagctgccccttccacttcctccccaaaagggatgaagaaaaccctgtggtagaaccaaaccacccaaggccagcccttaagcctgcctccaccttcctggtgcatgacaaaatatttcttttgtctcagaggactttgatgcttcaatatttaatgatgaatccgccacactccattttccctcctctgaagctcccaacaactctgacagggtcagatctctttaaagcatcttcaggaggcggttgccacggagactggatattggtcccagggacaggctgtgctacctactgggtggtggggagggaagcttctggccatgcttgggcattcagaccaaccatcattaatgttaatagaggaaatgcagcaacgtcaaaagcaaggcaggttggttaattagatctggggcccgatgacctccctttcccactgctacagcccttttgacttcccccagcaggaagcgctgtctgtgcggctgagtctgggccacttgcttaattgcatttctggcagggaaggagaggagggatggagaagctctgctcgctgcttccacctcaccgtgtgtcctcccctcccctcccttcctctcctccccacaggcggaattgctttcttctgagccgggtgggctctcctgcagggagaatgcaggggtctgtgcttggctcttagcaaagcaggtggcccacagtgacctccaggaggtggctgattttcctttgtgccttcttatttctcagtaggaacttggaagggaagagctctgaaggagccagaggggcagccaccttgcatgagggtgaggaaggagaagcccagccagcctctacccatccctccctcccaattaggctgcactggggccgaacgcttccctgggctcccactgccttctaaggagccaaggagaattccctgcccactttctgttcctccatgcccaaactggcagatgcttctctgggagcaaggccacatgggctgatgcagctttgagtgctcaggttctgttttctggaagttgctggagaagggctgtcagggtgcttctatgaatatgggcttcagctgtagcacttggcagaaacgtgatgtgtcccacaaactgctggtggaggaagaagatgttcgtcagccaattcaacctccagccagcttcttgagcctatttggtttaaaaaaaaaaagtcttctaatcagaagccactgattttataataaataacacttgttttgaatgccttgttgtccttgtacttaattgaatccgacttgccctctgctcccagaaaggcctccctgagaagaatgttttgagtgcaggaaccaccccgtgtgtcatgtctgaggctgatctaattccagcagaagacctgggctgggcaggtgagcctgattactccaggaggcatttggatctccccatgtgtacagttacttgagtaatgttggtcgtcattttggtatatttaaactgattccaaaataagtaggaagctggacctctgatttgtcctcttttaacctgttcacatggcatagaaaggagtgcaagaagaagttgtccccttcccagacagccgagtatcccagtgctgtagcaacttgccattctgcctaacagaggtccccatcttgacaggtgtctcctgttatcaggagtgatgcttaggagctgaaggcagcaggagctgacctgagtgttggacagaggatgggggaggggagtagcactgtgctgtggaactggggggcttctgggctgcctagccaccctctggtaggggctggtggggagagaggggcatgtggatcttcaggaggtggaacatgcctacgacaggcagtttaggaaggggccaagtcactcttccttgagtggcacagcttagtttacaaagtctcaacacatctctgacatttaatcctcataaaggcccagtgaagtcaatgatgtttttgttcccattctacccatgagagattaaatgacttgtcttaaggtcccacaacaagtaaatagtagagccaggactcagtgccaagtttgggtttttctgcctctctagtcttgtcctgggactagaggcaccttcccagaacagctgcagccttagataccctggggagaaggcctgagcactcagcccgaggtccctgacgcagcaccttcccgtgggccttctgcttaatgcatcagcagccgctcatctagggcccaggttttcctggctcccccaggtgcacccagatcagtgtgtgctggtagatgtttaacaacaggtgttctgggaggaaaaactggtgtgtatagcatttgccaatttccatggtgtaaatattcccaacatgttcttttttaagctaccaacttgatgtcactgaatgagaagttggaaagagatgcatacagttggttcttgaaagccatatgaaagctggctccagcacaccgctgaaccagacccagtgaccatggcttggtctgaattatggctggggctcttggccacagcccattaaagcaagggaggcatggaggcctacaggatgggccagagagacctgaggtcaaatcctggccccaccgcttattacctatgtgagcttgggctagttacttaacctctttgcctccatttcctcagctgtaaaacgagggtatgataaatagcacctacttcgtagttattgtgaggatgaaaagaggaaatgaagtaaggtgcccggaacactgtctagacataaatgccagctctgtattattaatgatacatgaacctcaatgaccagcactggctctgggacagtacttgaattctcctctaggttcttacctcctgggcggatgacccacagggaggagactcctgtgacttttactgagcccctcaaatgtgggcttggacccttggtctactgatgggaatacatcactctcatcgcttaggcccatccagattctcaggcctttcttgaagggagcagggatagagtgcacttaccttggcttatcttagcacatatctcctggctctaggaagacaaagagtgaagccatggtttgagtactgactctacttactagctagggccgttaactcccactacctcatcagactccagaccctggccagaggagagaggaagcaagatgggtcctaagtatagattgctggcaagaagcgtgagctgggtagagtggggtacctgagaccagccaggtggcctgcacagagcactgagcatctgggcactgaatagtgaaggtcaccaatgacacgtgtccttgccctgtgacctgctgcacctggctgcaggtccacgggaccccaagctggaagtttagtcacgtcttgttccttcagccccaatcactttgtgttcttgcttggagacctcttggaccctaggacaccagcttttccaggctgccttatagccttgctctcctgctccagcccagagatttgtgaggaaatgggaaatagaataggggttaccacaaactcctgagtccttggaagagggagaacagctagatgatttcctggggcatggctaggagtaggaaagaaaagttctgctgaggcactcagttctgattcagggccagaaggagaaattttaaagaccaggactcgccactccatgtctagcacagggctgggcatggagccccagctgttcataaccaggggctcaagaacacccaccttctacccatggaactaaaggaggtggactaaaaggtcccagagacctcaccacccaacccctttgctgcacaactgaggaaacagggccagagaggcgtggacagacagaggagataggctcggagacccctgagggaataatgagagagaaataaaggtgaaaacgggcttgctctcccaaacctgggccaccagcactgggctggggcttgaggaactttctgcttgaaagagaaaagtttagttgtaattggcaggtggccaattgcacaccctgagtggggagcatggattctattatctgaacttctattgaaaaaattaaacagtacttccgttaaaaaaaaaaaaaaaaaaggccgggcgcagtggttcacgcctgtaatccccagcactttgggaggccgaggtgggcggatcatgaggtcaggagatcgagaccatcctgtctaacacggtgaaaccccgtctctactcaaaatacaaaaaatcagcctggcgtggtggcgggcgcctgtagtcccagctactcgggaggctgaggcaggagaatggcgtgaacccgggaggcggagcttgcagtgagccgagatcacgctattgcactccagcctgggcgacagagtgagactccgtctcaaacaaacaaacaaaaagatgaaaaatcatggaagtggggaaggcccagggagggaagaggtgaaaaattaaaattaaaattaaaattaaatcatggaacggtagaatgttagagctgaactccctcaagattccaccctggccaagcagagctgggattagaactggatctcacggctttctaaagatggagtctcaaaaaaacccaggcctggctgggaatggctgtggtcttggccctgtccctacggctgaaagccctggtggcccccaacgtgtgctggtgccctagtcagaccgagaactaggcccctaggccgcctccccaggcctgacctgcaggccaggtgggtggcaaactcaaatgcctctggcaatgcgtgagttgaggggcctgtggagagggggcgcatgcagcgcctacctgaggcgaccaaattcaacacagtgccctcggggctcgggaggagaaactgaggcccagagagcctccgcgatgtcagttacgttctgcaggccgggcctttcccaggccaccatagcggctggcggagggagcgcgcgccttgctggcctggagggggcgggggccgtggcggctttaaagcgcccagcccaggcgtcgcggggtggggcggctctggcggctgcggggcgcagggcgcagcggccaagcggggtccccggaagcacagctggggtgtctccacctacgactggccgcgcgccttttctctcccgcgccagggaaggagcggctgcggcccccgccgggcggaggcacggggggcgtacgaggggcggaggggaccgcgtcgcggaggagatggcgcggcacgtgcggtgacggcacccgagccctgagggtcccagccccgcgctccgcgtccccgggacagcatggagcgcccggagcccgagctgatccggcagagctggcgggcagtgagccgcagcccgctggagcacggcaccgtcctgtttgccaggtgagggctacacgagcgcccggggatgcgggtggaggctgcctcggcgggaaaggggtcacgcggcaggaccggccccgaaggagggaaaactggccgctgcyggggcgctggggcgcctgccagatgtgcgccagaggagcggggcgcggcgacgggtggcacagcccctctgcctctctctcgaccgtgggcgcctgttgccaaccagcgccgcacaccactctcccagcggggctcaccgggccgggcgggatcccctcccgcggatctccccacatctgggcgggtggacctccgtccctgcgcggcgcctccaccccgccttgtgcctcctgcgtcttccttaggtagcgactgcaggggtgcaccccgctgccggtatcagggtactggggtgccccgagagccggggaagggagatgtgtggggcgagctcctgcgcccgcgtgtgagcggtctggctccaggtgtgtggatccctgacaaccaacaagacaaacctttccgaggaaagagccagagagcagccggggaaggggtgacagatgcgggagcctcaccgcaggggagaggggtggggggtgtgcaggccgggtgggaagggaaggccagtctccaacctcagctcgcagttttggtaacccttccgctatcaccaaccgggcactgcttccctcaccgtggtgttacctatccttggcacccttggacagtccagaacttctacccaggcttccgcaaaaccacccccaagacaaaaggggaaaacattcagttacccggtgagacctcccaaatgccgaggagggcctctgcttctgcctccggactccccccagctcacttttttctcaggcacccgctgtggctgcactacatccaagctgtgtgaccttaggcgagttctagcctccycgggcttctgttttctcctctataaaactgggataacagttgtacccactgcttaggacagtgaggaatacagttaaaagttaaccacacggaaagtactcagcgcaggagggggggggcggggggagagggagagggagagagagagagagagagagagagagagagagagagagagagagaaagggctttcctctccacacaacgtaactccaggtttcctgtttggggacctcttcctgtcccaaatcacacccctcagctattcaccgagggacccctgcttaccagaggccctgggacacatttgccctttctaggatgctgcccagagccagtagaaggcatgaggaggagggcactaccgaagctggcgggggagcagtgccaggtgggagagtcagctgtggtttgcagctgagacctggcttggcacccccgcccgctgactgcaggacagccaggcttgctggggcttgcaggagctcacaccccagggctaacacctgggcctcactcccacaggctgtttgccctggagcctgacctgctgcccctcttccagtacaactgccgccagttctccagcccagaggactgtctctcctcgcctgagttcctggaccacatcaggaaggtgagagggaggcagagctgctgtgacctctgggatccagcagagcacctccctggtggagaatggagaaaatgactttctgccccaggtctagtcttactcccttccagttcccccaagcagggtacagctcctttccctctgggctggattggtctgggacatcagaatcagcctcttcccctaccctgcgttcagagagctggtcccagcctgtgtcattgcctttgtcctctggctcccataggttgtgttagcacagatcctggtaattgggaactatctgcctatgaaaatcaggctgagattttcttagaatctcatgattctcaaagggcctcagtttctccttgtcccagcagacaacactctccagtaggtgtgtttagagatgtgaatttctcagaggagagaggcttccttcatgggtataacattagtagtttggccaccacgtatcgggtgccccctacatgtagtagacacaggctgcctttgacccctgatcttggagaactgagggtcctactggcctctcttgctttgggaccctcatgccttgggctgtgattgtgagcagatggggctgctctggcctctctgtttcactgctgccttggccttggcaggtgatgctcgtgattgatgctgcagtgaccaatgtggaagacctgtcctcactggaggagtaccttgccagcctgggcaggaagcaccgggcagtgggtgtgaagctcagctccttctcggtgggtaaaggagctctgactctctccagagctcctggcctggggccacttctctctccmagacctccccttgccacctgttctctctcccattcccatatccttagataaccagggctgcgggcctgcatctgttacctgctgtgtggccctgacatgggcttgacctctctgagcttccaagttctcttttctgatatggcttcttttaaaaccataaaaattaacragcttttgggatcagctggtctgctcaattttctattgctatgtatcaaacaaccctagaactatgacaatgctttccgatttctcatggctgggctcagctgggcagctcttctgctccacatggtgtagctggagttacttgtgtgttatgtttagctgggagctcaactgaggctagaatgtccaaggcctgtcagcctttgagctctgtccctgtgatttgttgtcattcactagtctagctgagcttctttatagaatagcagctgagttccaagggggagtttttagaggacaagccccagtgtgaaagtgcctataaagcctctgcttgyatcacttttgctaatgtcccattggccaaagccactcacatggataagcccagtgtcaatgtgggaggaccctactcaagggcatgaatccttgaggtgtagcccactgggggcgactgatatgacagtacaccacacagtccagtcaccttgccagatggtgagcaccttgaggaaggagctgtgttggtcttgtcctcctctccatccccagcaccagcatagtgcctgatctaccagggctacagtggatattcagttaatatttgtgagataaataaaccttattttattatgagtaataatggcaaatgagagccattatctttatttatttatttacttacttatttattctggggacagaatcttgctctgtcgcctagsctggagtacagtgatgtgatcacagctcactgcagcctcaacctcccaggctcaagtgatcctcccacctcagcctccctcatagctgggactacaggcatgcaccaccatgcccagctaatttttgtatttttggtagagatggagttttcccatgtttaccaggctggtctcaaactcctgggctcaagtggtctgcccacctcagcctcctaaagtgctgggattataggcgtgagctactgcacctggcctattatcattgtaggtttcctgtatacagatgctgtgctaagagctttttctggattatcccatttaatcatcccaacaggcccaggagttggagcttctactttccctgtatcactgatgaagcagctgaggctcagagaggttacataacttacccaaggtcacccagctgatgaagggtggagtcagaatctgtactcaggtctatctggctccagagcccaggctcttaaccccatcattgctgccttgcagatgaggaaactcaagtctgggagcaatgacttggtttggtctaagctgggaggtcccaggcaatgtcttggccccactcatggggtggttgcaagaccaagacaggggtgaaaaatgtgaggatataaagcctcacatttagagggaaaggtagacacaatgtgatacccaaggatttgggtaggaccctgctcaggaagcatggactcaatgcaggagaggaaaaaaggcccaggagccctaatcagtcctaggcctcagttttctcacctgtggaatggagcagtgcctttctgcctttggaagtgacaaggtgccccttgcctctgcagacagtgggtgagtctctgctctacatgctggagaagtgtctgggccctgccttcacaccagccacacgggctgcctggagccaactctacggggccgtagtgcaggccatgagtcgaggctgggatggcgagtaagakgcgaccccgcccggcagcccccatccatctgtgtctgtctgttggcctgtatctgttgtagcccaggctccccaagcttccctgcatcttggtccttgtccccttggccacactggagaggtgatggggcagggctgggtctcagtatcctagagtccagctgcagaaggagtggcttttcctccaggaaggggcttctgggtgtcccctcatccccagtagcctctttcttgcgtttctttttaccttttttggcactccctctgaccccgcgatgagtgttttggtggcagaggtgggatgagctggaaaggtatggaggtgggagaggatggggctcttctgtctgtcctgcttcttcaggtgagtgcaggccaaggcgggggtgagatggctgagcttccagcgccttctgtcctgcctgcccagtcccttcactgctttcctgccccaagatggcttgcttttcacaaataaagagaaagagcagctttagccttcttggtggaatcccaggcagtgggagcagaatcagaactgccagggaagggaagggggacctgggtctcaatgggtctcatttgagtctcgcgggctgtgcagatgccctgacagagtcggtttcctttggcggcattccctttccctcattcagcacttctgctgggaactccctgactattccgctgctgcaggaacccagctagctggccaggtggggaggggctggggaccggccaggaaggaggggtgacttcatcccagagagacccgagttcccccagcccttcatcaccaacccgctcctgcaggagtgagtcttacctcccctggccctcctttctggctcagcctgcagcgactgtgaggccacagctcctcagattcactgcccgctgtgtgccagtactcaggcagctggagagaagagaaggcagcagcagaggcccccgccctcaccccagccatctgcacttgtaccatttgctctgtgctgactgtggtcctataaattcatgagaaataaactggttctgtgtgcctctctgaccctcgggcctgatcttttcttgggtcttggcctgtgccagatgaagctgcagggcagtggatctcaggacaggatgggaggatggagtcagggaggccaaggctggagtgggtggaacaggagggaggggcctgggaggaagctctgggaagccagtggcagacatctgtggggtctgtggcccaaactggctggcagaccacaaaccagctcttcttcctcctgggcacacagctggatgtcatgcagccacccttgcaattaggtggggcatgtgactgggctctggccgctggaccgtgcagatgtgtgtgccactccgaggcctggtcccccaaaactcctgcatgctcctccatgctctgtcatccttctgctggtgtgatacagacctcacagagaccatgagggccacgtgttgaacatggcagagccacaggtgaaaggagtcctgaccctgaatcgctgcttggaggaaggtgcctattaatcagaatcacccattttgaattttatatgaaagagacaaacttctcttgtgtttatgccattacacattttggggttagttaaacccatacccgcactgatccatggtctgaagcaggtcattggtcgggggcttgggaccccacaggctgtgggctagaaagccagccagggacgtggggaagagaagctgtgttgagtaggcatgattggagcaggtttggggttacctccatgtgttccagcctcggcggcgggcccgaagcccacgcatggctgcaaggcctgtgcctgggctggctgtcctcgccctgggcttccagtttctcagccaagactgaatgtagcagatgcccacggggccttgccagctcccagatggggcctcattttctttaagctcagatgccaggcctgccaggctatgtgactgcaggcactgggtctgcagcatgttaggaacgccttggccgctgtggtgcccagagcattttctggagccctacaggctgcagtgagtgagggcctcatctgctgtgtgacctattaatgggtcaggctcaggtgtccatgtctggcccacagctctctaggtggcctggctttggaaaggtctaatgccctcctctgacctgtgtctgagtcatcctaagcatggatgctttcaccttttttgaaagccactcttctacttaggtgtgagtgcgtgtgtgcatgggcatgcactggtgtgtgtgcacgcgtgtgtatgcatgtgtgtgtgcacgtgtgcgtgtatgcacgcacgtctgtatcaggggagagtatcccttacctcctcctctgctcaagggctcagccctctctcctgcatccctcctctatcagcccacatctcccctcctatacaaagaacaacccctcacttcctttcctctccagctacccctttggttcttttcttcctttgatagcaaaacccttcgaaagagcagtctttccttgctgttttcatctcctcacttcttatgggaggatgggaacctgcttcaaccaggctttgcccccactttcaatctactacagtcaaggtcaccaaccaccctcatcttgccagatgtagagtcacatcttagtccttatcttcctctcctgctcagcagcactcgaaaaagttggtcatgcctttatttttacactttttattatggaaaaatgttaacatacacaagaatcaagagatgagggaatctccatgcacctcttcccccaaccacacccccctcccatttttgtttttgtttctttgtttttgctggagagttttaaagcaaatccaagacttcatgttcttttacctgtaaattcttccatatgaatttctagctggcactttatttcacatatgaagccacgccatcaatacatctaacaagatgaacggtatcttctcatcatcacctaattcaaattccctgatggcccacattcatccacgtgtagatttcccagacgtctctctgcagttggtttgttcaactcaggatgcacacttcgcatttgattgtgtctcttcactctttcactttggcctggcccctcttgccatttcccctcaccattgctgtgtgggagaagtgggtcatttgtctaatggcctgttcagcattctccacttggctgaagctgcttcgtggcatcttttgacttattcctctatgcaccgcatttactgccaagcgtggttagagctggggacaccctccttcctttttgagtccctcctggttttccttgccggttctcctcccatctctttgtgctggctcagccctcagacctcctcacctgcacctgctcccatcaaagtctcagccagtcccatgctttaatcaccacccaggtgctgatgacatctccagcccgactcctgtatctagccaccttcttgacatccccacatagcatcttaaccagaacacactcaagatggaactcttggggtttcccttggcctttttcttcccagctttctccacctcaaaccagagtgtgctgagttgttcatgctgaagatctgggagtcatccttgcgttcctgctttccctcagaccccacatctaatcatccatgaatcctcaacctctgttccaagtttaactgcttctttattcactccctatcctggtgcaagctaccatattctctctcctgaatgcctctgacacagtcccaactgggctttttttttttttttttttagacaggatctcactctgttgcccaggctgaagtgtggtggcatgatcattgctcactgcagccttgaaatcctgggttcaaggaatcctcctgcctcagtctcccgagtagctgggactccaggtgcatgccaccatgcccagctaatttttaaaatttttgtggagatagggtcttgctttgttgcccaggctggtctcaagcccctggccccaagtaatcctctcacctcagcctcccaaaatgctgggattacaggtgtgcaccaccacacctggccccagctgggctttctgcttctacttgtcctaccctggtgacagtgaccatttcagcacataagagttacatgggtggttgccaggggctaaggggaggagggaatgaggaattattgattatgggtatacagtctcagttttgcaagataaagagttgtggaggatggctggtggtaatggttgcacattacgaatgtatttcatgccactgaacaggacagttacaaatggttaagatggtggccgggcgcggtggctcacgcctataatcctagcactttgggaggccaaggtgggcggattgcttgaggtcaggagttcgagaccagcctggccaatatggtgaaaccccatctctactaaaaaatacaaaaatgatgatggcatatgcctgtaatcccagctacttgggaggctgaagaaggagaattgcttgaacctgggaggcggaggttgcactgcacccagatcacgccattgcactccagcctgggtgacagagcaagactctgtctcaacaacaacaacaaaacaaacaaacaaaaaacccataaatggttaagatggtgaatatgattatgtgtactttaccaccaccaccacaacaaaaaaacctggaaaacaaacacataaggggatcatactcctacccagaatcctcccatagtttctcagatgatgagtgaaacttggagtcccagcgtggcctgcacagcctgttgcccactcagacctcgccccaccctctcctcccctcgctcactctgcctggttctttgggctccgcatgtgtgcccacagaccctttgctggctctcatgtctcacccccacagagcttgtgctggcctctctagtgcaaagcatcctctccccacctacaggcaccccttgcccctatccggctttgtctctccctgacaccccattatgtaggcctatttgtttactgcacttgtcacgttctgttgcacggaaatgggcaggcggtcatggaagccactgggctctgtgtttggaggggagggaagagggacagtctttgaacccttgctgaagatgacaaggtagccagaagtgcccctgacacctggtgtgtggccctcgggcccacatggtactcatacttattgcaaaagaagataaagatggcagaagcgtgcctgagctagggagttgtcatttctaagctggcgatggtgagatgctgaggccacccagggcatgcagtgcctgaggttgggactgttttccttatccactcacccctccctgcacactggaatcacctgggggacttttgtaaaatacagggtactgggccccacctgagaaattttggtttttcagggatggggcctggacattgagagtgactctcctttgcagctgggctggagaaccttgggaattgaggctgagagctgccgggctgccgcttgtccaggccgagggactgtcagatgttctgaaagcagcctctgttcagaaagcctgggaacctgtctccccatagaccaggctctcctcgcctctgcaaggccttccacagagcagacctagaaacctggaatctggccagcaaggaggttcctcaggacagaagtgagctgcctcaggcttccctggcggggccccgtgcagccccaggcttggtttctgggcagaggcatggggcactctcaggccccgctgcttcctccctgcgcagcactcggtcacgtgctccaatcctttcttgggcacagcccagtggagccagcctcctggggctccctcttgccctgccccagtcccgtccccagcccaggtaaatccaccttcaggcctccggtccatcctggcctgctgagtggagagaggattgaccaacactaacctccctggaggacattccatccttggggagaccgccctccctcttcggcttgtttttctgtctctttctcagtctctgcctgataaaaggccctcgaaaggtctgctgaaccacagagtgtcccaggcctgccatctggggaccctggagctgccggcccctgggaggggaccatgagaggcagcagcagggcgcagccccgtcccgtccagtcagggagtcttcatggcttctctcctgcgaagcagcccttgtggattttaagggctgacttgacttggaaaataattgttttgagggggagaggggacaagtggacgggtcttgatcccacgcccaggcccacaccttggtagactttgagtcagtggccactgatggaccgtagaagtttgcggagaggacccagcgaggatgatgcaggaaagagtccttaggcagccaccctgagactgtcatcctctgtccccatagggagcactgcgggaggaagtctccccctactcaacacacccacaagattcccatcttctgccctcaaatctgctctgctcagtcacgaagcagaacagtccgcttcatgtcctcccagccctactgtctggatgaggtgaccagcctgggtcatgcagctgctggaggaagggacagaaccagtctcctgaccctgagatgtgtccgccagggcagggaactgttgtctccttgccacagttataacagcctttgctaacgggtgtttcttatcccacctggctgccccacacacttccctcgtgccaacctctcctccacccaacctctcctccacctcccccatcccccaagtcccccaccctcatcctcttgcagacctgagccctgtctgccgctcttcctggggcctcacctgaaatctgtgtgttttgaagtctggccactagcctagcccagtggcctgctcatggggctcagcactcaccagagacttctgctgctcctcggggctgccctgctggcttcctgggtagctcaaggaccagaaagttctctccactgcacagcggagcaaggccaggctggcccagatgcacaggcagagaggcaggggccaggagaggttggga

SEQ ID NO: 97707 - DNA, 23010 bp, Homo sapiens
actccatcaaagacaggtggtagctgaggcgccgcctcaagggctaagcaacttgttcaggtccagtgcatgcaaggctttgtggatggtgccagttaactccaagtcctccgtatctagggtagctaaggccacccaaacccactctctcctgagctcaaaggcactctgccctcaaacagagcaaagagttgagtcccccttcccagaatatctcgtgagaagggaaaggcgtgcagattaggcaggtatcactgtccctgtttcacagacagagacctggtgtttggggtctggaacgcttctctgaggaagtgtcatgtcagccatcatctgaaggacctcatacctacaaaggcctccaggtgggaggaggcacattcaaggaagggaaagatggccagggggactgaagtggaaagaggtgaaagacaagaaaaatcacctgcccggccacacatggtggctcacgcctgtaaccccagcactttgggaggctgaggtgggtggatcagttgaggccaggagttcgagaccagcctggccaacatggcaaaaccctgtctctattaaaaatataaaaattagccggacacggtggcacacacctgtagtcccagctactcgagagggggaggcaggacaatcgcttaacccaggaggcagaggttgcagtgagcagaaatcacgccactgcactccagcctgggtaacagagcaagactccgtctcaaaaaaatataaaacaaaataagccaatactggactaagaagaatgttgcaagacttgaatctaagctccatcctttctcctcctggcagcctggtaccatgaaaagaaactgggttttggagtccagagctccaagttcagacctcacctctctgagcctcagtctctccatctgtaataggagagtactaccaataaaggccttgcactattggtgtattaaatataataaaaaattagagttggatttgtaaaccattcagtgcctcaagatgtgaaaaaggaggccaggtttcttaacacactagcaagtaagagatggacccatacacttagaagactgtaatgaccatctccattcatcccacaatacacactgacatggtttgtctctgtccccactcaaatctcatcttgaattatagctcccataattcccacatgttgtgggaaggagccagtgggaggtaattgaattatgggggtggatctttcacgtgctgttctcattatactgaataagtctcacgagatctgatggttttataaaggggagttcccctgcaagcactctgtctgcctgccaccatgtaagatgtgactttgctcctcattcgccttccgccatgtttgtgaggcttccccagccatgtggaactgtgagtccattaagcctctttttctttataaattacccagtcttgggtgtgtttttattagcagcctgaaaacggactaatacatacactgagtacctaccacttggagatactgcacagggcactggaacccccagacaggctgcccctgaagagctgggtcacagaaatagtcaccgataattagcacagagcgagctccaggggcttcctgacttccaacagggtagggactctattcaccccactagctagggtcagagaggtgaaatgacttagccaagcccaggcctggggtagtggctgagaaactgactcacaattccttgacaatctgagtttccttcctcctcctttccctgagcactaaaacgtctgctatgataacagagacaggaagggaggtgaaaatcaggcaaacacatctgcagggcagcagggtattcaatgaaggagtgggcagagcaggggcaagaagtcggggacaagtaaagcagccccactcctccttctaatccaatcttccccagtgaacccagtaatccaatctgtctacaatatgcagcctctcaacctttccctgactatttcttcatctccacctggataaaactgcatcatcttagccaggcatggtggctcacacctgtaatcccagcactctgggaggccgaggtgggtgggtcgcctgaggtcgggagttcaagaccagcctgatcaacatggagaaaccctgtctctactaaaaatacaaaattagccaggcatggtggtgcatgcctgtaatcccagctactcgggaggctgaggcaggagaatcgcttgaacccaggaagaggaggttgtggtgagccaagatcatgccattgcactccagcctaggcaatgagagcaaaactccacctcgaaaaaacaaaaaaacaaaacaaaacaaaaaccctgcaccatctaatgtggcagccaccaaccacttgtggctatcttattttgagacagagggctgctctgtcacctaggctggggtatagtggtgcgatctcggctcactgcaatctccgcctcccaggttcaagcgattcttctgcctcagcctcccaagtagctgggactacaggcacacgccattacgcccagctaatttttttgtatttttagtagagatggggtttcaccatgttggccaggctggtcttgaactcctggcctcaggcaacccgcccaccttggcctctcaaaatgctgggattacaggcatgagccaccgcacccagcccacttgtggctacttaaacttaaactcatgataatttaataatatggccaggcaaggtggctcacgcttgtcatcctgcactttgggaggctgaggcaggaagatcgcttgagtccaggagttcaagaccagcctggaaaacatggcaaaaccccatctctacaaagatttaaaaattagccaggcgcagccaggcgcagtggcttatgcctgtaatcccagcactttgggaggccgaggcgggcagatcaccttaggtcaggagttcaagaccagcctggtcaacatggtgaaaccccatctctactaaaaatacaaaaattaactgggtatggtggcgcacgccagtagtcccagctattcgggaggctgaggcaggagaatcacttgaacctgggaagtggaggttgcagtgagccgagatcgtgccactgcactccagcttgggtgacagagcaagactccgtctcaaaaaaaaaaaaaaaaattaaaaattagccaggcgtagtagcacgtgcctgtggtcccagctacttaggaggtggaggtggggggattgcttgagcccaggaggttgaggctgcagtgagccatgatcacaccactgcactcactccagcctgggtgacagagtgagaccttgtctcaaaaaaagaaaaggctaggcgcagtggctcatgcttttggaggccaagacaggcggaacttgaggccagaagttcgagaccagcctggacaacatggtgaaacctcgtccctaccaaaaatacaaaaattagccaggcgtgatagtgcatgcctgtaatcccagctactagggaggctgaggcaggagaattgcttgaactcggcaggcagagattgcagtaagtcaagatcatgctgctgcactccagcctaggcgagagagtgaaactctgtctcaaaaaagaaaaaaaaagaaaaaggaaagagaggtacagaaagaaagagagagagaaaagagaagagaaaaggaaaggaaaggaaagggaaaaagaaaagaaaagaaaaaggagaggggaggagaggagaggagaaggagaggaaagaaagaagaagagagaaagaacaagtgggagaaataaaggggaaaaaacaataactcttaagataatacaaatttaaatatatataaataaaaagtagggacttcttccctccccactccccaccaaaaatgaagtaggggaagcaagaggaaaggtaatcaagagattgagacaggagagaaagatttaatcagccataaatgacctttccctagcctgccccagtcctgcccacctcctgccccacttgcccagccaatgggcccctgggactgagatcagctgtggaggatatgaactgctcaaaaaaaaaaaaaaaaaaaaagtgaaaaggtctccagcccaaaggcaagagactgccctacccacaccttgctcctgcagcccttctgtatttacctgtttcaagtgactccgttcctagatacctactacgtcctactcctggcccatcttcttcaccctcctcccgtttgttcccctacccagagcttctttctacagattccatcttcccctccttatggattggggatcagaggatcagactcaacctcacaatatcttttcagatttttttccccagggcctcaccaatccaggccttcccaaggtcacccctttcttctccccatctccaaggttagtttctgtcccttccctccaccctcactatcaacattcctattgcccttaggatgtgccaggtccagtccttagcattttacatattgatttttcacagccctatgaggtggccactgttaatattttagagaggaaaattagctccatagatccagagaagtgcagtccgttgccaaggctacacaagtggaaagcggcagagcaaggacatgcatccacccatgtaaccactactctcctatctgtcaactgtagttcaaagctcttctgcaacccattgcctctccccgtctaaagataggcttccacctaggttttttgcagtgtaatcttgcccttagcagcatccacctgaagggattgtgacccttttgacaagaaacaaagccttctcaagtgtttctaagaaatgtgggcaaagtgccctgtctgtacctctctccctccttttttcccctcattaattcaacaaatattaatcgtctcctctgtacagtgtccagaacacacgaattccctgtcttgatattcgatcaagagacacaggaatcaaacaaattttttacacaattcattttaaaatcagaattgtggcaaaggagcaaagaaatacaaggccctatgcagcctgtgacagggacctgttctcttctttcttcttcttgaagagggatctttgcccagaagaaagtccctcccttacaaagtcagtttcattctccaaaccctgagggagaaggtcttgcgatcttcccctgttcctccaaggagcctcccctgaataccagtggcagctaataaggaacccccatctctctcttcaagtcgtctccctcagggcccacaaagaagttgcaaacgggttttttcctctcctaaagaagtggaagttcttttcgtctcctaaggaagtggcagatcttcccttcggtgtcttctccaaggagtctcccactctttttcccttttgtgacagcccttccttcatatccttcagggaccccacactctgaagatagcctttacatccctaatcccctttgggaaaaccgcctggggcccaggtactcacagatctagccagtccccgagccccaggctgccgcagcagcaggagggcagcctggctcaaaccacggtttagccgccagaccctcgctgcagcgatcgctaccgccatcttggctaacaaccactcagcggtccggcactcacgtaggctagattcggggctgccccttcatgtgcctgacgcaaactccagcaccatctgacaagaaaaccatcttcttcccgttctgtggtagatagaatgcacagagatttggagaaaaaaaatctatctacccaaaattttctccaatcgcctcattgtagttactcctgtaacaggcaaagaagagggcaacctgaccagggcctcagggatttagggcccgggggcccagagtaaagcggatcaatgccaaggcctgccttctgttcccaaaagtccaatggcgttgccagagttaggaggtgggactgggcggagccagattgttggtaaacgctaagccacgtgcggacgcccaggaggatggcccagcccggcgcgtgcgcactggttacgcagcctgttygcggcgcgcgctgccaggcggaagtgacaactgcagccgcacgtgggctcggcgcgatggaggaggagaygcatactgacgccaaaatccgtgctgaaaatggaacagggtccagccctcggggtcctggctgcagcctccggcactttgcytgsgaacagaacctgctgtcgcggccagatggctctgcttccttcctgcaaggtaagaacttcacccaggtctttcttttggagagggactaccgtgtactgtgcaaccgagtgcccacctcctcacgataccagctggtaaatgtcactcctgcgttgatgcatgatttcttgtccgattgaatactactaaatacgcagggatacacacatctctccctcacgactagaaaggagaagatagttccatctttgtaactatctctgagaatgagaggaggggcagactgtccgcccaagaattgatatttcagaatagggaaaatcacctcgccagggtaaatatcccccttaactcgattcctcctccaccctcccacccccaccccccacacacacaccctctaggtccttgcatcccggactgaagcaaacctgtctatttgcatactgtggactgtggcggatctttcacccacgtaaatactcctcaaattgaagataatgtcattgcgctgggttgagaaatacatccccaccgctacctcactgcatctctccacacaagtaaataccctaagattagggcaagtcaaaaaaaaaaaaaaaagattagggcaagtcttacctatagagcaaatatccccttttcctagctaaataactctcagaagtagattaactccaagaatatttctctttaacgtttgagacgggaggccgggggcggtggctcacgcctgtaatccccacactttgggaggccaagacttgtggctcacctgaggtcaggagttcgagaccagcctggccaacatggcaaaaccctgtctctactaaaaatacaaaaactagccaggcatggtggcgggcgcctgtaatcccagctactcgggaggctgaggcaggacaatcacttgaacctgggaggcagaagttgcagtgggccgagatcgtgccattgtactccagcgtgagcgacaaagcaagactctgtctcaaaaaaaaaaaaaattgagacagcgtctcacgatgtcacccaggttggtcttgaactcctgggctcaagcaatcctcctcccaaagtgctcatataggtatgagccaccacgcccagccccaatacattttaacaaaatttggctgctgtgttgattgtggggagtatgggggaaaacagggaggtgatggtggctccagccagagcaggagtagtggaggtgatgagattctggatgtagtttgaaagtaatacggacaaaacttacgtatagtttggtttgagtgcgaggaaaaagattcaggcataactaaggtttctgcccagatctgtacaagtctggaaatcagaagagagacccaagctggacataggcaatttggaactctctggctatatagatggtatttcaggctattgcctgaacgaagtgagtgtagatggaaaagagaagaggtcccaggaccaagccctaggccttccaacttgagcagtcagagacatgtgacaagctagcaaaggagactcagaaggaacgcccagagagttagggggaaaccaggagatggtggtgacctggggccaagaaaagagcatgtctgagatgtgagggctgaccagctgtttcagccttactgacagccgggtcatgggagggttgatcatttggaggtcagtggtgacgatgttgagctgccgcaatggagtggtggggtcacagaaaaggaagaagaggcagctgttcaggagttctgctgtaagaggatcagataagtggggcaggagttgtagattgttgtggggtcaacaggggagagaattgctggagccacgtcttcaagaaggtgagaggggagagactcttgtgctcaggcaaaacacaggcagttcatctggagccagaggcaagttctgttttggtaacttctccagtcctcagggcagtttctcctggaactaagcataccttccgtgtaagggcaaattgggcttcccaggaaatacggccttaaccaaggaccttcccaggccctccctcaggcttagcgcttatgctgaattgagatacctaaagtttcttcgaacgtaagaattaagaagaggccgggtgcagttgctcacagcggtaatcccagcactttgggaggcctctgaggtcaggagttcttttttttttttctttttttttttttgagatggagtctcgccctgtcgcccaggctggagtgcagtgaagtgatcgtggctcactgcaacctccacctcccgggttcaagcaattcttctgcctcagcctcctgagtagctgggaccacaggtgcgtgccaccgcgcccggctaatttttgtggtttttagtagagacggggtttcaccatgttggccaggctgatcttgaactcctgaccctgtgatccacctgcctcagcctcccacagtgctgggattacaggcgtgagccacctcgcttggttgaggtcaggagttctgagaccagattggccaacatggtgaaaacccatctctactaaaaatacaaaaattagtcggatgtggtagcacgcacctgtaatctcagctactctggaggttgaggtacaagaatcacttgagcctgggaggcggaggttgcagtgaactgagattgcgccactgcactccagcctcctgggtgacagagggaaactctgtcccaaaaaagaaaatagagacaggagtcttcctatgctgctcaggctggtctcaaactcctggcctcaagcagtcctcccacctgggcctccatagtgctgggattacaggtgtgagccaccatgcctggcctaaaatgtatttttttttttttattgagactaagccttgctgttattgtccaggctggagtgcaatggtgtgatctcggctcactgcaacctccgcctccccggttccagcaattctcctgcgtcggcctcccaagtagctgagattacaggcacccaccactatgcccagctaatttttgtatctttagtagagatagggtttcaccatgttgactaggatggtctcaaactcctgacctcaggtgatccacccacctcagcctcccaaagtgctgggattacagcagacagtactagaagccaggctgtttatttcttaggttttacctcctgtaccccgttcatagcttctggggaaataaggaatcaggattcattccagatattatccctttctcaggtgtccagactgatgcaaaatttgggggccagtgcctaagggaagagctgggctggggaagctttggaaagagaagttgagagcagctgcagtaagagggaggatggttagctttcaggaagaacttcctgttaaaagttactaataccagccgggcacagtggctcacgcctgtaatcccagcgctttgggaggcgggcagatcatgaggtcaggaagttcgagaccagcctgaccaacatggtgaaacccagtctctactaaaaataaaaaaattagccaggtgtggtggcgcgcgcctgtaatcccagctactcagtaggctgaggcaggagaactgcttgaacccgggaggcagaggttgcggtgagccgagattacgccactgcactccagcctgggcgacagagcaagactccatctcattaaaaaaaaaaaattactaatatcagggccaggcgtggtagctcacgcctgtaatcctagcaccttgggattacagttgcccaggagttcgaaacccgcctgagcaacatggcaaaatcccctctctactaaaaatataaaaattagtcaggcatggtggcacatgcctgtagttccagctacttgggaggctgaggcgggaggatcacttgagcccagaaggtcaaggctgcaatgagccgtgatggcaccactgcactccagcctgggcaatgagagtgagaccctgcctgaatgcctgaatggacgaatgttactaatacagctaaagtctgttgcacattcagcgtgagccccgcagtgttctaagtgttttctgtgaattgtgtcctttgatcctcacaagacgctagcggggagggactgctattttccccattttacaaatgagagaaatgaagtgagtgctcaaagaatcagtaccaacaaatggcgggggtgacgtggggagccctggccgtcaggctcagtgccacaaatggggccccaggagcagggaagctgtgagtgaggccctccctgctgtctcctcaggtgacacctctgtcctggcgggtgtgtacgggccggccgaggtgaaggtcagcaaagagattttcaacaaggccacactcgaagtgatcctgaggccgaagattgggctgcctggtaattgggccctgctgaacctctgagtggtgcccagtttgtcaaaatcacccccccagctcctccctaccagctgccccgagtctccactccccgcttgggtctccactcagctgtttctgtctttaactctccgcctctaattaataactcatcttctgttgcttctctctctgcctctaatttctccctccctcttttctccctctctctgcctccactctcattcattccattaacctgtttttcttttatttatttttatttatttattttttttttggagacagtgtctcgctctgtcaccccggctggagtgcagtggcacgatctcagctcactgcaacctctgcctcccagattcaagcaattcccctggctcagcctcccgagtcgctgggattacaggcacgtgccaccatgcccactaattttttgtatttttttagtagagatggggtttcaccatgttggccaggatggtcttgatctcctgacctcaagtgatccgcccgcctcagccccccaaagtgttgggattacaggcgcgagccactgtgcctggaccattaacctgtttttccacccttttaccctcatatccctcagtccccactgactggacctgctagggtgggagtgggcgtgggtagcagcacagacatggaactcccaggtcttcttcccttggatggttcccttggtggatgctggaggtagcaggggtcagtggatggcagtcaggccttgccttcttcccactggaatcttccatcatccctgcaggtaactgcaccatcccaggctgagaccgtgagccctttctgggaatttgggtgaggcgtatggaggaaggtgagtcaaatgaaggggaagaccctgaacctctcttcaatttccccaggtgttgcagagaagagccgggagcggctgatcaggaacacgtgcgaggcggtggtgctgggcacgttgcacccccgcacctccatcaccgtggtgctgcaggttgtcagcgatgccggctctgtatcctttctgccaggcctcctcctccaggaagtctcctgattgcttccctcctggyggatacatataccytcactgctagccagaaagccttcaaacacttgacaggtaccagctcactgaagaaggagagcaaacagcctgggtgcttacttatgtgccaggcactgttctgtgtgccttatgcacattaactcatgtaatatagcacatgcccttatgatccccgtggaagtggcagagccaagacttagacccagaccgtctagttctagagcccacggaccctggcagatgagtgttcttatgttcgcatgtttcaggtgacaaaactgaggcccagagaggggaaggggcttgcccaaggtcacacagctggaaggcagcacaggcaggactcaagcccaggccagtctgactccagagcctgtgccaatcacttcttttgttttttgggtttttttgtttgtttttgagacaggctctcactctgtcacccaggctggatgcagtggtgcaatgtcagcttactgcaacctctacctcccgggctcaagcgattcccatgctttagcctcctgaattacaggtggaattacaggtgcctgccaccacgccaggctaatttttgtatttttagtagagacggggttttgctgtgttggccaggctggtctcgaactcctgacctcgagtgatcagtccaccttggcctcccaaagtgctggggttacaggcatgagctactgtgcccggctggcaatcacttctactcggcacctcagtggatttcaggccctcagtgctgggggcgccctgagcagacagcagctgagtcaggagcgtggccttgtaagatctccatgtctgaggtgcgagaggttgaggttgaggactagaattagacactgtagaaggctttactggaacgtggccctgaactggacagacattttatggatgggcagagagagaaggtattgtgaccccattttacagaagtggaaagtgaagcccagaggaaggcgtggaggatcagcagcagagctggaaccggttgactaaagctgtggtctttggctgctaggcctggagaagaaacacattaggaaactgaggcagagccagctgactcccaacctgtgctctctttccactgtgagcttcctgcaggcagcagcgaggtggctcttcctccattgccctgccagctctgtcaccggggagtggctgctacccaagtttcgggcctggctttgccagtgcctccccctcgtgtctttggaaggtttcttcccctctctgaccctatttgccaacaaatgtgtggtacgtacttcagtacatacctattgaatattattatattccccatctaacagatgaggagattgagactcaaggagtaagtcacttgttcaaggtcacacagctgagcaaaactaggtctggaacccagggctacttgatccccggaccacttttaaccactctgccatactgcccttctgtgaccgattagtgatgtctgccataggcatcagcctggtggagggaggcatggatctgctctgctggccaggcctacagtagaaatttcttaggctgggcgtggtggctcatgcctgtaatcccagcactttgggaggccgaggcaggtggatcacctgaggtcaggagttttcagaccagcctggccaacatagtgaaaccccatctctactaaaaatacaaagattagccgggtgtggtggtgggtgcctgtaatcccagctactcaggaggctgaggcaggagaattgcttgaacccaggaggtggaggttgcagtgagccgagatcacaccattgcactccagcctgggcaacaagagcgaaactccatctccaaaaaaaaaaaaaagaaacttaaccatttcctgtggtgctcagctcctggcctgttgtctgaatgccgcctgcatggcattggtggatgcaggtgtgcccatgcgggctctcttctgtggggtcgcctgcgccctggactctgatgggaccctcgtgctggatcctacatccaagcaagaaaaggtaggtgtgaagaccagggtggctgaagggcagaggccagacagctgcccgtcccttcctccaggcctcgcttctctacagacagtcggctcatgccacctcaatcccacttagcaagggctgctctaatcatcatggttcatttagcagcaagtgctggaaacccagctcagacttgcttaattaggaaggaaatgtggggccgggagcggtggctcacgcctgtaatcccagcactttgggaggctgaggtgggtggatcacctgaggtcgggagttcgagatcagtctgaccaacatggagaaaccccatctctactaaaaatacaaaattagccaggtgtggtggcgcacgcctgtaatcccagctactcaggaggctgaggcaggagaatcgcttgaacccaggacgcggaggttgtggtgagccgagatcgcgccattgcactccagcctgggcaataagagtgaaactccatctcaaaaaatataaataaataaactagaaaggaaatgtatggccaggtgtggtggctcacacctgtaatgccagcactttgggagtctgaggcaggcagatcacctgaggctgggagttcaagaccagcctggccaacattgcaaaaccctgtctctactaaaaatacaaaggttagctaggcatggtggcacacatctgtaatctcagctactcaggaggctgaggcaggagaatcacttaaacctggagggtggaggttacagtgagctgagatcgcaccacttcactccagcctggatgaaagagtgaaactctcaaaaataaaataaaataaaaccaggactttaaacaccatcaggatgtccttgcttcacttctcgtccctgcctttctctgcacatcagcttcattctttctggccagcacctttcctgaggctgggactgaccccttaagctccatttccatcctaggaggctcaaaagcaaacgagaagagagttttcctcatcggctcaggtgcagtgtcctaagctcaagttattctgagttttctgcccagtgctataatggtcccctctagtcaagaagacggaaaccacttggagggtttcagatggagggagttaaatgcagggactttgtaacaacagtgttgaggaactagaggaggaaaaaggaagcaggagtgacacccagagatgagaaacccctcccagacctggactgaacctgcgagccacctcctgttctgtcgtgttggagacatcatctcaattggttctggatgcacatagcatgtcctgcttctgccctggccactgaggtccagaacccaccccacctccatggctgtcacacagccacagccatcagcacctgccattgtccatgaggaccagggtgctgcttttcttccattctcccacctcattactgatggaaactagctggtaagggagtctgggaaatacagcttgctggcttccagcccctgtgggacagagcatggaagggggactgggaggccgagaggtaccagataagtgagtggcactatggctagccccttggggcaggaatactgagcttggaagcccctgtcagaaccacgtggttggaataaggggcatggagtacagttctacaaaggaaaggcagagggctatacccagggaagtagggaaggggtagcgtagacaaaaaatggctgcgcttgatgcttgataggtgagcgcctggctatggaaagggagaggcctggaggccaagggtccggagtcccctcagtgggactggctgcaagtgtgtggtgggaaggggagcgttgagacagggtctcactgtcgcccatgctggagtgtagtacgatcacagctcactgcagcttcaaactcctgggctcaagcagtcctcccacctctgcctcctgagtagctgggaactcagacatgcacccccacacccagctacctttttttttttttttttttctgagatggggtctccctctgttgcccagattggtcttgagtttctggcctcaagcagtgccctgccttggcctcccaaagtggtgagattatggtcatgagccactgtgcctggccaaaggactggctgagattttatctgaggggaaggtcctaggtcccccaccgccttctaccccttgtccctaggaggcccgggcagtcctgacctttgccctggacagcgtggaacggaagctgctgatgtccagcaccaaggggctctactcagacactgaggtaccagcatggggatgaggggaaaagccagaaccttccttcccactgacatacggtcttgtcccaactctgccctggattctgagaggcttcaggagagcctcttaaatttcttcttgtaaaaagggagttttcaaactttgtggacccagaaacctttgcggaaatgtttaagggaagcccaatttataacacaggcaaaaagaggatgagctcagtttgaagtcagaagagggcatgtgatggtcccccagctcccagctcagagtggtgagccatgggaattccaggtctcaggctaaggggcagagcctggaaactcttggacatgactgtctgcaaaagcatgtccaacctggacctcatgaatctaggaatacatggcagtgaagactgggagtctcttgattccatggctcttagattatttgggctgaaggggactgtggctgtaaaatcccaagaccactccaattctgtgcactctccagttccatagctctgcacagctggggcctcctccaaggtgtgaggatgcctgataggtctgagtcctgttgctgtcagaatctgatcctgaagtccttctccctctttttatttctcctgatctctaagaaacagttsatgaaatgggaaataatcccttaccacttgcctcacttgggggcaggggagtgatgggaggttaagggagtcaggtggggtcagcagaacctcctgggtcagccaagtcgtgtgtgcatgaagggctyggcccccagcaccraccagtctctyccccgcagctccagcagtgcctggctgcggcycaggccgcttcgcaacacgtcttccgtttctacygggaatcgctgcagaggcgttactccaagagctgaggcaagctggggcaaggggccgctcccattgcstccacccactcaccccctacagcctgaagcaaaccagcagcccagccttgcctctctgacccatgggctccttgagcctgcagctytgtaaccacagggctcctgtggggaggccttggcctgtgacagcccccaggcctgggggcacagatccccccagcaaggataacattcaaaggagctcacatttatggaatggatgaatcaataaattaattcactttaacaaatgtctattgagcacccatcgtgtgcaggccctgctagtgagatcccagaggagcagggaggtaaactggaatttgtcagatggtagtaaatctatgaaaaagtaaaaagcagggaacaggagtttgggagagtccctttatggagggcaaattgagtacatcaggcatcagtgccttcacagagcagggtacctcagaggggaccctgaaagaggaaagggagtgagctcttggataatgtggggaaggagcccccaggggctggggaccagcttggtgaacagggtggccaaagccagcaagctagagcaggagagcagatggggctgggggaaacgggcaagcatgcaggtggggccttgtaggccatggggaggaaactctaaatacccacccaccaaccctgtgagatggggctgttgttatagtccctgtcttgttttgttttgttttgttttgttttcttttgttttgagacggaatctcgctctgttgcccaggctggagtgcaatggggtgatgcaacctccgcctcctgggttccaatgattctcctgcctcagcctcctgagtagctgggactacaggcacatgccaccacacccagctaatttttgtatttttagtagagacgggatttctccatgttggtcaggctggtctcttaactcctgacctcaggtgatccgcccacctctgcctcccaaagtgctgggattacaggcgtgagccaccgcacctggcctaattgttgtatttttagtagagatgcggtttcaccatgttggccaggctggtctggaaatcctgacctcaggtgattcgcctgccttggccacccaaagtgctggaattacagacttgagccactgtgcccagcctaatttttgtatttttagtagagatggggcaaaaccctacctgcagttggaggcagtcccatccaaaccaaatggcctgcaatagggaaagggatgcatccttaaggaaacatggaggtgttggcacctggacagggaaaacacatctgtcacaagcacttagcagaggcacataggaagtgctcactaagcacactaagaggggctagacattatcaagcaataaagaccaggcttggtggctcacgcctgtaatcccagcactttgggaggctgaggtgggtggatcacctgacgtcaggagttcgagaccaacctgaccaacatggtgaaaacctgtctctactaaaaatacaaaaatcagccaggcgcagtgctgcgcacctgaaatcccagctactcaggaggctgaggcaggagaatctcttgaacctggaaggcagaggctgcagtgagttgagattgcaccattgcactccagcctggcaacagagcgagactccatctcaaaaaaaaaaaaaatacaaaaaattagccaggcattgtggcacacgcctgtggtcccagctccttgggaggctgaggtgggaggatcacttgagcctggaaggtcgaggctgcagtgaaccaagatcgggccactgcactccagtctgggttgacagagggagatcctatctcaaaaaaaagaaaagaaaagaaaaaaaagctcagagggagacagcaacagcagacagtcatttccacatatgatgcatttaatcctcactacagcctgaggtgtgcagaaagtcccattttgcagaggagaaaaagtgagaagtcacttgggccaagcttacacagctaacaggtagaggagtaaggacttgaaactcagctctctccagttctctgctaaccacccatattgggatgagaacatcctgctgtttagaaaccaccaggcatggtcgctcatgcctgtaatctcagctctttgggagaccgaggcgggaagatcagttgagcccaggagtttcagaccagcctgggcaatatagtgataccttgtctttacaaaaaaatttttttaattagctgggtgtggtggcaggtgcccgtagtcccggctacttgggaggctcctgggctcaatcaggatgattgcttgagcccaggagttcaaggctgcagtgagccatgattgtgccacagcactccagcatgggcaacagggagaccatctctcaaaaaacaaaaaaaacccgaaaatcctcttcccccttttccagctcaggtctcagggagcaagcaccctggggatgcccaccacagcccgtcaccctgaccagtcagtcccctgttggtctcaagcacccccacccccttccatcctcccacacacacgaacagactctggtttggctgcaagggtgtctggtgtttaatctcaggttgctgccgcccgaagagcggtggccaggaaggggaagggttccagtccagctcgctcccgtttctagatgctcctgccgccgccgcagcctcatccaccaagattctccactctctgcccacagatttgctgggctgccggcctcagggttcacagtgagggctgtaggggcaactagggcgggtctcgggaggcaaggtaggcggccagggtcaccagggcagccgcatacgtgcacacgcccagcccgacggcgaggacccccagcaggaaggcacggcgggaggcggcccctgccccctggatgtcccccttggcccaagccttgttggtctgtagaggcagtgggcagcagtgacccaggcatcccctcagtcccagacccttcccctggtccctcccccacccaacatacccattcattcattcatgcatgtattccaaaagcagatacgtagcacctactataggtcaggcactggggatgctgagtggttaataaaaacattaaaatggtaaaaaaaaataaaaataataaattttaaaaaataaataaaaacattaaaatggtatatgccactattctaactcatttgattctcacattgacccagaggtagcaattattcccactttacagatgaggaaagtgaggcacagggaagttaagtgacttgcccaaaatcttgcagagagctgggcaccgtggctcacgcctgtaatcccagcactttgggaggccaagatgggaggatcacttgaggtcaggagttcgagaccagcgtggccaacgtggtgaaaccccgtctttattaaaaattcaaaaattagccaggcatggtagcgcgcgcctctaatcccagctactcaggaggctggggcaggagaatcacttgaacccaagaggcagagattgcagtgagccgagattgtaccactgcactccagcctgggcgacaaagtgagactcaaaaaaaatcttgcagagagtggcagactcaggatttgagttcaggttctctgggctaccttccaccttcccgcctcaggtatatggctctttgtttttgtggtgcatttttctcttttatgcccagtcccctccaagtcccacacacagactgaccttctgggctagacagaaggcagcgatgccaacgggccagaaacaacacagcatggagaagacagccaagccgaggtggtcgtggggtagaaatggtgaaagacggctgcctccatcccagtccgagtcactgtcactggatgacatgtcctacggacaggaaagtgcccaggtgggcatctccatccacctttcctgccccattgctctgctctccatagccctcaaaggccaatacctgcccctagggcttccccagagatacaaagagaaaaaagtgttcagagatgggctttcggtgtttgtttgagacggagttttgctctgtcacccaggctggggtacaatggcacagtctcggctcactgcctcccgggttcaaatgattctcctgcctcagcttcccgagtagctgggattacaggcacacgccatcacacctggctaattttgtatttttagtagagatggggtttcaccatgttggccaggatggtcttgaactcctgacctcaggtgatccacccgtcttggcctcccaaagtgccaggattacaggcatgagccaccacacctggccagagatgggcttttgacatttgtatcctggagccctttgaagggaagttgtggatcaggtctccagagaagagccccacccacacccagagttttcagttcattttcaaggggttcacggatccaatcatggacgctacaattgcttacaatctctgagtgaaaagcccccgcatggccgggcgtggtagcttgcacctgtaatcccagcactttgggagaccgaggtgggtggatcacctgaggtcgagagttgggagaccagcctggccaacatggtgaaacctcatctccactaaaaatacaaaaattagccaggcgtggtggtgtgcccctgtaatcccagctacttaggaggttgaggcaggagaatcacttgaacccaggatgtggaggttgcagtgagctgagatcgagccacagcactccagcctgggcaatagagtgagactccatctcaaaaaaagaaaagcccctgagcagggacaaacaccactgaaacaaggaacctgcaaaaagatggagattattggccgggcacagtggctcacacctgtcatcccaacacttagggaggccaaggcgggaggatcatttgaagccaggagtttgagaccagcctgggcaatacagcaagaccccatctctacaaaaaaaaatttaaaattagctaggcatgggccaggctcagtggctcacgcctgtaagcccagcactttgggaggccaaggcaggcggatcatgaggtcaggagatcgagaccgtcctggctaacacagtgaaacctcgtctctactaaaaatacaaaaacaaaattagccgggtgtggtggcacacacctgtagtcccagctactctggaggctgaggcagaagaatggcatgaacccgggaggcagagcttgcagtgagccgagattgcgctactgccctccagcctgggcgacagagtgagactccatctcaaaaaaaaaaaaaaaaaaattagctaggcatggtgtcttgtgcctgtagtctcagctactttgggaggctgaggcaggaggatggcttgagcccagcagtttgagactccagtgagctatgatcacatgtctgccccccagcctgagcaacggagcaagaagaccctgtcactaataaataaataaataaaagatggagattataaaatgctccagtggcctaaatgattagggcaaacctgcctgctgaaaactctagagtttagatttttaagctttttttttttttttttttttttttgagacagagtcttgcccaggctggagggcagtggctcaatctcagctcactgcaacctccatctcccaagttcaagcaattctcctgcctcagcctcccaaaagcggggattacaggcacccaccaccacggccagctaattttttttttttttttttttttgagacagagtttcactctgttgcccaggctggagtgcaatggcgtgatctcggctcactgcaacctccgcctcccaggtttaagtgattctcctgcctcagcctcccgaatagctgggattacaggtgtgcaccactacacctggctaatttttgtattttttctttagtagaaactgggtttcaccatgttggccaggctggtctcgaactcctgacctcgtgatccgcccgtctcagcctcccaaagtgctgggattacaggcgtgagccaccgcgcctggcctaatttttgtatttttagtagagacgggctttccctacattggtcaggctggtcttgaactcctgacctcaagcaattcacttgtcttggcctcccaaagtgctgggattacaggcatgagccacagcgcccggccccacatgcttttcttaccatgtgactttgatatccttcccatcaagggatgagttctgtgtcccctccccttgaatttgagcaggctcatgactcacttgtaattaatagaatgtggtggaagtcatg

SEQ ID NO: 97708 - DNA, 21963 bp, Homo sapiens
gtcatgaaaacagaggcaggacatggtaatggtgtatagagagctttgtgtgcctcgttcccagcagcagctaagtggttgtgcaaagttcaactcagcgcactggccctcgctgtgcatgtctgtcacatgacagggctgtctcatggttcctcctcctctaaggtgccttctagctctggcatcctgaaatcctctttattaccctaaaccctcttcctctgaaaagattgccctgaaattcttctgttgaagagcatatttagtaacatcaaaagtaatctcttgtccacttgctatatttttctaaatgccataggcattttttacagtaaagaccattgaaacccagtatatttatgctggttctcctttctttcagattactctctttatctgttgtttcactgttgagcatgcttttccttttcatagactgaattttttcttgttcaacatacgtagtatgtagttatttatataatttatatatatgtataattgattaaaaagtgaatctagaaacaaacattttgataacacatcaggtttatttagtcttttctgattctaaaggagggacgttgatatccacagttgcttttttaacttgtgactgggtatacaagtttgtaactatatttccatctgatgtggcacttatatggatctctcttgagtgcacactgccacatggctggatgggtgatgatatccacattggtctttcttctgtgaaatagtatccacaattcaaaacaggccatatccaagtgaaaatatgttcttttcatttaaaataagcctatgaggtgattttggaaagtataatttatcttaatttttgcttctcaaattctatgcaatacattccccagcttttcagtgtcattgagatgacacatttggtatttaggaatattagtgtcttaaaggaagcataggtatgttattatatcttgtcttttaaggcagttcatatatttatgcctatgtaacttccattatggttatacaaaattaaaaatgtaggaaaaatatgaattaaattgaatgctatgttatatatatacacagaatttttggtaattaaagatcattccaagtaatctttaatgtgtaattcattttttcccttaatcagacttctcatatattagaattattcaaagtagagtatctatatatttttaatttactttgtacacattatatgaataacatttttcatatttttttctttttctccctttctcactccctccttccccaccctccctctcttccttcatttctttcttcccaaagaaaatccagaaaatccaatccttaaatcaactgcttgatgaaggaggcaaaacaaaggcagcaggagataatgtgattggtacacaaaagctaaagcagtggctggggctttgtttttaaattttgggtttttttttttgttgttgttaatgagcagaaagagagacataatgacagctgatgttaaacttttcatatttcaaattagattccctaggaggtataatatatatttcttgagtaataatgtggttacggaattccaatgttatagtgaagtgtaatgaaaaacatctctaggaatgtgctttaaccactgctgcaaaagagacaagtctgcatttatttgtgcaggaaaccagccatttaattgttctagagttttagcatttaaaaatcgtatgaaagtctacatcagctgaattgtcctagcttgataagcacttggagggggacttggaaggtgagaaagatactgcattttctcatgagtctccaagcccacttgaaaagtcacactgaaaggatgcaaatagccgtctgcgattttggcggccctccggattgtggtgacaatatgttgtacccggacattcccaaatttaaatttggcagtgaaaattccacaaagatttctggtaactttgagctataaataccttaaaaataatagattgatgattttctttatttcctagagaatttattttataaatactttgtttacattttagattgtacttgtctttatttaaaatgatgaatctagtctgaatcagctgttattccaagctatcatgcttaagctatgtcaacagcatttatttgtactaatgctaatatttccatcaaaatttgcctgtggaatatatacagttcttaattttaaactgtcagttcttgagatataccgtgtgaagctattgtcagcttctctatttcaaaatgcaatcagcatataactatattgatattagaagatatttgttttttaaaatatattgatgtatgataaagatgatctaatttgtgaatgcatatgtatgtgtggttactttttataatgtgaaataatgaataatgaatttactcaaaataaaacataggttaatgagatacctgtgtttgtgaaaaaaagtcttaaatactttcctgcagtttttattctataattaaagagtaagatagttcatttttaggtagtgaataaaagaaatataccagcgtcaactataagagcatagttactcagtgagagaccttttcatgccatttgttttccttcttccttccatatggcttctttatggctatttttagtgattcttaataatatcctttgccaaaggacaatcaggtaaatggaattgttactgctcattttgtcagtagttaaaattcaataggtatgagaaatttgacagtactggttaatcagtatactcgctgtggatttcatttaactgttttcattatgtctcctactagcaccaataatgtggaactgaatatattaagatctggagaatgtggtacagaacgagacatcaaaattgcatcagtttttttggtgctttgattcataacattctattaatttaataaaatggagaatttcaatgtatttgttataataaatttagcagaattataaggtttcactttcccatgatgcaaatgggaaaaggggacactgatttgacagagagaaacaactactgcttataaagttcaggaatgtagagcagtcaattgcagtcttagtcctagttagtactaagttatcaaaactgttcatcaaaattacttttggaagttttttaacagaacatgacatttcctaaaatctttgaaatatttattaaaattatactctcaaggacagatatatagaaacaggataaacagcaaattactgacagttatgaataactacatgtatctccatttatatcaaaaacaagatggatacttttgtgaaagttctcagtttaacaacttatcaaattaatcctttaagctagttgtatggcaaagaaaaatctccctccatctgtagttgtagggaaaagggacatcttcatcatcattttgttaattactaaaacttgcatttttaagaacaagtccaggaatttcactagttagccttacaagctaactgtagagctcacttttactgcagaaatggagataggtctataaaggattttacttaatagaggttaaataaggagcacataaagtttttctttataacctcttacacatttaaaaaatcatttctattatttgacttcctgagcttgaatatcttagtctggagatgagtcagttttgccatacaattagtggatatatgagaaatctttgaattgaaatgaaacaggctcttcagctggagtggaagttttacaatgaagatagaatgaattagattaagtcagtaacctgttctcagttgttacagcatatatatgtgagaacgtgtggttgagtgtgtctgtgtaggaacaatttttaagactcgacacttggccgggcgtggtggctcatgcctgtaatcccagcactttgggaggccgaggcgggcagatcacaaggtcaggagatcaagaccatcctgactaacacagtgaaaccccatctctacttaaaatacaaaaaattagccggtcgtggtggcaggtgcctgtagtcccagctactcgggaggctgaggcaggagaatggcacgaacccgggaggtggaggttgcagtgagctgagatcgcaccactgcactccagcctgggtgacagagcaagactctgtctcaaaacaaaaacaaaaacaaaaacaaaaactcgacacatatatagtgaagacttctacaatgttaagatttcccccgctcggttggaaaccctgaatttgtgtgtatgtatttgtgtaaggtaagttacattttttattggtctgcgtttttctgtcatgcctgtgtacttgggaaatctgaaactgagtgtcttaggaacttcttaaagcaaatgtgagggaacattaaaaagtatatttaaaatatagaataggtccattttctaccttaaagagtagtatattaaatacaattattatgctgttgttgctttgcagtgtatgtggtgggaagaaggcaggagttttttatctgcatgctatatgaatccttcaataataatgtacctttttattactgggtttggccatattgatttcagtgagtattgtgctctcacagacttatttttccagatttcatctcttaaaagtgggaaattggactggatgctactttattcctctttctactatttttccacaaacaaatctgactaattgaacacaaacaaggtgacttaagaatgtcagatagagttagtcctctgtctttggccctctagggcctagaattgcctgtcccttcataagtgtcaattagtactcttggaatgaatacaggaatgaattttattttattaatatgcagtctaaatactgacttttcatcagtccaggttatggaatgatgaaaagtcagtatttagactgcatattaatattattacctattcacattactctgaattatattaaacaactaatcaataaatgaattttaggtttttttaaacattagatagcagacagacagaaatccaattaggcatttagttaacatagttcacactgtaaatcagctctattcaggattctctgaatatagtcttttctgtttctgtgacagaaaataactgcctaaggaagatcagggatatttacgattttccttttcaccctgggacaaagttcgtgcttatattctgtttaacccccatgggtagctgtagtgcatgctgtttacctggtccccatcagatgttttagatggaaggaagagtaaaaagggcttggagactagactcaggaaaggtaggcttctgactctgccattgccacactggaagaccttggacaagtattttgttcccactggtatataaggtatgacttatccactagatgcagaagacacagtgcccaaggctgacagtactgtaagggcccatgaaggtgttttgcttattgccatatgctagacatataactttgaagctagatatgcaactttgaaagacgaatatattcatctttctaccaatgcagccatagaacatatatatcttcatgaaggaaggaggagtctacaaggttaaacgtgcctagggcccatgaaagtaagaatatggacctgtttctgggtccctctttctttcctttgtaaaatgaaggtattgaactagatgatctgtgattcagccaatgcctctgccaagcgatttgatgcaccatggaagcagatgctgtgatcaggactggttagagctattttcttctgatgtcagtcagcaagaaatgactccgtaatagattaaaataaaacacttattttgcaccagagagaaggaaagagagagaagcacatgactcaaggagaatgtttacatgtgttcctcccaaaggctttatcttgacatagtgttctcatctgcaactttttaaaaatgaaaatatgtgagcaacagagaaaagatattctacccagctagtctttagccaagtaactaaggttcttagaaacaagcttaaaataccagacagattgcacaaacatcttaaaaaatatgtatcaatttaatgcttttgtagtagtcctcccttatccatggttttgctttctgcagtctcagttaaccatggtcaaccatggtccaaaaacattaaatgaaaaattccagaaataaacaatctaaaagtcttaagcagcatgccattctgagtagtgggatggaatcttgcatygtcctgctctgtcccacccaggatgtgaattctccccttgcccaatgtctccacactgtctatgctcctcgcccatgagtcacttagtagccttctctataatcagtttgactgttatggtattgcagtgcttgcrttcaagtaactcattttacttaatgttgttattattgttaatctcttactgtgcctaatttataaattaaactttatcataggtatgtatgtgtaggaaaaaatatatataaggttcagcactgtccaccgtttcaggcatctgctgggggtctttgaatgtatccccctcagataagtggggactactgtatttatttgagaacaccctaaactagttaagaacaaaaggaacactctcccctgccatccattgctggtatcctgtgtgtgtttgatacctcagattcagcatctactacagcacgaagtgcttatgcrtgtcctgaattataggagagtcggattcaccaccctgcccagaaacagaagcattccagaggtttcttcatagatcatgaaatgaaatggccggtccactttgatgacaggaggcatggaataagcagtaatttctgacaagattccygccactgcctcagtgcccctttcatcaacttcaatcactgttcttygtaaaacctggaaaaaggaaataatgtgaaaaaccatttgtgtggcagtgcaaaggaggaattaaatgagccccttgaaattcttcacagtggtcctacccatggggtcatgctcctgggatttagtggagcaggcccatctacgttaagaggagtggtctggggttgcaccagggactgccacaggagtcttaaacaataccaggagacctcaggaacccaatgtgaagtattgtggaatatgtgaaacacattccgggcrtggactcaggatgcactcatgcatcaaatctttattgagcatgtaatttatgctactaattcttgagctgagctggtgctcctaaaaggttttcaagctgcctggatcccttgatccctggatcccttgagtcctctgactttccttttggcaggcaaggtggaggcagggaatggctagtcttctgtagcagcttcccagcacctggtactactctgaggcatttttctgggccaagcccaggggtccctggagccttmctgaattctggctgcctatactgtggctgcttgctatgtttgggaggcccttttttacagaaacaagatgtgatatgagtgatgtacctatataattactgtgttataagagataatgaaaacataacatgtaattacactgattttcactccaggaaattccctgatttcctagaggaaaattaattccccagagcaaacagagggagaatatttaatcatttacagtttaaatttcatgatgacccttcataaagcagcagcgcatttcagtttttcatgtgttcatagcagaaacactttcaggtgctggtctgacggattgttttatttaattgtcttacctctcttgaggttgtaagacctgattccaggccacagttaccctactgtgtcctacttaagtggatgccatttttagtctctcttggaattgaaaattgcaattgtataagaaaatattaaaccacacagctaaggaagaatgtagagagatgtagctgccatttggaaatgtgtgggagcatttttatagtgatgactggagtttcctactggcattagtgaacatgggccagcaatgctaaccagttccctgcaacatgcacaactgctctggacaacaagcagttcccctcaaaaccaagaacccttccactgagaaacactgagtaactgaagggattctatgtggatggtgactaaacttgttcttagaagttttagagatagaactaggaccaaaaagtatgaatcagaagttacaggactctctctctctctctctccatatatatatgtatgtctctctscatatatatatatatrtgtgtgtatatatatatacacacacacatatacacacatatacatttatacacacatacatatatacatatatayacacacwtatatatatatacatataacaattttagctatttgtggattgggcagctcttcaaagaaatggtgagtttgatgtcactggaagcatgaagaggaagagaagttggagggctatttcgtagggctatggaggggatttccacaaggagggagaagttgggctagatgatgtctaggggtttgtttcattgtaaaggtggtgtaatttcatgaactattcmagttgtattcaacataaatgatgatgcctctgtaaaccagttctatttcagggtcaaatttctccctgagcactttaagcagagggggagaggtctgcttaaaataaattagttgaaaagttattttaatgaagttgcttgaaattcttaaaacatccaacctgggtgctatttcaagtatttgggacttaaatctaattttccactacaattaggtattttatcaaagttaaatggtttgtaaaagcatttgttttggtgacatttcatgctgaggttgggctctgatgaaagatcctgacttaccctggatacttggagatttcttccagtagctgagagttcactaaggtcagcaaagggtgagaagattcttctgattcccatctgcctaagcagctcatgcatctcatacttctgatctagcttgaacttcggaaagaaaacttccatgtttctgtggtacaagaacagatgatggtgaaatgtagacaaagccctagtctgtggacaccaaaaaggtcacaatktttgttctttaagattatttccattaatgagtctttcagttgactatgtagttcatgccattcttttacagtggtctactcagggaaaatatttctagcttatcaaatagtacttcagcttcagtgaatgagttttattcctcagccagtgactcacgttttctttagcaaagtacttatgtgttcatttccctatattttaaaaaaaacctgagttaacagctgctttcagcagtcctgcagcctcctggatgatggctgttttcagctcctggattctgcagacccgaggagtctggggatggatggggaggggagcaaagaaaactttcaacccctacccgtctttagccagagaagctctgataccatctattttgtatactggagtcctcctttgaaaatatgttgcttgaaaagatgagttctgtggctcaaaataaaatttttttatttatttaaaaataattgaggacatgacgtgtcttgaagattaatttaaaaagttattcattcagcaaacattacttgagggcttatgatgtttggggttcattgttaggtgctaaagatatgaagaaaaatgaaagaagaataatgaagataaaactaaccctggggacctttagctgcacttgtctgccaaaatctgagtcacaggattcagaagccatagccatggaattcgtattgcagccattttccttgtactccaataggtggattaatttattgggcagacatttcagtgcccactctgtgctttcttttcctctcctctatatttacagaccccaaccctgtcatgtgtctagattctagttctgtgttgatgaccgaatttatatctccggcctggacctcaccctagactccagatccacctgtcgtcttgacatctcaacttggatgtctaatagatatttctgatccaagtgtttaagactgaacttctgcacttaccccagacctgttcctccccctttcagtaaatggcaaatccgtctttccagttgctaaggccaaaaactttgtgatcacctttgacacctctctcacccacatccaatcgattagcagatcctgcacttcctaatagatccagaatccagccacttctcaccacttccactaccaccaccgcagtccaggtagcagcatctctacctggattgctagtaactttctaaccactctcccttgcttccatccttaccccctagtgtcttttctcaacacaggagcttatgtgatcctttaaaaacagaagtcaaaatcaggttgctcctctactcagaaccatccagtggcttcctgcctctctcaggaaagcccaagtcttttctggggactgggcccctgtttcctctctgattttatctccaactgctgaagccacacttgtctccttgatgttcttcaaacccaccaggtacactcccatcccagaacttgtacacttctgcctgtaacataacacttctctccccgaatatatccacatggtttatccttcatcttcagatgtttgcttactgttaccttcttggagaggccttgtctaacctccatctgcatcctgatgatgcttcttgtccccttccctgcattattacctatttttaatttactctttgtcttccttcaatagaatgtaagctgcatgagggcagactaattttgcctgttttgtttgctgatggatccctggcatcatatatttatcacagtcgcagaacgtaaaatactgatggactcaatgaatgaatcagccaggcaccctgtgacagatgctggggatagagtggaaaaaaagacaaatgctgccctgccttcaggaaacttatagctcactggaggagacattaaatcacggtgcattcaatgaaattgtgctgagcgtttgccagtacagaaaggtagagtttgtatagggtgtgggcaagagttgtacctggttttcatgtttctgagccatgtctccaccaagtctgtggtcaggtagtcttcaagggcgaggtggtcacccattttctccatgaggaccaccagcatggtggcatttccttggtagggcagtttgaggacatgacaacgaaaattcttgtcaaaggtggaggcaaacttgcctgcacyrtacatcatgggcaccttaatggtcttgtacttgtccaggtggaaagtgtcgrcttcggtgaagacaggrtcaaatggggtcaaccatttccctgaacaagtaagagaagaactcattgcagaaattccctcttygaaaagcattgttcttgctcaaataatagagagggagccttctatctcacttctctcacttctcgtcttctcgttccaactaggaaaggcgttccctaattgggttggcttttccacagctcaggcaggcaaaataaatttccccaaaattttccccgtcctctagcccagctagcaaaatgcagctccactcgcaggccctattgggaatcgcacacgaaagcagggaaatgtttcctaacaayccctggctcctctcattgtcctggacctgaacggaattcacagtcgttccctcatagttggctccagcttagagaaaagcctttgcctggcacctctgactgccactttgtctcattcacaccaggcacaagcacatgcagagtccaaggtggcaggagtgacacttctcacccacccactgtttagtgtggttctgagagaaggccccacaatgcagaggctactagcaggcaggtacattactctctacataaacgtctgccctgggggtgtggcctggctggttgtaaagtggcttcccctgccggggctttgtaagtctggtgccagctctgcgaaagtggcatccaacccacgtccagtgccccattagggaggcagggctggacagaacctaggatcagggggtcaggaggcccttgtttgggttttgcctctgccacttactgtgtgaccttgatcaagctaacgtctctgagctggtttcatctttagaaaggagacaactcctgctctacctgctgattggcagtttggaagaacaagtaaacaatagatactcagtgtctgctatgtgccaagcccatctgggcactttacattcattgtctcatttagcctctaacactgtagtaggtggagtgtccctattttctataataggaatctaagggcagagagttggtcaaaaagtaaaaatgaaggagcaatgatgcaatcctaaatcccccagataatcccccagccccctgttttttggaaagaccctatgcttctaagtgtcagaggggagctatgtagagtgctctgaaaataataaggactacaagcacataggataccagggaagggcctcaaatgacagcrtctggcactgttcaatatgtgtatcaatctgtttttgaaacgtgaaaacacattcatagaaaatcaygyagcgttaatcatatgctggcctaacraaaggaaagggagagacaatcgtagggccctgtggccttgggagagcagaacattatcaaagtacctttgaacaagatgtaatccacaagaattaatttggtttcaggattaatctcatcaaacagtttgggaattttcccccgagtctctttgttaatgtaatgattcatgagccttttggcctgtgaggcattgygaaaattcataggcacgcactctgtatcaaaatacctcttggataaattgaagaaagtctctttgacatcaaaatccttgtggatgaaggcaaaactcccctgtgwgaggcccwgttccaggttgcgggagagggtctctctgagtcccttaaagagggaaggcaggagcccgggcttggtgggcttcagggcctgcaagtggagccctctcttgatctgggtttcagtcggccctgtggcccccagcatcaagcctgtcatggccaaggacatgccaaatggagagaagaccatgttgccatcgtgcctcatggagatctttcrcagcaggctgaatccgaagtttgaagtctccttggcaagctgctgcctgctggccatcagccaggctttctcttcctcacyggccttctcctcgctggcctcctgctcatcttcctcttcctccytgggagcctgcactaccctgctggtctggttctgaggggctggggtctctggcractgaggactgggggccaagcygggtaccagccacacctgtgccaggaggacggagagcaggakacttggcaccaccttcatgtgatcggctgcsgaggccaaggagtgcctcccttcagctgcaagacttcctgtggagaggagaggatagagatrgttttaatgcctcctaaaatgtctttgtggatagtaaaagcttcttcagggaccctgcctccttcctgtggctcaagtaggttagccctgccccagggagacctagagcaagtgtgggtgacatttgctcacccaaagaggggacattatttcacagagcaaaacctcctccagttcccattccctgccaggccggcaggcagctctcagtcctgaccccgttttcattcatcccgtctcctccctgagggccagggcaagagagtccactctgggagcaggaggcagcacagaaggtgggggtccaagcaggtggaatcaggggtcctcacacacctttccttgatctgcttcattcactgccctgaccatctggtcgtcaggctgcccatccagatgggtggccggccttgcccagtgccctgtttggctggggattggagtgcctgcatgcccgttaggcaaggaagggggaaagtattggagctttcctagattttttatcaaaattctctttgcactgcacctctgctacacagttccttggaggtcttccttccttccttccttcctatagctgcagctcccgggtagcaggaggccccgcaattcatacaacccacttctgggctccctccactgtggcttcatagagccctcagccacctgggctgcatgccggttctcactgtcctaggctgcagtgtgggagctacacttcttcaccgttagctgtccccttctctgtcgccttttaggctccctccacatccttggacacagagcctggctcctgaatacttccatgttttccatccaaatacatggcttgggactggcctgggccacctggctgtgtccaaactcagttctggtgttcagccacactgcaggcctgatcccagaggctggctgggcagaacccctgggacacctgccctccctcatcctctctctgggcccactgccctgggagggtctgggtggggtaggccacccagcccagtgagcgcagggtggatgctgccggcctcacagtagttcccatcagcagagacccttattcttgaccaaggtcacctgcggcaaaatgtattgacaggcggtgctgccaggcctcttcctgatgcaggggctgagtccttatctatgcctgggacaaaaccgcctccagcgccagggcccagcatgttgccccttgctcgggctgaatggcaccccggaattcagggcctcactctgcagtctgaacggcactaccctctcccctgtagaagcagtgaaatacttccactgtgtttcccaaaggacactgttgaggaagctctttttgactctaaatggcaagcctgcattcaacaggtcacccaagtattgtaaacgttgggtaaatagctctttcagtgtaaacgcagcccagtttcacgcttttattgttatggactgaatgtgtcccctgagaattaataagttgaagcccgaaccaccattgtgatggcaatagagttggggcgcttgggaggtgattaggtttagatgaggtcgtgagggcaaggcccctgtgatagcactagtgctgtcataagaagagagcagagtccccctccgcacctcctctccatgggaggacacggtgcgaaggtggccatctgcaagccaagaagacagccctaccagaatccggccacgctggcaccctgactcggactttcagcctccaaaactgtgaaaaatcaatggctgttggagccacccagcctgtggtgttttgttagaggagcctgagctaaaacgattacgtggcatcatttagtgctactttctacattaagaccacacagaatactcctgaattcaaggttacttcyccctgtacaatggtcaggaaattagcccagcacgccaactagatgtcaccacctccaaatgctgagtcttaccttcctgttcttggagcttgtcctgcagtctgcagtggtagcccagtaattcctgggtgctcctggacatatatcgcctaaggtctttgtaaagtctttgctcatctacccaaccctttggagtctaggccaggagytcagggggtgmtcctggactaggacaccatccagcatggtgaggacgcaccttcctagacagaacctgggcagtaaggaatcaccagctcacctgccacttctcagccctgggacagcacacatccctgcctcccctcagccctgggaaggggagacctgcttactccggcagtgagtggtggtgggtgaaatatcaagcctttcaagcctctttcccttggcctccttcctgcagaggagccccttgtgtctataattygcctcttaccccactccagctcccaakctgtatgtacagtccctgtggagtgtaggatggaggtctttgcactgctcagccacacagccctcacgttggagcccrcccagggatgataccatccttcccggtccctccctgattagactcattgaaggtctcctgtaacccactgcctcttaccagtgtgtggccttgggtcctggaaaagtccttcatttagagcagaaaccaaagcttcagctttgcagcccagaaccttcagcaaatatttgctattccaaagtatgatcccctgtgggacggttactgattaacatcctgcttgtgatggtggagtttctggaaaaccaaagaccaagtgggaggcttcccatactccccagctcctcctataacccggaatatgacccaaatcccatcacgagagcttctgccttgcaactcaaggcttcgccccagtaagattcagctctgtctgggtggggtgtggggaatttgtcttgagctgttctaggtgctgaacacctcgagaaagaaggcactgggggatcccatggatgcttcctgagtccccagcctggtactggacactatgaggatgtgggttggggggcacagcagaaatgttcaggacctgttctctcagcccccaaggaactggtcaatccagtgggggaggcagacaggtaaatcactacttagagtacatagctcctttcaaggtaaatttcctgcttcacaatgttgctggacttgagactgaatcctcgggcactcagagttgaggctggtggagaccgtttatggcaaaacttttcagacttctcagactctcttttttaatatatataagtaaatattttgttatgtgccccttactactaccattgaagtgaaacgtatagctaatataatctacccacaaaattaaaaaaaagataatgctgtaatgataatatggaggcataataaaagagaataatgtgtccctgaatatggcagtgctgtggcctaagggcctgggcaggtgcagtgaggctgtccaatgtggagcccacgggaggtcgcttgtgtgctgctcactgctggccggtgaacaagaaaaccaatggtactaccagggatagagcttttgaaatggtaaataatgcttggtaaagtttcaaacaaaataaaatatagatctttccctgatttacacggtcattgtcttcacagaaaatgcagtgtgtagtaaaaccttggataaatattatatttttatatgaaataaagcagccccaggactgacagtctaggctcagataatcccacgtgaacttgaggtggacatgtgagtcctggggaacccggcggcctcttcatcatgggagactgccctgcgtgttctggtatgtctggcattgctaaccctcaatccttaaatgctagtagtactccccccaaacgtttgtgaaaggcagaagtgtcccaacaagtttccagagtgttccttttgggcagtacctgctctgttaataggcagttctttaagaggtgaaagtgagggtgtagaggggccaggctggactcacaccacgcacaggagtcagcctttgcctgcccatccaggtcgagctctgcagctgcgggcttgtggattcccaaaaagcaggggctgtttcctccaggcctgggaaggtgtctgctttgctaaatgtctgagcggagccagcgagtgtgcaggtcttagggcacagggtttctttctttttttttttttttttgagacggagtctctgtctgtcacccaggcactgtctgtctcagctcactgagacctccacctcccaggttcaaacagttctcctgcctcagcctcccgagtagctgggattacaggcgcctgccaccacgctaatttttctatttttagtagagacggggtttcaccatattggccaggctggtctcaaactcctgacctcgtggtcctcctgccttggcctcccaaagtactggaattacaggtgtgagccaccgtgcctggccagggcacagggtttcagaaatggatccttataaaggaaggcagcagagtatattgggaagattgtgaaggcttcagccaggccattgcctcctgccctggtgtgaatctgaggtcctctgctcccggttcctagctgctgggatgtaagttaacctcaccgagccagcctttcttcctctgttaagtggccagaactcagactctgtcctatgaatatctctgcagcaccgaggaaccaggaagggggtggacgattttgctcctaaggctgtgagccctggaccccagggtgtggctcagaagtccccctccttcagggaggacattattcctgtacagctcccaacaagggagctgcccactctttgacctttagccctccagttagatgggaaagtgagaaaactcaatgcatagcactgtagcctgagctcttttaccagcagcatgaccctgaacaagctacctaacctctcttagcctcagtttactaatctgtaaaatggggtgccccaggctgagctgttaggacttctgagaggatgaactgaggtggtgcctgtggagttgagtatctcgcccggtaggaaggaagtgctaaaggaatggcatttgttgcataattttagagccagattgaacctcagaagtaagtaaccctgtccccaggctttgattttataaaggaagatattcaggccccaccatgaaggcctttcctgctagagttaaagcagaatagaccaggctgtctgacttccagttgttatgaactttagcttctcacactccttggccaaaaacgattgggaaagctctgacgggaaggcctctggtgatccagataaactcataggcgatgcagaacccttcctggaactcccctcaggcaggaggcacaacttctgaaagccactcttcagggcgacatcgaggggcttctaaagcaaatttgtccagagacctacagggttaaacgtctgaaaaacaagcgttagggcagtcctatgagaccaaaagcagactccaggaaacagtgagagaactgcaagagtttactttgtgtggatcagatgaagggggtgtttgggtaggtgggtagtaaaggaaaccagactatgttaccccttgatatggtctgtctgtgtccccacccaaatcttatcttgaattgtagctcccataattcccacgtgttgttggggggtacccagtgggagatcattgaatcatagaggtggtttcccccatactgttcttgtggtagtgagtaagtctcacgagatctgatggttttataaggggatttttaaggggaaattcctttcgcttggctctcattctccctcttgcctgctgccatgtaagacctgccttgattgtgaggcctctccaaccatgtggaacggtgagtccattaaacctctttttctttataaattacccagtcttgggtatgtctttattagcagtgtgaaaataaactaacatacctctaaatgtgcctttctgatataaaaattatttttgaactgaaggtaattaagaaacagcaaatggagaaatagttttctctatctttccccctttcttcctaaagacagataaaaattcatctttactggaaatgactctagactcttatcaacccagagatggcatcagaggaatatgcaaacaagccttattcctttagtttcctcccatatatttaccttccatgatttcctgcccttggaagcataaaaccacttcccttgtcccgatccatgattttcctgctaatttattgctctttactaaaggtaagtggagttctaaggcaccattttgagttacttttcatgcaggtttctcctgtgtgaagtgcatggcccatgttgtaagctgatttttctcttgtctgtcttttgttacaggagtctatcccaaaaaagaactaagatgggaagaagtcaagtttagcctccccccacagtagtacagaggtaggaaaaaaagggctttccaagtccttgcaacatacacacacacatatgcacatgcacacacaggtgcaaatttctcgctgatttccagacatccctcctgccttgaactttaaagacatctttccattgtgttatggcttatgtgatttcttctttttaaacttctaatttagaaataactttaaacttaaaaaaatttgcaaaaatcatggtctccacatctacccttcacccagcttccaaaaatatgaaaatatcatatgactataatacataaccacagtgtattagtccattttcacgccgctgataaagacatacccgagactgggaagagaaagaggtttaaatgcacttacagctccacgtggctggggaggcctcagaatcatggtgggaggcaaaaggcactgcttacctggtggcggcaagagaaaatgaggaagacgcaaaagcagaaacccccaataaaggcatcagatcttgtgagacttattcactatcacaagaacagtatggcggaaccacccccatgattcaaattatctcccactgggtcccttcccacaacatgtgggaattatgggagtacaattcaagatgagatttgggtggggatacagagccaaaccatatcattccgcctctggccctgccaaatctcatgtcctcacatttcaaaaccaatcatgccttctcaacagtcccccaaagtcttaactcatttcatcattaacccaaaagtccacaatccaaagtctcacctgagataaggcaagtcccttctgcctatgagcctgtaaaatcaaaagcaagctagttactgcctagatacaatggggttacaggtattgggtaaatacggctgttccaaatgggagaaattggcctaaacgaagtggttacagggcccatgcaagtctgaaatccagcaggtcagtcaaattttaaagctccaaaatgatctcctttgagtccaggtcacgttgatgcaaaaggtagcttcccttggtcttgggcagctctgcccctgtggctttgcagggtacagcctccctcctggctgctttcacgggctggcgttgagtgtctgtggcttttccggataaatggcgcaagctgtcggtggatctaccattcaggggtctggaggacggtggccgtcttctcacagctccactaggcagtgcccccatagagattctgtatgggggctccaacccacattttccttctgcattgccctagcagaggttctccatgagcaccccgcccctgtagcaaacttctgcctgggcatccaatcatttctgtacatgttctgaaattgaggcggaggttcccaaaccctaattcttgacttctgtgcactcgcaggctctaccacgtggcaactgccaaggcttggggcttgcacgctctgaagccacggcctgactcgacgttggcttctttcagccatggctggaatggctaggacacggggcaccacgtccctaggctgcacacagtacggggaccatgagcccagcctacaaaaccattttctcctagacctctgggcctatgatgggaggggctgccatgcagacctctgacatgccctggagacattttccccattgtcttggggattaacattctgctcctcattacttacgcaaatttctgcagccagcttaaatttctcctcggaaaatgggtttttcttttctaccacattgtcaggctgcaaattttccaaacttttttgctctgcttcccttataaaactgaatgctttgacagcacccaagtcatatcttgagtgctttgctgcttagaaatttcttctgccaggtaccctaaatcatctctctcaagttcaaagttccagaaatctctagggcaggggaaaagtgccaccaatctctttgctaaaacataacaagagtcacctttgctccagttcccaacaagttcctcatctcgatatgagaccacctcagcctggaccttattgtccatatcgctatcaagcttttggtcaaagccattcaacaagtctctaggaagttccaaactttcccacattttcctatcttctcctgaaccctccaaactgttgaaactttgcctgttacccagttccaaagtcgcttccacatttttgggtatcttttaggcagtgcaccactctactggtaccaatttactgcattagtctgttttcacgctgctgataaagacaaacctgagactg

SEQ ID NO: 97709 - DNA, 34587 bp, Homo sapiens
cagcggcctccttcctggttttctgcttccactcttgccctctcaaacccattctcctcacagcagccccagcaattcctcaaataaacaaattcagtcatgcccaccctccctcttgccccttccatggctccctattgcccacatgtcaacccattttccaacgcctacaaagcctgcatggccttggccacctctccagcctgatatgaagcactcgcttttcccctttattcctgtgctccagccagactggcccctcccagttgctagaattcaccaggctccttttcaggaggttcactgatgctgtcctagctaactgtattgttgtccctttagcccttgcctactcccactcatttattcagggcatttttcctgagtgcctgctacgtgcctggcactgtgctaggtactcagtgtactgtggtgacctagttcttgccctcttggagcttattatctaacaggtggagagttacacgggaataatcacgaactgtgagaaatgctaggatgggaaatagcaaagtgcaaaggaagagactatcagggtggggacagggaagaggacaaatgaagcctcttccaactcatccttagacctcagctcaaaactcacctcctctgagacgcctcccctccccgctagacaggccaggcccttgctcatctgctctacagttccctattctcttcttccccagcacttgccataatttgcaattagacattgatttgtgcaactagagcagtggggaggaatgtgctgtagaatacctactctgcctccagtgggagcttggggaggtgtccccatccccaaggctgtgttcatccacacaatcatctagagatgtatcattaacccgtgccatagaggaactgactgaggctgggaacaagagaggcggtgtgagtcatctactgctgcctaacaaattattccaaagcttagcaaaacaatgaccatttattatcttattcctatgggccagggatctggtcatggctgagaagggtcctttggctctgggtctttccagaggctttgatcaaactgttagccagggctgcagtctcacctgaaggatcgaccagggagaatcagctcccaatttcactcacacagccattggcagatgaggttcctccctggctgtttgactgaaggcctcagttctttgccagctgttggtggggggatctccctcagctcctggccctgtggatctttccatagagcagttcctaacatagcaattgagggagtgagggtgagccagcaagctggaagccacaggctttgggaatcctaatctcagaaatgacagcccatcactttgctgtgctgtattggttacaagcaagccaccaggtccagcccacacgcaaaggaaaagattacccaagggcttgaacacaggagatagagggggcgggtagtcactgggaaccatttagaggctaccgatcacagaggtcacataatcttcccaaggtctcgtcgctagaatgtgctccagctgcctttgggagctgggctctctgtgcccaccacagggagcaaggacagggcagaaacaggcagctttctccaagcctggggacctcctgctgctggtcttggcctttctgaaaaccacagcaaatgcaccttctcccatagaaactagagatggtttcctgcccagcccaggaggctgaacgggttacaagcatttgccatgtgagctgaaaaacgctagctttcaaaacccaggccctgcggaacccacaaaggggtgagtggctggaaaacgggcccatctattaccctcctggggctgtgtgtaaactgaagagggcgttatgccatggtcctaacccagccttacaaaatgacttctcctcccgattttcttgccttacacttgaaaagccattcatgcctcctctggtgccctctctgggggttcaagaaatcccacagttcttttgtttctcctctcaaaaacgaactcactatatatcctgtatccctgggctggtggaaaattaactctcagttatttgggggaactccctccccatcttcacccccaaccccattggggtggcatagtccggggcaacttagtgcagaacaattggaggttatttccccaggagaatgtaagctgagtgacagcagcgactttcgtcagtttcatgcaatgatgtgcagtgggtgcctggcacatagttgatgtccagtaactctttgcggaatgttgaatgaatgcgttttgccttgttgctacacccctcacccaaaacatgctcctaagggaaggacaaaggagtctccgccaggctaggggcccgagttcccttacgcaatacaggcttgtcctctcaggatccaacatgtgacttgtgagtgaggagtcactgtactgcactacgagtctcttctgtcctaggacacctgcttctacccttcctggattccagaaacttctccctactcagccagatccacctccccattccctaatccccccaatcccactgttcttcctagaaagatcctcttttctcaaaaacaaaagcctctttctcacctttgcccttgggggtgggagccaggacagccattggctccagggccagcccccagctctgctccctgggactggggcaagggaggagtgaggggagggctaattctagctcttctttttgatctttcccagcagtgaaacaacacctgaatttgtatctcaacaagttttccagctcaaggttgcaggaggagagtgctgacacccagcagaggaaactcaaagtctgagcctgcactctgcatggaggtgaagtgctttacttcctgggggcctggtcttcctaccaagcacccttcccgcagctggtggggtggggaaggcgttgtcaagtgaataaaatagcacagtgtaaccagcatcaggaaaatggccgctcttgccagcatgggtgtggctgcctgaaatgcttccatcatagcttcattccattgatctagggaaacggcagaaaacccccttctcaggcacccagacaccatccttggtggggctcctccctgtaacatgcaaatctataccagctaacagaagccgtgagtctcaggcctcgtggtgaccttgtcccctttagggttagtcacaccaggaggaaggagactcaggccccgactagccaccaagcaaagcccacatttgttaggcacttactgaatgccaagtacaatgttagtgcttttcacgatcatctcatgtaatctttgagataggaatgaacactcccactttacaggtgaggaaaccgaggcccagagaggtatgacttgctcaaggagtaatgccatgggaagggtgacatgaacatacttgactccgctgcccacactcataattaccatggcctcctgctccctccaaatcccaatagcaagggatcagcaccaaaggaggacagacatggtggggaaattcaaagggattcatgaccatctgggcaatccgggaaggcctcatggacaatgacccaggatttgaaagacaggtggtatctgacaagtgggcattccagaaggagcaaaggtacagagaggtgtgaaagcacaaggaagtttccaggccctcaaagccatccctataagctcatgtattatcggacaagtggggaagtcagggagagaaggtgagaaaggtgggctggggctccattgcaaagagtgggatgacgtcaaccccggagagctctctgggtctgaccaggctgagaagggccagaccgtgagtggcatgggcagcagaacccagccctcaaatcttgggcatctagtacccaggtacacaggtcctttgctggaagacaggacacccaaagcctcctgcttctctggacttgtgaagccccagctgccattccccgatccctccacccagacacctggacaacagggagaaggggtgcaggaaggttggagcaaattcattccagacagaacacacggatcccctgccatgggcggcccctaacgacgctgtctgcattttcgatgcagacccagcttgaaaacccactgaacccttctgcaacttttttccttctaaccaggctttagagagcttacgaggaatcttgattagttagactaaggaaattacattttccctgcgaattgagctaaatttgaggaaatattctgttacgcatgcactgagattcttgtaagattgtgtgtgtgtgtgtgtgtttaaagccttcattactacaaatattaaaacaaaacaaaacaaaacatttttaaccacccagattgtccaaccctctcactgagtgaggaaccagaagaccagagagggcctgggcattgcctggggtcacacagcagtgagtggcagagcccaagggcccagaattcctcatggactccagcccagtgctccttccacactcccatgctggcttggtttggaactgctggggcctgaagaagggcagagagtgagcccaggactcggggcttagtgcagccaaacttgagggctcatcaaagccttggctgaaaagactcttcacccatacccctcactcagacaccatggaacctggctcagtcattcctccacagagggaagctaacacgccttggaatgagcactggttggggagtcaggagtccagggatccagcccagccaggccacttcttagctcagcagcactgggctgctcctgtcacctctctggcttccttggcggttaaaaaaaaaaaaagagcgagaaaccccccgaaaacaaatgggggtcaggggcggaggcaggtaacacagcccctgtagtcacatgcagagtgaattcgaaaccagctctggagtcacactgcctgggactgaatcccacttcagtgctatgtgactaaggcaaggaacgtaaactctctgtacatgtttcctcatctgtgaaacagggataataataacaggacctacccccttaaaccagttgtgaggaaattaagtaagataattctgtatatgtggagagttcaggatagcgcctgatacatagtaggtgttctgcataactgtgtaaataactgtaaaaaattacctgctattgttactgctccttgagcctccattgacctcacactccctgcccaggacatgatacatgcttggaagactcagatgtctgtatgcccagagcctagcccagtacctgggacttacgtagtaagagtggggcgcggggggcgggggcggggggcagcagcaggaaggggaattgctcaatacacgctcctggaaatattaattttttgaagtggatgcatgcaatgcactgagcccccctcccctacaaactctccctcccacacccaagcagctcctccaggactcaagggctggtgaatgaatctttgaatgataaatattcctattttgatgtccattaataatgagcttgtaggcaagatgagtcatctagacctggttcacggatatccctacaattccagagccacagagtcaacgatcctggacattcattcattcaacaaacattaactgggtgcgtggcaacctactgattcatgagttggaagaggataaaatattatatagaagccatacttaatgttattggacacgtgttccctaagcgcctatcctctgatcttgtgcaaactatacttatgtgaccttgtttatgaattaatgacggccagctaatccttcagaagactccaattttaggtttgcgcaaaagcccttcagcctttacaaacgaggacctgtctttctgggttgagctaactcctctgctagttaaaagctttcctgtgtctttaaaagggggaggcatcctatcaaatggaccctaacgcataggctgaaggcacgtgaagtcccacccactttctatgacgtcccgcgtcccggcttctgattgcccgcctgagacgtcaatcgcagggcgtgtgtcttgctgggacacagtggaggtctaacctttggtttscggagcggtcgggtgtattctccgccgcccccacgccctcgaggtccccgccaccgaaccagcggcggagcccgcccgcgcctcccgcggcattcccgcaccggatcgctcctcgctggggcgggacctggcctggcggctctggtcactatggtcagtgatcgtgggggatcgcgaagggggagcgggcagggggcgcggtgggcggggtcgctgccggagcgggtgcacccgcgggacgggggtcggacgcgaggctcagcccccagctcgcccccgccgctttccgaccccctgaaatacggagtccggacggatactgagggccaagtcgcgcccccctgtaccccgtggatgtgcagctgaggaggtccagctcggccccgagcccccgcccccagcgtgtccgccccaggtggcccggggcgccgcctcgacggcgctgggtgggcgccctcgacggaagcagggacagggaggctgcagcactacgggtcgcctcctctttgttaagtagccccccagtcagcagtccacggccccacccacccgacggctcggccgtcaaagacctcctggcccctgccccaaccccaagggaggatctaggggttgcacggggcaccaggtcgtctgctccgtgggcgactagaccgtctccatctttggagtcaggacccacctagagaggatgcctcaagttgtgaggcgcatgagttaggggtcggggaaaagaaaatactcaggaatccctgatggagagccttgtctgcgcagaacgaggcccagagaccctctgagccaggctaaccctgggcttgggcaggtggggaaactgaggccagacagggcagggctggtactgattgtggtggacctggggcttgaacccaggctctggactctcagttcagtgctctttgtgttacatcggctcaccttccaggttgccgtggggtcaggcatcctgcaggggactgggtggcatggctgcctaagacccttcaaccctgagcagggggagcctgtggagtgagggctgggtggcttgagtcggggccacacagccccaggttcaagtctcacttccacctgttggaaagcgaagaggctttggttggtccgctctccccctcagcaccgttttgcacatctgtgtcatgggaaccatgtgakatgattagctggagcttttcctgtgacaacagagtcctggaaatgggtgtgcacagatgcctggttcttcaagcttagcctcctctctcctatgactgggcaggaaaatgggtcaccacggcagcatgctgccgggctggggcatgggtcaaagcctggtcatggcctggcacgatctgggtgtggcataggcagccagggcactcgagctgggactgtccttgccaagccagcctgctgcctggggcatagctgggggcctctggagcatctggaagcaccagcttcctgcttccacttggtgcccaagggtttacctggttgagctgctcctggaaggcagcccaggtgtttctgcatcacccaccagggagtggtggagctggggtaatgatgggcttagccacccgggagctggaggctggcatgccctctggccaccactcggcagctgagagcacagcagaggcggtagctgctctttgtgccatgcagtgaggccgctcactctgctccctatctgccctgactcaggagactggaagttagatggcagatggggtccaaagccctcacccctcaccgggggcttgggtgccttggcgaaggatgaagtggttaacccactaaaatatgacgtctgtctggtaatcacaggggtggaggccatgcagggtcttttcccttccctgcacatggcatttattgagcacctactgcatgcggggaccatactgggccctgtgctgcatggtgggtttttatgttgaacttgcattgtgtggatggtggtgacagaaggaatatccttggaaaatacagcatcttctttactttcctgtttctacatcactgggctaagcttgaggaagggcgccccgtggaagacacaaagacacttgggaaggtaggggtgagacaaggaccagacctctggcagggactgcaaatagctagggttctcgtgcactcaaggtgcatttcatgtttgacgaatgaatgagtcagacataagcaggaaaaccgcagggtcctattgtgctttgttctgttatttgtcaaacaggcccccagtgggcrcctttgtcaggcctgtgctgggcactgtgacactgatgagaaagacaaggtgcctgcccgctgtaggagctcactgcctgctggccaagacagctggacacaagcagtgtctgagctacaggtcatgcctaagaggcctaaggacattgggaacacagtgagaggtcaatatgctctgagggagtgggggtgttggaaggttctgcagaggaggtcttttgagctgagttgaaggatgtatatgagtgttcaagaaggatttgggaagggcacattccttttggcgggtgcggggggacagtgggctatcaggccttgaagcatggtcaagaatgggggattttggcaaaggtgaacagcctctgaagatgcaaggagattgagggaggcagggaaattgagtctagaaaatttggtggggtcaggatgttctgtgcagggcctcacttgctgtgctgtggggtttgggttttattccaccaatgagggggaaaccataacataattttgacaagtaagagatggttgacttggacgacctctctgacgatgaagtggacacagggttggaggtagccaggctggagtcagagcctggctagtcccatgcatgcatctgtctattcattcatgcagtgtgtgagcttcccaggctgccataacaaagtaccacaaactggtgtagagcaacagaaatggattcttacagtgctggaggctggaagctccagatcaaggtgtcagcagggccatgctccctctgaaggcgctagggaaggttctgttccaggcctccctccaagcttctggtagctccttggcttgtggttgcagaactttgatcttcacgtggtgttcttcctgtatgccggtctgtgtcctaatttcctctttttataaggacaccagtcgtattgaattagaggcccaccctactccagtatgacctcatctcagctaattacatctgcaatgaccctatttccaaataagatcccattctaaggtaccaaggattaggtattcaacatatgaattttggtggggggacacagttcaacccataacactccgtatacatttctggagcatggctgtgtgccaggcactgaggagccagcactgacaggcagacaaagtccctgcccccatggaattggcattccagtggagggagccgggcagcatgcgggtaaacaggcgagcctatgagatcatgccatgaagaaataaaggtgagagggatggggtggggcatgggaaggcctctctgaggaggtgatgccacctgcatcttgggaaaggcagaggaagaatccaggtcaaaggagcagccgtgcaaaggccctggggtgagagtgtgtcttgtgaaggaacacagagagggccacatggggtcagacatgggaggtcgttgtcaaaagattgagtcttggcctaagtgagggagtccactggagggcatgggggaagggcgtgcccttgctggttaagcagcttgtattggctgcttgtggagaatgggctgggatgggggcaggagtggaaaccaggaggtccttgggcagatgttggtgcagcctccctggggggagatgatggcagcttggaccaatggggaggtcggggagagaggagtggagaagcacttctgggtcttggcatcagctctgcttggatggggagctggagaagcctgtcgggggtggggggcgaggtgggcaggagagcagtcagggacacgctaattcagtaatgttctcagacttctgagcaggagtggctgtggagtcagagctctagggasaggtcaggcccggagaggaagatctgagggcctgttgggaggatgctgtatgagtctaggcataagataagagggaaggcccgggcccaggtcagggtctctgcaaagccagcyaataactgacccgggggggaagcctcagtgcagggtcttgtcacttttcttagtggagcagcagagaagggacatgtagcaggctgaacaatggccccaatgatgtccacgtcctaatccccacaacctgtgactatgttaccgtggcgagagggacttggcaggtgggattccgttaaggatactgagttatccaggtaggcgcgatgacgtaatcacaagtgtccttatgagagcaaggcagagtgatggggagggtgggggccggtgtgtaagccgggaaacccgggagcctctagaaacggaagacaagaaaatagattctcctctagagcccacagaaggaacaccactctgtcgccatcttgctttaggccagcaacactcctttcggacttgtggcctccagcactgtcagatcgcacatttgtgttgttttgagacactaagtttgtgctcctttgttacagcagccacaggaaactcagggcactcggctgcccccaaatccatggcttccaaacgattatcatcgctcacctcatcaatacaaaaactctgaggccaggcactcatacctgtaatcccagcattttgggaggccaaggtgggaggattgcttgagcccaggagtttgagaccagcctgggcaacacagtgagatcccatctcagaaaaaaaaaaaaaagaaaaagaaaacaatgttgagcactgcatgcatacrtatgtcacatatcatacccctgagtacacatctgaagggatatttccttccagcccctggagcagtccatagtgctgggcccatggctgcgggctgcttgaggagtccttaggtaatgtgggcaggtttcaggtacatacagaggcttgggagggaaaaccagaagacagtggggactcgtactttccctaaatttggaggtggggctcggtacatggattagggatggggtatcaggggcaacctctccagcgtcatggtkggagttttataccctggctctttaatctcagctggcgttccagggatgtaggaggaaggaccagcagacagmtgtagtgctggctcccaccaaagactcaaagccagtctgaacacaaagcccacgtcctygcgytttctgctagttcccagggttactggggaaaagcagtgattgaagaacatccttttctcactttgaaatrtattcctccacgcaagctgctaaatctgtttccaagccacagtgctatctgacttaattaattagcatctatttgcaaaccagcaattaaagggctaaagtccttttaggtggcctaattaggtctgacaggacattgtcagatgtggcctgtcctttctccataacatcctagaaattttcagccatggttttaaaagcaatcacgaatgagagtcagccaggtcaagcatcatgcctgatttatgggctagtaaattgagggtgtgcctggggttcttccgggagcttgagtctctggtcttgccaggggtgtggccagagccctgctagtggggagtggcaggggaccaacttcggcggacttgggtcattctggaggtgccaggtggggacttgaagggccaaagcgagaatccccttgtccccaggtcccccaataattacatctgggaccactggtgcgctggagctagcccaaggttccatcacctgcagatggaggtagcccacctgcgagacatttgtaagcaggggtagctcttaaatagtgtggagtaaagggaaaaaaatatccagaatatctatagaatagtattatgcaaacttaaaatgcatgcatacttacaagtctgtattttttaaaaagacaaatgcatttcatttataagaggtacctagagtagtcaawttcattagagacagaaaagtagaaaggtggtcgccagagactgggggcaaggggatggggagttagtgtttaatgagtagagattcatcataagtacacggaagaaaaaaaatgggtatgggagtttcagtttgggaygattaaaagctttgggatgggtgggggcgagggttgcactgttgtgtgaatgtacttaaggccactgaactgtgtacttaaaagtggttaaaataataaatttcaggttatgtatgttttaccataattataataaaaaacaaatatatctagaaagacatgccatagagactacycataggggcatgggggcatggaggaatggaaatagggatcagggacaaaggagaacaaaacctgaaaaaattccttcctgaggctgatgcccacagtgtgtcctgaaggtgtggtgagctcagctcttagcagatgggagggctccgaactgctatgtagtattttcttctttttggaaatgaagtctgttgcccaggctggagtgcagtggtgcggtcacggctcactgcaacctctgctgcctgggttcaagtgagtctcctgccttggcctcccaagtagctgggactacaggtgcccaccaccacacccggctcatttttgtatttttagtggagacggagttttgccatgttggccaggatggtcttgaactcctgacctcgtgatccgcccgcctcagcctcccaaagtgctaggattacagaggtgagccaccgagcccggccctatgtaatatttttccttaacttggctcttttaaagagcttaagtagatttgtcaaaaatgcaaattttatgttaatagagcaagtggaaacctaacttgactttcctggcataggtgccacccccgttcctaatccacctttaaatattcctcattttaactgttgatggcagttttctgcattgaagtacttatttctgcatgttgaagattaattccttaaatccattccactcctccattgattacctcctcagacaccctgcagaggaaatgtagctgattttgtgtcctccttctgccattttggttttggtttcgggcagtccaagcacaagcagtgttaactatagttgttctactttttgatctatgatttaaaaagacccaagccatcattttaagtcagctgtctgtataaacaacaaggcttttatacagtataaacaaattgttagataaataacgggactttggaatgaagtcagagggtgcgtgagtgggaacgaattgggcagagcaggtgcgcttgtttttcagtattacctgtttgtcctcttaccatccacacaaggcagcagagggagagctttcattctgaaatgtatagaatcctatgaatatttgctgtattagcacgcagtatgagggccaaattaattgtacaactagcaattgttattatgctagtaatgtcaatctttcatgatttagaatagaccaaaacatgttaactttttataaatttgcctttgaagtcaataaatctggcttggtttaagttaaaagaaaaaacacaaatgaaaatggaatgattttaagctgtaagtcagaggcctgcccactcttgagaagagagactagcaaagtagaaaggagttcaaggtatgctagagactgtctttctccttgatgcgatcagaaggcttgaaggaagtggaacggcaaatcactttccttccagatatcactgatgtattttaccaccgtgtctggatattgcctgtaaatcgtgtcctgttccacctgtgatgagcacgtcttgggctagaaaatgctgttgtggacactgagcccccaggatcaggagctggatggagaactttcctgggtgaggcctcaggggcaggaggtggggacctggcctgttgataagaaggccctaggctgccctgtgtggaatgttcctttgtgtttagcagccttggtccctcaagacctctgygctctgcctgcctagcagtttggcatggtagaatttccatgggcttcagagtcagatagatctgcctaaaattacttcttagcacagggcacctgaccttgtcagtagaatgggtataatacccatctcaggaggtggtcttgaggattaagtgagataatggggacgtgtcagcctctctccctgagcctagcacatagtatttgcacaataatggcacctgttatcacttcagacctcttgggcctagggtagcagattgccagatcatcttccatgtgttgactttcagcctcaygctcgcaggatggctgctgtggacattgcatctgcattgacggtgggaaggagtagaacgttccatctctgttccttttatccaaaaccaaaagcttccccagaagtccccagcagacttttcatgggtccagctggccaaccccagctacctggctgcccatagctgmaagggaggctaggaaaatgggaaagaggtaggattgttgtgacctacccagtcatttttcatcatgttgtgggattccattagtgaggaggaaatgggtcacagctgatgagacagaagcccttggcacctgcccccaagtgttgtctgattcctcctgatggctttcctgttgctttgccagcccacrctatgatgtcagggcagaaggaaggaaggagcctggggctggattaatttcgcaaagaagggtcggtacagagtggaagcttctggaagcaaaatccagaatcccttcttcccaccccccaagtgtttgcatgccctgtttcytctttcctcttttggaaacattcttcatccagttcttttttttttcttttcttttyttttttttttttttgagacagagtctcgctctgtcacccaggctggagtgcagtggtgcaatcttggctcactacaacctctgcctccccggtttaagaaattctctacctcagcctcctgagtagctgggattacgggcatgtgccaccatgcccagctaatttttttgtatttttagtagagacgaggtttcgccatcttggacaggctggtcttgaactcccaacctcgtgatccacctgccttggcctcccaaagtgctggtattacaagcatgagccaccgtgcctggcccatccagttctttaggacaatgaattcatcctctattcttaagctatcttctgggaagttgccctgaatcccccatgtcggggggagatcatgtttggtgccaccagaaagggcgaaacagaataaagtgtaagttcaagggagagcacaagcctgactcagatgaggtggggagatcagggaggcttcatggaggaggtagcttttattcatttgtttgaaaaatatctcacccccttctccgtgccaggccctgggtgaatggaagatggcagacagtatgacaagctgtcattccaggccccccaaaaacacccctgcccagtcccagcttctctcctgacctgatactggacacaggatcagggccagatggaagtttgccatctgtcccatgtggagacagaagcaacaaaagtcatttaggcctcattatctaatctcatggcccagctttctgcttctgtgggctgagctttggaaaaagctaatcatcaaaaatccggatrtatttcttcrggtggagaaaggggtttgtagcatcagagggctcctctctgagcaggatggtattgggttgagatcattatctagtcagtgatgaggctgagaggctaccagggaaggccactgtggccggtgtgacatgaaaaaggccagttacaactgggtgtcaacaatgatggtgataaatgaatggaaaactagattactatttacaaaaatcccaattaacagtgaccatccacagtgctctattgcataaaaatggtctccctgggttgtgtgcaggagccagcctcatttattttaagctgtaaactataagtggctttaacaccatgtctctcacagtatgttcatgctgcaatcaaagcggctctgggtgggttggaggctagagttgcatctcctgcttgtttgagccctgctgacaagatagcacaaggcggagaccaggcccacggggagttggctgctagaacgtgtctcctgcagtttccttcaccctgaagcttccttttgcagttgcctcctctctgtccgccaatttcttctctggcctggagagatcctgcctgtaggaggcttgtctttctgggttggaattgacctagacccagagctgggctgtagtgtaaactttcgccggtaggtggtgcatgaagatgccctcctgccctgtgctccccgagctcagatctctgacaccttctctggcatctccatgtaccagtgccacacactgcggcctcttctggtgaccttatcaccccctatcttgattgtttttccctgtagactgtgagccttgtgggtgagggagtgctagacgtccttccttctgtatttccagcatgtgacacagtgctgggcatgtggatgttcaggaattgttggatgagtaaaagaatgaatgaacgaatgaatgaatgcatgaatgagagaagagggatggaaggagacaaagggccttatcctccagcatgaaggttcgttaagttygaggtacacattctgtgaaatgaatcaggcttccagtaaaaagatgagtttccttataaccagggctatctcttcacgatggccccgaccctgactatccctgtyctggaaatgcggtgatcccaacgggcgtctagratgctggtaacatactcccagcatgagaaggtgggaaggtctcattcattgttgtctgtaaccggcagttcagaggccaccagctcggggagtcccgtccgttgcttttgaaattgtcacagcatttcttccttccctatctttcagagtgaaacatctttcaacctaatatcagaaaaatgtgacattctatccattcttcgggaccatcctgaaaacaggatttaccggaggaaaatcgaggtgaggcagagggcagggagaagagcatccgaaactaaacaggctggagttgggagtgtaatggtgatgcctctttgaaggccgatagtttgggccaggttcctgggcaaatgaaaggattcctaggatattttgatgttggacatttgccttagcrataaatcctttcattccaaaaaaaaaaaaaggatttttttttgttgaaaagtttagcactatcctaatgttttatttactcaccaatacttcattacaactctgtgaggtaagtacttttattacccccattttacagctgaggaaactgaggcacasaaattaagtggtggccatttagttcatgagtggccaagctaggatttaaacccaggcagctgagtctcaagccacattcataactgctgtgctgggagacctcttggagggaaagtttacgccagtgaggctaaagggatttgtgggaaggctgcagggatcgctcatggagcactcacccgtggatggcaggaggagctgggtgcccactctgtccctctggtaggaggccctggccgctctctgcactctgcaggtcttcctctcgctgcaggacaggcttgctctggcactggccccacaggcccttcccttcaagttcctctcagacacgcagcaccgttgctgggcctcattacttatcctcagagactctgataggtccagcttgggtcagatgtccatcagcagccaggggtagtggtgtgggcatcatgtgatccgaacgccgctgcggggcacttccagggaaggagctgggctctgcagcccactgacttttgtgtcccccagagccctcctgggagatgagccaggggctccagagagtgcctgcctccccactgccagctggcctcaggtgggcccaagtcggctctgagccttctcatggctatggggggaacaggaactccaagaccccttgaaaaccatcctctgctgtcaaaatgctgcttatagtcccatgaggcaggaaaggggattccaggccagttcagagggacacctacttactgctaggagtggagctggagcccacccctcccgcccctgctcacacatgcaaccccctaccccctacttctgccagctcccgattctcagtgctgctcccccaggaaggcttccccaacttccaaaatccagtgcaatgccagtgccccgtggcacccagccaggcactcctgtcccctcacaatgccactgtctaattatccatcttccctcccggaccgtaggctgcctgggggcagggacggacacacaggacaatgcagtgtatttttatatcaggggaatgaacgagggtgggaggctgaggggatagcagcctgaagggagggagcagacatttcctgggagagatggggggcacctggccagtcccagtgcccaaaccacacagagccgttgttggtgcaaatgsccacatttctttctgtccccctcaggaactcagcaaaaggttcaccrccatccgcaagaccaaaggggatgggaactgcttctacagggccttgggctattcctacctggagtccctgctggggaagagcagggagatcttcaagtgagtgccggggccccttggcctgtcagggctgtgttctctgtgctaggtcagcctcaagtctctcggaggttttcgttacactcaggctggttaacccagagaatgagctgaagagctgcctggcagaggcgtttgatgttgggggtgcccagctgcctgctgtggtgaagttgggggcagccaaggggtggaggatggaatctgtgacctcccagatgctttccagcctctgcttccaccacaggcctgggtcagcccaggtgagtcgcagggagcaggtacttcgtgacccactctgaaaagaaaagaaaagacaaacaaaaagaagctttgccccggtgttctgcataattcctgttgaccttggtgtggagtgtgtgtgacccaggcattcagctggctgggcctgtccctgaggttcatgctggagaaggtctgtgtccagagctgcccctgtcatctcggctagttcagggcttctcatatctgaagtttgtacaaggcgcctggttctctagtccatagcaagaaaaaaaaaaagcaaagacaaacaaacccctgagacctggcttggacccgaattcctgtccagtgggagcagggcagagcagggactgcttttgtcactggctcccaggagatgctgatgctgctgggcctcaaaccacgctttgaggagcaaggagctaagagacccacctggctcttaacctttgggggtctcagagcccttagaggctttggtgagggccatgggccctcctcatctgagacccgcaccgacatgctctctggaaacagtacggggggcagtgggtcccagagcacttctttggctgaggcaggtttctcaacggcggcatgactgacgttttgggccagatcatgctcacggtgggggctgtcctatgcattgtaggcctattaacagcatccctggccccctacccgtgacatagtagtagtaaccccctccccaagtcatgacaatcaaaactgcctgcagacactgccaaaaacctctttcggtggaaaaaagtcgaccctatctggttgagaactactaggttaaggccatcgtctcctgttcaaaatatagatgatctcaaagagggtagaagttgagccatctgttccttggctgaaccattcagattgtttygccagtgacagactggcagagccccttttgatggagagtcagctatctcaagccattcccctccccaactttctcacagccctgtggggaccaacacagcacagtgcagggattatgaccccaacttcatttccccacgacccatgtcccctggagttgtgccatgcagcagccctgggctctgaggccagacctcactctcttgcttacttgctgtgcgaccttgggcaagtgacctgatctctctgatcctgttttcatgcctgtggaaggtggacattataacacacttcagggggctattgtgaggactcagtgggtgatgctggctaagcccagcgcctgcatttctctctgcaccagcccacgtgctctgtttaccttcactccgtcctgtctccccactccagtcagcacacacgggtgccatgctcagaccctkctctaggctgtggggatactgcagtgaacaagagagacaaaatccctgccttgtggggcttgcgtcctaatggtagaagatgcacagtacatgagtatcacgtttgaggtgtcggatggtgataagtattgtgggaaaaatcaggcaggaaggaggccgaggagtgcaaggtctggggttggcagtttcaagcagggttggagaggtaagggcgkcagggcacatagggccttgggcctttctaaggaccttggctttcagcctgaaggacacgggagccaccgagggattgcgcagcacgggggacctgccctgctggctgctgtgtgcaggacagacgggggcggagacacagccagggagatgtggtcggggagagatccagaggggagatggctgtggcatgagcaggtggatgcagtgggcatggcaagaagtgggcaggtctagacacctgtgaaggtggcgaaaggattcgtgcccgacycacatgttggacatggcagagtcaagaatggctcccagaggtttggcctgagagttagcaggatggagaagccgtttgctgcaaaggagggctgaggaatatcaggagctgtgttttgcgatgctgtctgaaatgtccgggagccatagagtaggggtgtctggtgggcagtggaggtataaggctggcgttcagcaggcaggccggggcacacaggtgataagtcaaaccaaaaggctgcatgagaccaccagcattttttctttctttttttaaaatattttccttctctctttattttttcttaagagatgggtcttcctatgttgcctaggctggcctcgaactcttgggctcaggcggtcctccctcctcagcctgcatcttcttaacacaaaaaccgagaccatgtcactcccaagcttgaaatatgcccctgacctctaggagcagtggaaacccctgacaccaacgccctccacaccaggcccctgcctctcctgccccgttgcctrcccaccctgagttctaggcacagggactcacttatcctacacacaccagagcttgcaggcatgacatgccgcctgaygctgcctgggcctaggtagccctgcttctgacccggctgtgggttccttgggccccaggcaggctgcttcactcactcctctgtagctcctttccccagttgaacagtggccatagccctgtcacggacrttaagtgattgactcgtgagcacttggaacactgacctggggtgttccgtgctagctcttagcgtcagcgtcatgcatcctccacaagccactgtctccctgtgtgcagtgagcccagagccacccaggcagacacttgttctctgctcagtgctgctgcagggctggagcaagcgtgttgcagcagtatgcttgttccagccctgtatcttgcatacttgctctagaagtatgcgaagtacttgtgtgtgccagaggcttggagaacacgckccgcctctgagggcagccactgttactaccmcatctgatgagcaaacagagcctcatagaggtcaaatgacttgccagaggtcccacacaggcttgtgtgcagccccagcggtctgaacttgcaccccytccragccccagtgctrtccttctccctatccctggcttgcctctcgggggtgcatgtcctggcctgggggcttgcccccttctgacagagcctacgactgcatgctgcttatctccgtgccccagtgcctggcacagaggggcccacaagtcactggcgaggaatgaatgtggaatgaggcagaggtttgggggtgggagggggggcaggagagctgggagcagagcagtgcacttcatggccatgcagggacagagtggctagaagagggtgccggcccttggagcagccctggaggactgcagctgcttcctggagctgcttctagtactctggccatgggccacctagccgcagctgaagactgaacagggggtgctgatgagggtggctcctgagtgagaggcgttagccagcactgaccatcagatccttgccctggccaggaggggaaacctaggcagcaggtaccactgcagtggaggcctcgtcctcccaggcagctctccrttcgccctcagcacccctgcagtcaaggygtcatcaccatccacacttgcgccaaagtggagcttatggccaaaagccacagggggacttgacagggctggaggggactgcggctagaagccagcacaggctccatccctccaatccaggcacctcaccctgcaatcaggacaaactagtcctggcccaggcaggactgttagatatgccaggaccaggcaggggcaagcggcatctaggcaaatactcctccttctgagttaggagaccagcttcccgtccacacccaccaccttctccctcctcactgccccctgtcctcctacaaggcaccaggcttttctggagcacagcaccttctgaggtggcccaggcctctgtattcccttgtgaaccttctgcctcctgggtgctgtcagagcctcatctccgttcccaggcaaagtgaggggctggagaactaggtgtggccttagtgttctgcgcctgccagctggtcacccagggccgctcacctggtccttgtgggaggcagcccttcctccatacctcgttgctgccactaaacttgggagtgtcctggagccagggccaggcccaggcctgggtttcttgccataccccctgagggcaccaggacaggtcccagaaaggggctgcgccatgagggggcctgcagtaggtgcagagagtaacaacccagcatgcgcagagcaagggcctgtggagtgggtccccaagggtaacttggtgctggcagatgcttaacagccggctgtgggcgtgcgggaggcctgatgtgtgttgtcagccgattgctgtggtgtcagtattcaatattatcatgactgagtcaagctgccctcatgaggtcactgagtagggagttggaaaagatgcaaaatcacacacgcccttgtcgtatcgtctttccaccatgcacacacacacaatgcagctcagccaccagggcccggcagggccagggtggagatgtgcacggtgcaygtggctgtgtgttgggggcaggggcgggaggttctgcggctggactagagatgaggttggtgggcgcagtgggttgagagggggacgcacagttgccaatcacagcactctcgctgtgtttccctgtaaacactcagtcttccccctctgtaggttcaaagaacgcgtactgcagaccccaaatgaccttctggctgctggctttgaggagcacaagttcagaaacttcttcaatgctgtgagttcacctggtccctccttccacactggcagagcagacaggagtgggcactggctggagcccctacacagcccacagctctgctcctcctggctggggaaggacagagggttccttcctgcttgtgggggtgtgtgggcacagggagccctcaccctattccctcaccctattccatctccacctcatgcctccctatccaattagtgaaggggcgggatcgaggactctcagacgcttgccactctgagtgtgcacgtgagaatccaaacccaggtagtcatggtggggagacccaactgccgctcccaaacatgcctctggactagtgtacaaactgcaaagtcttgctaaccctgggttacttagcttaggcagaatctcagactgattttctaactcaacctgagaatctacaaatgaaaatgcacgtgagggcttcacgcgaagggagggagcggagggagaatgcagagggagggytggggcttgcttggcctccctagctgagggccgggcgggcgcagttttacagtgtggtggaactggtagagaaggayggctcagtgtccagcctgctgaaggtgttcaacgaccagagtgcctcggaccacatcgtgcagttcctgcgcctgctcacgtcggccttcatcaggaaccgagcagacttcttccggcacttcattgatgaggagatggacatcaaagacttctgcactcacgtaggtgcttggggtctcagccccagccctgggctctgctcctgtggccctgtcctgcagacttcagcacccatccgtagccaagggactcgggtgtcacgactgcccttgcaattcaaacagagctaggtcagcaagctgcagacaggtcccacctgagctgcctgagctgtgtggcctgaggcaagtcacttcccctctctggagatttcccatctgaaaaataagggatttggactggcctgtttacaaaaccacagtcatagtccaagagtcacatttgcttgacgtgtttatgatgcatggtatttaccagaaagagttgccgatatttaaaaattaggcacttttcatatgaatatttggatttctgctggaaagtaagaagtacagcccccaggtccttgctcttgcagggcagtctcagcaggcactaagcagcagctgccctctctatgtaggacatacgcctgcttgccaccgcctctgcttcttccatcgtctctgcagcacccggactcgcaccctcactcaccagcctagcctctgtaaacacttaagcttgaaaggcacccctggatgacagggtgccttttatctctaagattctttgatgcccaacctgaaaaatgtctgccccccgtttccagatccctctaaattagtagcctgctgtcaggtgtaactacaaggtctagaatggaaaagattcaggttcgattcttgcaattgtagcgatttctagctatgctgcctctcaatgaggctgtttcccgtgtggcatgagaacgtccatacccaactcatgggatgttgtgaagatgacgtcccagcacagaggctgtgaccatgaccctgagagccagagctgaactcacttgtcctctgccaggcctccctcctaagctggcttgttttcattttggcccctgcaggaagtagagcccatggccacggagtgtgaccacatccagatcacggcrttgtcgcaggccctgagcattgccctgcaagtggagtacgtggacgagatggataccgccctgaaccaccacgtgttccctgaggccgccaccccttccgtttacctgctctataaaacatcccactacaacatcctttatgcagccgataaacattgattaattttaggccatgcagtggaacctgtcacctaatgggactgcattctgaatggaacattccggctcttcaattttttaagcaatttagactgtagcaagaaaatgtgcagccttttgggcaaagcccctgggaacgaggcctayccactatggactatggtaacttggtaggatttttagtatttattttaatggagggacaaatgctttctaactgggcccccractccgcaccccagttcgcagtgaggccctgggtgggtcacctgccctctctggacttgtttcttcaactggaggaggtccctgcctatgctgacattccattgtagaaaaatggggcctctggtgtctctttaccaggggcagtgcctctctgcgggggaggaaaagctcaaggttagctgtcttaacccaagtgacttaccaggcctacaaaagagtccagtccagtcacttgttggactgggctctgacagatggcctattgaggtcaacttgaatgtgagggctrcggtgtggtttcaaacattcatgatggatgtattttcctacccctaacttaaggagaaaaaaaaaaagacttcctttttttgccaaagtccagaaaggggcctttagcctttagtaggagctcaaattgttggggcccctctacctctctcagggctagaactgcctgactcttggtggacgagcccttcagggttctgctttcagccccacctggacagaggcttacaagactagggtctggaccagaatctgtgtatttctgtctgggaccaggaagcygcagctgtcccatcatccccagcaaatcctagaagtggagtctggatacttcaaggatagaagtgttggcacgcacagccatggacccagctgagcagagcagaygctttgcaggctgcccctggcttcttcctccctttcccgcttctgctctctttatggactggtcagagggtaggtgggaaagaacagacaagccatgggaagttggcagtggggagatttccactgtggaaaccgcctgggaattccggccagcagcttcctccttcagccacctggccataccccttaaataagcccctcaccttgctgcctcaggaccttcaagattccatctgtgggctggccggcaagatggcaccagtggggacccacaccctggctgggcagaggtgctgctagcaacctctcttcctctataagaggaaatggaaaatgcagggtgtggaattgccctttggggtccttccttaattgaaggccaccttctcacaggtttcattctgcagggatttactggaatctattggtgctgctgcatgagtctgctgacaacctgactgcacaaggactgggtagcagactcctcagagtcctcttgacacaaatgtcagatttgtgtcactcttctgccttcgtgaaaagccaatagcactctcagatatcaggggattttagttccaagcagggaccctggtttccatactgccctcagctggagtttggatccaaaggctctggctaagtcattatgtcactttttcacaggaatgtaaatttgactgtcacctctgaatttgttcagtgtcccaccatggtctatgagaagtacactggaagcgtggggggaacacatgacatgatttgtgaatatcatcatctttgccagacaagtctccaggggatccctgtttcccaactgaaaggtgtgaacggacacacacacagcctggatgacgccttggctgttctaaggggctgtaaggtgggctctgggccttccagctaggctctcaagcacagcagaagcctcactgggctgctatgtctctgtatttgtggcttgtgtggtagcctcagaagcagagctgtttggcagactggctggagaaattccctctaggagacttgcctgtgctgtgcttccaggtcacagagccccccggaaactcacaggggccctcttcccagaaaagaatctattctatcacttcagaatcaggacactcaagctctggcagaggaaggccaagttactttcatggtcttaccctctgcttttcccctttttgcaaaaaaccactggccaaatccgaaccattgcccttgtttcccccacgttctctctcagatctttgtctygaagggaaaacatagtggatgaaaaggtgtggcaggctttggcaccttgttaaaatttctagtcatctgtggatgttaccttgcttgtccacagcagccagtcaccctggccagtcccacttcctggataattctctaccctcaccccacagagccatctctctccagaccaaaagctggaaggagagttgctttgagagcttgtttttacaactgcatgtttattatgatactttctctccaaaggaaacttttaaatcaatgggaacaattagcaacagaaagagcacagtccctgcttttgactgggttcctattttaagcacaaatgagagctctggagccagaatgccagggttctaacttcagcattcacttactagctgtatgatcttggccaagtcacttcacctccctgagccccaattcccaagtttgtgaaatggcaacaatacctatgtgtcactggwttattggttaaaacagaatgagattccttgtgtgaaaatagctattatacctgacacactcatcgtatgggctctgcaaagggatattccccaacctgtccttccygacaggaagcatagggcactgcagatggggaagcatgtcaccttggcagtgactcggtggcttcccaagcaggagtgtcaggggaaccatgagagagagtctaggasmaaacacatcaccaccctgagcagatacaggagtgrggagggggctgtaactcagtgagtggcttccaggggccccaggccctgctggatgtgggccaagccctacagcttccctaggcagtaagtaaaaacattctcctagcattaaaatggtttccataactacttttgtcctggcttcttaatactgggtacctggcatgcagccaagaactctgcttttccgtggtgcttatgtattaagtagattagctggggagggatattccttgtttaatggcagatccaggacactccggaagctctgcccaccaacttcaccttaccaggcgagagtagcactgcttggaaggctgctcctgccttttaaagcctgtctacgtattagctcctccaccaaggaaaagaatttgctgttagatggctagggcaggacacggacagtcatcaggggatctatgtttggcttatggcaagtggcttcactcccacggctcaggtgccattaggggatattaagcccgcttactaaccccactgaccaccactgcatcatttggaaaatggagagtctccctgccattctctgatagctgtcagtcaggagctgacctcacagacgggcaatttcccctcctattccggtcactggtgacactgggggatgggaggccattccttggcaacacttctgagactgaagtagttttctgaacttgtcctgggcccagaaggaagatactaatcccacctctgctacttggctgctgtgtggccctgggcaagtctcaatcactgggtgtctatatgctcaagtacaaaaaacactaataaagacttatagatgggcacagtggctcacacctgtaatctcagtactttgggaggctgaggcaagaggatcacttgagggcaggagttttgagaccagcctacgccaacatagtgagaccccatctctactaaaaaaaaaaaattcagccaggtgtggtggtgtgtgcctgtagtcccagctacttgggaggctgaggcgggaggactgcctgggcccaggagtgtgaggttgcagtgagctgtgattgtgccattgcactccaacctgggcaatggagcaagaccctgtctcaaaaaaaaaagaaaattatttctcaggaccttcaagactaaatgctaattagataaaagtgccaaccatgaggctgagagaggctagctacttagatcttggggtatcttggtccctttgtgtatcctcttcaattccctagcaccccttgaactaaacagctgtattgtattgtgccccgacgaatacctgtttggaagccagacagctgtgcagaaatcatctatgcttctcccatggttgtgggagttgtggatactcacctacactgatccagacaaagctggggcagcatcaggaagtccctagttccctgagcacatatttataccaggctgaccaagccttgagttcctcttctcccaaggagctcagctaagggaacacagcatggcaagtgctatgaagagggtaagcacgggacactaagggagccccaggagaagcactgcttccccttagaggctcaggactagaggacccatggcagtgctccaggatggagaaggccaaaaggcaatccagaccgagggaaaagcctattctgcacaaaggctcaggacaagagaaggggtgcatggaaccgtgggcaggagcctgctctgtcaaacaggagggagtggagacaaggctggggctagatcctgagggcttcacacgccagacctagcgactgttactgttggctctgtgatgtgagggaagcctgaagacagcaacctcatccctgcccacctcccacggtggctcagacaatacccaggagagtggagagagctaaggagctattagggtgctgctctgggtaaagcaggaacatgcacctcttgaacattccagcctcttgctccattcacactgtccaatcttggcctgcagccagaggcctgacactattcctgtcctttcaagggcttagcactgtgctggcccaggagaatcactaagttaataatgaaacaaactacaccaccacccccatcttctatctaaaaaaaaaaaaaaaaaatcaggatgacacaatggctctgaccattgtttttaatttatgaaatcaagtttaacacacaagaagcctataaacactgcaatacagaaaaattaagctgctgcattgaattcttactccaaaacaatgcaaatctgcatgaggtctctcccgctatgggtgtgagtggaagagagggagacttttttacctggggttggtggtggagtgaaacacaagggtgggagaggttttgcaaatagccagagaacagaaaccaatgtgcagtcactgacacacttgaccacggcagttaatttgcacttgtacttggctgtggctgttccggctgtggctccttcggcttctttgtcttcttcttcttctgcttggagagacagctcaaagcagactcgctcttacttggggcagacacaagcaggggcggcttgccagactgagtgggatacttggttttctggctctccgtaaacagtggctgggacagcaggtggcgcagctccttcttcagaaccttcatctgcttttgtctccgacgttcttcttgctggtcagcttttcctccttgaaacacaatacaaaaacgatcctatttactatggtttgtagaaacattttgtttcccttgatgggtaacacagtgaaaaatgttttagaactactttagggaggcagggttcaaaagttctctgaagaagctagtggtggcttggcaggggctgtaaatggataacgtctaaccatttgcaggggatacacaggaccgctctgtccttttttactccataaaaatcctccaagactggaattatctttacagatgaggcaactcaggcttagagaagtcacctggctcacatcacagagccagtcatcagacagagcccagaacccaagtctcctgactgaagatcacttttcttcctatgacccacccacttactgcccacctggggtttggtgagttcacaattacaacccccacctccctgccgccccaggagacactgaatgcttctttgtagcccagctctcctatgccttgccaccagtgctgtgactgcacatggagaagctggcagagccaaaaggttccacctcagtctgtcctcaggaagggaagccagggcctccacatcttcggcccaagccccaaccctgagccaccagaaatagctcactgtcatcaagcccactggtttggctcctggcttccatgctgagcagacagcagttaagtctgcctctgaatttgctgacttgggcaccgaggtgtcaacatctctgctgagctgcatacttggtggtgtggaaggagcatggagttctagatttggttctaccactttttagaccaggagttttctcaagcagggaccgggcagattcatccctgaagcctcagcctgtggtcacatatagagtagcagctctggaaatgccttgtgacagagctgtttccctgcacaaactgcctctgctgtggtatctagtttccatatgtaaaagaagagtacttcctgctgtgttcatgtcatgaaagtggagaagatcaaatgagataatggcatggaagtgctttgtcagcttggaaggcaggtgtagtaggaaccataatgacaaataacttaaaatgtaatactttctatttgccaggcaatgctataagcacttaacattttttaactcaatcagtcttcacaacaatcccatgaagtaggtagttgactacttccattttatggaggagaaagctgagaacacaacagaggttaaataacttgactcagtcacatagttaaggcaatgagccggcattctaacacaggcagcctggccagagagcctgctcccttcctcactgtactccactgcctgtccatgtaagaggaggcagctgagggcacaagacagagacagaggaaacaaagactgaccgagggcagtaggctcacctgggaccagggcctgttagcaaagagggggaaggacgccttgctgattttgacaagacccacagtagtagagatggttccaacaaagcaaaagttaaagagagatttcaacttcctcaattcccatcccgcccaagggcttacccttatacatgtcttcttccagctcaatctccagggcagctgctgcctgctcaatccaagagttgtgcaggcaagcctggaagttccgatactcagatttctcaatctgtcgagctaaacggattcgctcctggggggaagtaacagaaaatattcatctgaaatagagttcaggcctctgggaagcaaagtctcacttgagttgtgtttgtgtgtttaaggcaggtatcactctgctgcccaggctggagagcagtggcatgatcatggctcactgcagcctcaacctccttggatcaagcaatcctcccacctcagcctcccaagcagctgggaggcaccaccatgcctaggtaatttctttttttttttttttttttttttttttttcgtaaagacagggtctcaactgtgttgtctaggctggtcttgaactcctgtgctcaagcaatctttccacttcagcctcctaaagtgttgggattacaggcgtgagccaccgtgcccagcaagtagtgtttttaaaaagctcttgagccgggcatggtggctcacacctgtaatcctagcactctgggaggccaaggcgggcggatcacctgaggtcaggagttcaagaccagcctgaccaacatggagaaaccccgtctctactaaaaatacaaaattagctgggcatggtggcgcatgcctgtaatcccagctacttgggaggctgaggcaggagaatcacttgaacccgggaggcgaaggttgtggtgagccaagattgtgccactgcactccagtctgggcaacatgagcaaagctccgtctcaaaaaaaaattaaaaattaaaaattaaaaataaataaataaaaagctcttgagatcagtggtgagatgcagttcagttcctgttgaaatgcatttattgtttcctgataaaagtccagtgggcaaccattacccgtctgtgtgtacacatctaaacacaactgccagctttcccaacaatctacctgaacagccacatcctttgaaaacccttactggtttgactgccaacctataggtaaccaaagtgaagtctttacgcagatgccacagcttgcttccacagctgagctaagataaaacatttcaactctccctctagagggttttggggttacagtgcagtggcaaaatgagaaggatcttgtgatgtggggaaagaaaccaagggaagcctgggtggctcctaatcctccttactaatgggaattctctatgatttccacttttccatccttatctccaccctatttccccacacagctaatattccttttgagccagagaagccaacattccttgaactgtgccatgcttttgctccctcaattcctggaattccacctcctctgtacccttccacatctttgccagcaggaagctgggatagaacctcttctcctcccaatgtaaccatatgcccagtaattccatactgctccactgtacctgaactttattcacagctggcaaacctctgggaaggagaacccaccccactttggtcactaatacagtgtcccatggtaagcggcacctacctggggaatgcctgctgagttaaaacccaaaagacagaatttactggcacctgctccagggatgtgccaaacctgtagcatctgcctcagcaggaaacactaaccacactgtctacaaccctctgacaggatatccagacagccatgaccactgcactgtctggtgaggaggggggacttcagggccagagaaggaagaaatggttcagggagaaaatgcctcccaccttcagtcactccccttttctcccttttcccaggtatgttgctctcaatcctttctacaagtctccttgttcagctgttggcagaaccattccttagttttcaagggttatgctgccagagtcccaca

SEQ ID NO: 97710 - DNA, 35603 bp, Homo sapiens
cgaggcgggcagatcacctgaggtcagaatttcgagaccagcctggccaacatggtgaaatcccatctctactaaaaatacaaaaattagccaggcgtggtggcaggcgcctgtaatcccagctactcgggaggctgaggccggagaatagtttgaacccaggaggcagaagtggcagtgagccaaaatggtgccattgcactccagcctgggtgacaagagcgaaactccattttaaaaaaaaaagaggccgggcacagtggatcacaccggtaatcccagcactttgggaggccgaggtgggcggattacgaggtcaggagatcgagaccaccctggctaaaatggtgaaatcccatctctactaaaaatacaaaaaatggccgggcacagtggctcacacctgtaatcccagcactttgggaggcccaggcaggtgggtcacaaggtcaggagatcgagaccttcctggctaacatgtgaaaccccgtctctactaaaaatacaaaaaattagctgggtgtggtggtgggcgcctgtagtcccagctacttgggaggctgaggcaggagaaaggtgtgaacccaggaggcggagcttgcagtgagccgagatcgcgccactgcactccagcctgggcgacagagtgagattcgtctcaaaaaaaaaaaaaaaattagacgggtatggtggcgggcgcctatagtcccagctacttgggaggctgaggcgggagaatggcgtgaacccgggaggcggagcttgcagtgagccgagatggcgccactgcactccagcctgggcgacagagtgagaccttcgcctcagaaaaaaaaaaaaaaaaagaaattacacatgatctaactggaatgtggtattctagattcagtttgggtatagaaaaaggaaattagtggagaaacttgtgaaatccaaataaagtctatagtttagtaatagtattgtaccaatgttaatttcttagatgtgacagtatgtgccatggttatgtaagaagttaacattaggagacaccggtgaaaggtatacaggaatactctgtactatctttgcaacttttttataaatttaaaattattccacaatttaaaacaatttaattacagatggtgctcccctttacattctcactcccccttagaattctaatcatgtctccctaatcattgccccaattcaggtaatgccagcctaaaactttttaaatatcttttttaacccctttctatgaactgtttgcacagcccacctgggatttcttctttaccaagacatgaaaaactagatcacacttgggaagttttaactgttttctgttcctaataggtttaccatatataccgggggtaccttgaatttgaacttcccaaagcggacaagagaggggttaaaataacatgctctgggtctctggataaaagcaaggggacattacagaaaatatgttgtatattaataaattatctaatctctggccaaaaagtacaatatatagaaaatcaattaacagatgttaactattggcatctcaacagtaacaagctgcactgaaataaatgccttcgctctgaaaaacatgatgcaaattgctcaactattcaagataacaaaaactcataaaatcatatggaaccgttcaattagactaaatgacaaaacatgtatctaccatgactatttagtttctaatagctaagtgaatacccatctttctctataaaccctatcttgtagaacagtcttcaaaagagccaccaggaaaacatcactatggtgctgtaacaccatatcaacagctcaggcatgcgtgtgtgtacacacacatacatacacacaaactgcaataaggttaaacaacctcaaaagtttgaaaactactatatgaaagaacattagtgaaggctaagcattcagaacccttcaaagaaaaagaaaccaaagaaaaataactgaaatttaaacccaagttagttaatagctaaagtcatttaaaaggtaaaacggtcaggcacagtggctcatgcctcttctcccagctactcaggaagctgaggtgggaggatggcttgaggccaggagttcaagatcagcctgggcaacatagcaagatctaataaataataaataaaaggtaaaatgatacactagagtccattaaggtcataaaatctgatctattacatggtactaatatgttgatagtattaaataaatattacacaacagtactctgacctggaccacttacagaaagatgaacaagaagagtaattcctctaaaatatttcaactcccacatctctattcagccaccaaccatactttacctatttacaagtctttctgtaatacaggactgtggtgagattgcccaggacagaatgggccctcaataaatgctttctgaatgaatgaccaagcggcagtaatctatctctgaggtattcttacaaaccaattcaatatcaagacctcagaagcagaacatgctgtatgccatgctaccacatttaggggcaggcaagttaattgaaaaataattaacagcgactaatgtttgttgggagaaaaaaagtcctatcatgtaagtcagaaaaataaatgtaaaaactataacttgaaaatggacaaaaaagtgaatctacttataactttctaacattgaaatacaagatgttctttaaggagtctttcattatccagaataattttacaaagaaatttgataccaacttaaattagtaagttagaccaattagtgaatggaatgaagtccaagcccaattatgtgttcaaactgtgtgtccaatgccttgggtgattttttctcttcaagactgcagaaaaatgcaaaacaaccctcttgactgctgagaaggactaaaatcatttcttttcctcacaagtatgtgcccaaaagcaattactttctgctcccatccatcacaaatcaacactacctcccagcttcgcatcccccactttccatccccatcaaagaatgctgtagagtatctgaccactttcatttcacgctataagaacctcagattgcaataaaattacaatgcaacaaaaacaaatttttctaagtatgttcttatcccccatggtgttcctacactaatttagctccctattaggtattaacaatcaaggaaatcagaacactctcaatagaggttacaatagaaattacaaatggcctttttttaagttgttgttgttcatggattccaaaattcaaagtacacattaccagaagagcgtttttctgtcagtgcctaaatttaaatgcaaattactatttaatgatatgcaattttccctctgaacctatatataatactaatgagtcaaatgtttaagaagaataactgaccatgttattttagcttttagacaataaaaagcttattgtctaatcaccaagagatacatcaaaaaactggttgctattagctctacacatgaatggcagcttgacagagacaagctgctccagaaagattaggaacttctagtgaccacaaatggggtaaagcagaaggcacatacagtatctgtagctaccatttctacatcaaaaattcagtgcccacagatatgtaaactattaagccatctaaatgaatgtgtgcctgaaagagaaaggagaagcagaaaaagtttacacccaaatcaacagaagaaatcaccctgcgattgagcatcccaggacctgaaaacttaatgttttgaggtttatgaacacgttcaagttccagtgcaactatgttaaaataaaattgggctggtgccaggcacggtggctcacgcctgtaatcccagcactttgggaggccaaggtgggcggatcacctgaggtcgggagttcaagaccagtctgaccaacatggagaaaccccgtctctactaaaaatataaaatcagccaggcgtgttggcgcacgcctgtaatcccagctactcaggaggctgaggcaggagaatcgcttaaacctgggaggtggaggttgcagtgagccgagattgcgccattgcactccagcctgggtaacaagagcgaaactaactccgtctcaaaaaaaaaaaaaaaaaattggggcttggcacagtggctcacgtctgtaatcccagaactttgggaggccgaggtgggcagatcacctgaggtcaggagtttgagaccagccttgccaacatggtgaaacccatctctattaaaaatacaaaaattagcaaggtatggtggcacacacatgcctgcagtcccagctactcgggaggctgaggcaggagaattgcttgaacctgggagggggaggttgctgtgagccgagattgcgccactgcactccaacctgggcagcagagggaggctctgtctcaaaaataaaataaaataaaataaaataaaattggcataaaattccaaccctgccacacatcctcaagttggaagacacacaatggtaacaacagaaaacactctgagtagtctggtttacactcttctagggacctcgcatgttaactatgaataaacataagtcctgataacatcccaataaaagagtgctactatgattatctccattttacagataaagaaactgagatgcagatagattaactcacccaatgtcatggcgagttataaggcagagcaaggattttaaccccatcagtcagactccaaagttcgtgttaaacaataaacgtgttttcatcataagggttatacaatggtcaccttcttttttaaacctgataacatattttacttccaactctaggatagcatcatgcaataagaaaagtatgacagaggtacccattccgttcccagcttgatcagtagctggagaatggaagacaaagtgcaaaaaaaaaaaaaaaaaaaaaagaaagaaagaaagaaagaaaaagaaaaaaagaaatacaagtacagactttggaatcacgagactcaaacagacccctgaacaaagtctggggctcaatttccccatatgtaaaataaaagaatttatgttattgagaaggtcaaagaaggtaatatgaataaagtgacaagtacagtatacaggatgggggttttcatttaaagtttacagacacccagagggtccacggatgggcttcagagtccaccaatctcattaagtgtattacaaactgtatgtgtgcccattttttaaagaattgttcctggctttccacaaactttcaagaaataagttatctccaaaaagttaagaaccactggaatacatagcaggtactcaaagaaaaaagctacctttcgctccttgttctcacaaattctccctttttacttaaagatgacacaccaaggcttcacaataaatgtgcattgtatctcaccattttcttggcttgggtaagtagtaacatatgcaagcttatgccccaattctctagcgatagtctaggccctcaaacactgcttcatttctctcttcaccgagaggagtacacggtatatactcgagaacaatcatccacctagctgcacaaagcaccatatcggctaggaaaaccaaataggaaccacagcctcagggctggaccatagacaccggataccccaacgctacagggtgaggagaatgtgttcccccaaactactgggcaaaccaggagtctgaacccccctacccttttcctccctctctctctggaactctggtaaaggcaggtcttctgggctctgcctaaggctggagagaaacgttacccgagccgggggttgcagcgcgacgaagttccacctccgctgtcctgggaaggggcggcagcactcagcagaagacgggctccccactctcccaccaacagaccccagagttggtctccacccggcctgggaaccggctcgggggattgccctttccccaaggagtttccgcttccgggctatcctttgccggaagcagtatgtgaatgacgtagaagtattrcgccgttggtgattacggaagaaccaggagtttggcgtgaccatggtgagagaagacggtccaagaagggacgttatcaggccactttttgggtggagaaggaggtagtcagaccgtggccaaatttccttcacattatcctagcatattttcattctggtcttagctcttaaacttctccaagcggtgactgttatgctttacagagtggggaagagggtctgggttatttgaggcaagaagggaaggcaatagacaagagaaaagaagagwctttaaaagatgccgtgtgtttccaacttttttaattctaaaatttctgtttcaaggggaagcaaaagaaaacaaggaagtatgcgaccatgaagcgaatgcttagtctcagagatcagaggctgtgagtgtctggaatcaactgcccagggatattctaataagagtctagagaggataagtagtaaaaatgtttgttgttattattttgttttttgcttattatcgtgtcttagatttatatagcatgagatagccagtgtttaacagtaatttagctgctgagcgatcacactgggaaaggcgatgggaattaaacatttcttaagtgttcactttttctaccgttatatgctttgtctgccatatcgcatttaaacctcatgtcagttcggtgaagtccgtatagttctctttatgtttttaccattacactactacattcccctggggtggggcgaggggagtgtttcttgttgaaagatggcaaggttagagaccttgtttgtctggcgtttccagtgcctggtactcaaatatttttgtcagagaaaatgggaaaactccaagatatctccattttataagtcttactaatataagaatccaaatcactgtggaagaagaaagtgaagtgaaattccctagtatgaagaggatcaaagcggtgtccctgcttaagtgtagaataagcatagctattaaataaagactgatcttcactgagtttaagagtctcagaaagccgggcgcagtggctcacgcctgtaatcccagcactttgggaggctgaggcgggtggatcacctgaggtgaggagttcaaaaccagcctggccaacacggtgaaaccctgtctccactaaaaatacaaaaaagagtctcagaataagagaatagtcgttaaaaccttcagaattattattctcagcctttagtgtggatgtattgtgtaatttttaggaatgacactccattaataataatttctttctagttaagggttaagttctgtatatgcgtttttacattttagccctttataagaagcatatggggtaatacttttcccccaaaagttaaagcatctgaatcttcagaagataactgtcacccttttacccattgcttggaagtggattgtgatccttgatgtgagagattctgactaaaaaataaatatagtataatcagcttttatttactcattaacaattcttatgcattattggcattactggttaattctgatactkccaggtactgtgctttgcactagagttatttgstcagaaagagtatgctgatattaacatgaggatatcacaaagtaggatttcttcagtagaccaaaaaaaaaaaaaaatggaactttagatttttgagattttaattgctgtggtttttcttctcccttggatttaatttacctttttcttcctagtaaagaaaaggatagattaaaacctaaaaagaaagaaaagaaggatcccagcgcattaaaggaaagagaagtgtgagtaatcaaacgtttgaagttttcctttaaaaccatagacctcttagaaatccaggctttccctgagctggtttgctaacttatttgttagtaagtctagcacaactatgtagatgaaagtcatatcgatgagcatatatcaattctagtggtttgaaggttttgggattttatggagcagtaaaatttcccctaaaatcctggagatattatctaggattattaactttttctttgccagggatcttttaagagacataagtgccattgtttaacacaccagcagttcataaaagagagactgtatcaccaaaaaatatttaaaatatattttcagaataaagatatttatataaagrtatgacctttatataaagatataaaggtatttcattccttttaagtaagtacatttaactttatgaaaactttaccacattttccttatttttctaatttttccctggattggtaatggacatattatcacaggtagatactgatccatggcctagcatttggaatcactgtcatattcaacccagacaacttgggctagatgtgatacaggtcctgctgtagtatataatcctaacactagacaaactgttctctatcacattccataacagcagttttagaatcctttaagaatgacaaacgtgttgttgtatcattctaatcacgataactgtattctacctccctgtgcccatggtgattctacttttgctagaggaagagctagattggataattgctttttttgtttgtttgtttttgataattgcttttttaaagttggtgacaaaggttgccaggggagctgagattaagataatgatattactttcttccttgccttcctttttaggatttatttccaatgaacatggacaaaagagtttacagcaaacagtcccaagcagacttcttttttgtttttgttaatactagggtatcaatgtaaatttttctttgttcttgttttctttttccttcagtccccaacacccttcctgcttatttttccaatataatacacagctgggcccaccttaccacatcctcgttgataccaactttatcaacttttccataaaagccaaactggacttagtgcagtcaatgatggactgtctgtatgccaagtgtgagtatcatacttttatgtttccgtgacatttgttcagaataattatatttatacaaatacatgaaaggagggagatggggttcttgttaactgaattgctggccatttaatttacagtggtcaccatagcartgaccatgtttaatgaattgaagtataatgcaaacttgactggaaaaaattaaactttcacaattcagaaaacacttagaatgcttcgagtatcattatggacatcaattttgaacataggggaattttctgttttagaattctagattttaaaattctagataaatgaaaaatctatttttcagtatctatattcttttatgttaacaaggatatgttctcccttttgccccagtgttgaaacactaaataagacattctgccatttatgatcacagccctagaagttagatagatgatgrtcaattcctaagtttattcagtttggtatttattcgtagtacagaggatctgaggtagtttatttacacctaggtatgcaatttaccattaatagatttcccttgtgtatttgtatatcccctcctttaaatgatcttccttcactaccatgaacaggaaaaagaaaagtaaggccatctatgaagcctatcatagtaagatctgtcccatttgtagcgggtttatatttatatatttttcagtcacccggttagaggtacgaatgaaaattagacttaaactttgccatagaggataaattactggaatcaaagggaaaaatttgtacctccctttttaagttttaaaggctactatataatgaacaacagttgcagagtgatagaaatggtaaatgttgtttactgatttattaaaatgagcaagatgagaagatggggttaaggaatgtgtgaaggggtaagaaagcagattctttagatgcccwaaaattaattaagaatggctgcagccgggcgcagtggctcatacctgtaatcccagcactcgcggtggctcacgcctgtaatgccagcactttgggaggccaaagcaggcggatcatgaggtcgagatcgagaccattctggccaacaaggtgaaaccccatatctactaaaaatacaaaaattagctgggcgtggtggcacgtgactgtagtcccagctacttgggaggctgaggcaggagaatcgctggaacctgggaggtggagcttgcagtgagccgagattgtgccactgcactccagcctggcaagagaaactccatctaaaaaaaaaaaagaatggctgcatacatttattagctgcatacgtttattaagatgtgaaggtagccatcagatgagaaaaaaatggagctaatggaataaaatagtcttctctacagatcagaattgattgggtggcaatggtcaggggaccattgttttttcatataggcctttctgtattactttttaaagctatatacataaacttttgaaataaatcttttagaaataatctaaagttgaggtgctaccaggcctctaagaatgaggcttgggtgaccccatatgggggaagacactaaacttggtagtctctttgtatttcccatggtatttctaattgagctgcttctccaggaatgctgtgacctacttatcaatgaaacggatagagggtcaaagcatggccctttgcttccttgatgaattgcttccttgactctatacctccaccagtaatatctagatagtgactgttagagctttaggcaggatagctttagtcttatggctttctttaaatatgtatacttttttttttgagacagggtcttgctttgtcacccaggctggagtgcgttggcgtgatctcagctcactgcgacctccgcctcccaggttcaagcagttcttctgcctcagccaccccagtagctaggacatgccaccacgcctatctaatttttgtatttttcgtagaggcgggtttcaccatattggtcaggctggtctcaaactcctgacctcaggtgatccacccacctcggcctcccgaagtgctgggattgcaggcgtgagccaccgtgcctggccttgcttgcctttatacttaaaggaaggcctttctcttcctcttaccttgaaaaggcctgtttgatctttacatggttcctggtctcttctatttccactttatagtccaacaaggaaggatagtttgcttcccattggctttctcttctgcctatgaatcctgaggctgttactttccctttccttgtagtggttttcctgagcctgcttccctacttcagttgcaagcctttgctcacttcactgctacatggctctgaaattggtcctcttaaagaacacattgccttgtttcatgatctcagtattaaaatatatatatatattgagacaaagtttcactctgtggcccgggctggagtacagtggggtgatctctgctcactgcaacctctgcctcccaggttcaagtgattctcctgcctcagcctcccgagtagctgggattataggtgcatgctgccactcccagctaatttttgtgtaaagtagagacggggtttctctatgttggccaggttggtatcgaactcctgacctcaagcattccgcccactttggcctcccaaagtgctgggattataggcatgagccaccacgcctggccagtattaatatacttctaaaaaattctagcataaaaaaatggaagttgaagcctgggcaacataacgagaccccatgtctacacataatttaaaaattagccagggggccaggtgcggtggttcacacctgtaatcctagtgcttttcaggagttcgagatcagcccggccaacatggtgaaaccccatctctactaaaaatacaaaaattagccaggcgcagcaccatgtgcctgtaatcccagttacctgtgaggctgagggaagagaatcactggaacctgggaggcagaggctacagtgagccgagatcgtgccactgcactccagcctgggtgagagagcgagactctgtctcaaaaaaaaaaaaaaaaaaaaaaagcatgcatcgtggcatgcacctgtggtcctagctacagatgctcaggtgggaggatcacttgagcctgggaggctgaggctacagtgaattgtgattatgccactacactccagcccaggcaacagagcaagaccctgtctttaaaaaaaaaaaraagaagaagaagaagaaaagaaagttgggctgggcgagatcttcaccccgtagtcccagcagtttgggaggccgaggtgggaggagttctgggcttgagctcaggagttcaagaccagcctgggcaacatggtgtgaccgcatctctacaaaaaaaattttttttaaatcaagctgggcatggtggctcatgcctgtaatcccaacgctttgggaggccaaggtgggtggattgcttgagcccaggagtttgagaccagcctggccaacatggcaaaaccctatctctaccaaaagaaaccacaaaaattagctgagcatggtggagcatgtctatggtcccagctgcttgggaggctgaggtgggaggatcacttaagcctgggaggtcgaggctgcactgagctatgtccatrtcactgccctccagcctgggtgacggaacaagaacctgtctcaaaagggggaaaaaaaggaagttgcttataatgcatttcctcaaaggagcaattataaaaattcataaatctgtgtgagatggagggttacttttatttattaatgaaaatggcctgtaatcccagcactttgggaggccgaagcacgcggactacctgaggtctggagttcaagaccagcatggccaacatggcaaaactctgtctctactaaaaatccaaaaaaaattagccgggcgtggtggcaggtccctataattccagctactcgggaggctgatgcaggaaaatcgcttgaaccccagaggcagaaattgcagtgagccaagatcgtgccattgcaagagcgaaactccgtctcaaaaaaataaaaaaagaaaatggatcctgtattattttttgctttataaaacagatttactgaaatataattgactccytttacaactatacaattcatccctttaaagtgtacagttcagtgacttctagtggattcacagagttgtgcatcatccatcaccatagtcaattttagaacttccattatcccaggaagaaacctggagacccttagccatcaccctgcaaccctcaccattctctctatttctaggcaaccactaatctactttctgtttctataaatttccctattctggacatttcataaaaatagaatcttataatatttggtcctttttcatttaacgtactgttttcaaggatcatttatattacagtttgtatcagtacttcatttctttttattactaaataatattccactgtatggatagatcacattttaatcatttctacttgctttttacattgaactatatattttgaacatttttccatggcatgtatatataaatgggcctcattcttttattttgagtcaaggtcttgctatgtcatccaagctggaatgcagtggtctgagccaatagcttacagcagcctcaacctccaggtctcaagtgatcctgcagccacagcctcccaagtagctgagactactggaaagagccaccatgcctggctattttatttatttatgttttgtagaaacaaggtatcaatcatgttgcccaagtttttggggtttgtttttttttttttttttgagacaggctgtcactctgtcacccaggctggagtgcagtggtgtaatctcagctcactacagcctctgcctcccgggttcaagcaattctcatgcctcakcctcccagtagccgggattgcaggtgtgttccaccacacccacctaattttttttttttttttttgagacagagcctcactctgttacccgggttggagtgcagtggtgcaatatcggctcactgcaacctctgcctccaggcttcaagtgattctcctgcctcagcctcctgagtatctgggactacaggcatgtgccaccacgcccagctaatttttttgtatttttagtagagatgaggtttcaccatgttgaccagactggtcttgaactcctgacctcaggtgacctgcctgccttggcctcccaaagtgctgagattacgggcatgagccaccacacccagccctaatttttatatttttagtagagatggggttttgccatgttggccaggaattcttttttaaagttatgtatggccgggcacggtggctcacgcctataatcccatcattttgggagttcgaggcaggtggattgcttcaggtcaggagttcgaaaccagcctgaccaacatggtgaaaccttgtctttactaaaactacaaaaattagctgggcgtggtggagggcgcctgtaatcccagctacttgggaggctgaggcaggagaatcgcttgaacctgggaggcagagattacgccactgcactccagcctgggcaacaaagtgagacttcaaaaaaaaataaagaatgaataaagttacatactataattgcttctcagccttttggctaagatcaggtgtaaagttacatactattctattgtttaaatacataattttttaaacccagtatcttattaggtattttggttatttccaggttctacccaattaacaagtctgtagtaaatatccttatgaatatgtctccctaagagtgtatttctttaggatacattgtctggaagctgtattatgtatcaagggatttgtgtatttttaataggtattgcaaatttgccctcaaatagttgtaccaatgtatatacctacaaacttagtatgagaatacttgtttcctcaatattgggtattttctttttttttttttttttttgagatggagtttcactcttgtcactcaggctagagtgcaatggcacaatcttggctcattgcaacctccatctgctgggttgaactgatcctcctgcctcagcctcccaagtaactgggattacaggtgcccaacaccatgcccagctattttttttatttttagtagagacgggtttcaccatgttggccaggctggtctcgaactcctgacctcaggtgatccgcctgcctcagcctcccaaagtgctgggattataggcgtgagccactacgcccggccaatattggatattttcatctgtttaatctttgccactcttctaggtgccactcttcccagtctttggcccaatagactccgttcaaatgttggctttaccatttgctatctatttagttaacttctttgtgtctcaggttcctcacctataaaatagggatgatgatttttttttwaactattatatggctttctgtttgatagttgtcaaacagaagtttttaaaatttttatgtgatcagatttacattatctggctaatttcatggtttcttgtggttcacatttaaattttatttcatctgagccaggcacagtggctcacacctrtaatcccagcactttgggagcccaagacaggaggaatgattgatcccaggagttcaagacagcctgggcaacatggcaaagccccatctctacaaaaaaaaaatgtttttttttaattagctgggcatagtggtgcgtacctgtggtcctcgctactcgggaggctgaggtgggagaatcattagaacccaggaggataactagaacccaggagtttgaggctgcagtgagttgagatcgtgccactgcgctccagcctgggcaacagagcaagactctgtctcaaaaaaataataaaaataaataatttttttcccatcaggaacttacattaatataaaaataatgacagagttcagcttagttttttttccccagatatgtttataacagggaatctgcagtttggggttgggacaatcttagtttcttagggttttcttctactctagttcttcttgtatatttcagtgtgctaattctgctgtcattgcaaaagtgtcctgggtctttttaaaactctgagcagggatataattcagagataatttcgttacaagttctgttcttaatgtgaatttttttccctggcaggtatmccrtgtataaccgattgtgtaatggctgaaattgagaaattgggkcagaagtatcgagtggctctaaggtaggaaggaggtaaactagatctgttctagattggtatactgaagattcatctgtttgttgtttaaagatttcttggccagttagttgtgaaaatcatacaaaactatttatcatttttgggggggttgttttggtctttctctcacacaaaaatcagttccagttagagtgtctaaacttttaatagaaaatacagagaatatcttgtccgggctcggtggcctgtaatcccagcactttgggaggccgaggcaggcagatcacctgaggtcaggagtccgagaccagcctgaccaacatggagaaaccctatctcttctaaaaatacaaaattagccggctgtggtggcaggtgcctgtaatcccagctacttgggaggcttaagcaggagaatcgcttgaacccaggaggcggaggttgcagtgagcctacatcacgccattgcactccagcctgggcaacaagagcaaaactctktctcaaaaaaaaaaaaaaagagaaaatacagagaatatcttaatgaaattgaatatttgtgtatagcaaaagatatcattaacaaagtaaacagacatacataatcaacaaagggcttattttcaaaatgcataaagaacttcacatctgtaagaaaaacataattcttaaattcacagtgagttgtcatttagtgcccattagattggcaaaaattttttaatgagcttgacaatgccaagaatagttaagaccatgaagcaatgggaattctcatactgaactactaagggtataaattggtcatcactttggagggcaacttgacaatatctggtaaaatccaggttgttcatactcttacaacacagtcttttaacctggagatcacattctacaggtaattaaattggtttaaaggatcacaatgcctggtgggtttggggggttttttgtgttttgttttgttctgtttttgaagcaaggtgttgctctgtcacccaggctggagtgcagtggcacaatcagggctcactgcagcctcgacctcctgggcttaagcagtcctcctgcctcagcaccctcaagtagctgggactacaggcatgcaacacctcacatggccagttttttaaaatttcagtagagatgaggtctcaccatgttgcccaggctagtcttgaactcctgggctcaagtgatcctcccaccttggcctctcaaagtgctgggattataggcatgagccaccacacccaacccccgagtatattttttagtgtaacagaagaaactataggctgggcacggtggctcatgcctgtaatcccaacaccttgggaggctgaggcaagtggattgtttcagcctaggatttccagtccagcctgggcatcatggtgaaaccctgtctccacaaaaagtaaaaaaattaaccaggtgtggtggcatacacctgtagtctcagctattcgggaggctgaggtgggaagattgcttgagcccaggaggcagaggtagcagtgagctgagatggtgccactgcactttagcctgggtgatagagtgagactctgtctcaaaaaaaaaagaaagaaattataaaatattagcatgaatatgtagaaaaaattgggtactgcttcacaaaacttttttcgctgttatatgtgtgtatatgtatatgtggtatatgtgtgcatactgtacgctagataaaatctatctcgtgctatgggttctggtaaaaaaaaaaaagaaagaaaaagattgctatagagaagttcagctactattggagtcaagtattggcatcttcttatgtacrtaatagcaaaaaattgcagacagccagaagaaatggcttttcttaagccataaaggatggccaggcatggtggctcatgcctgtaatcccagaactttgggaggccgaggcaggcagatcatttgaggtcaggagtgatcctcaacatggtgaaaccctgtctctactaaaatatgaaaattagccaggcatggtggcgggtgcccatattcccagctactctggaggctgaggcaggagaatcatttgagcccaggaggcggaggtttcagtgagctgaggtcatgccactgtactccagcctgggctacaaagcaagaccctgtctccaaaaaaaaaaaaaaaaaaaaaaaaaaaactgggtacagaagctcacgtataattcccaacacttcgtgaggccaagtggggaggatcgctggagcccaggagtttgagaccagcctggccaacataatgagaccctggctctacaaaactttaaaaatttgccgggcggccagccaggcgcagtggctcacgcctgtaatcccagcactttgggaggccgaggcgggtggatcacgaggtcaggagatcgagaccatcctggctaacacggtgaaaccctgtctctactaaaaatacaaaaaaattagccaagcgtggtagtgggcgcctggtagtcccagctgctggggaggctgaggcaggagaatagcatgaacccgggaggcggagcttgcagtgagccgagatcgcgccactgcactccagcctgggtgacagagcgagactccatctcaaaaaaaaaaaaaagaaaattagccaggcatggtggcttgtgcctctacggagttcaaggttgcagtgagctatgatcacaccactccactccagccccaaaaacaaagtgagaccttgtctctttaaaaaagaaagaaaagaatagataagctgtggaatgctcatgaataaaatactatacaagagtgaagatgagtgaactagagttatgcgccaatgtggataaatctcaaaaacaatataaactataaaaaaaaaacaacagcagtcaggcactgtggctcactcctgtaatcccagcagtattgggagcccgaagcaggaggattccttgagcccaggagtttgagaccagcctgggcaacatagtgagacccaatgtctatgaaacattttaaaattagccaggcatggtggcatgtacttgtattcccagctacttgggaggctgaggtaggaggattgcttgagccagggaggttcgagatcataccactgcattctagcctgggagacagcgagaccctgtctcaaaaaaaaagaaaaagaacaatgctgagcactgttaacgcacatctgtagttccagttacttgggaggctgaggcagaaggatcacctgagcctaggagtttcaagccagcctggacaacaagacccccatctctttttttttttttttattatactttaagttttagggtacatgtgcacaatgtgcaggttagttacatatgtatacatgtgccatgctggtgcgctgcacccactaactcgtcatctagcattaggtatatctcgcaatgctatccctccctcctccccccaccccacaacaggccccagagtgtgatgttccccttcctgtgtccatgtgttctcattgttcagttcccacctatgagtgagaatatgcggtgtttggttttttgttcttgtgatagtttactgagaatgatgatttccaatttcatccatgtccctacaaaggacgtgaactcatcattttttatggctgcatagtattccatggtgtatatgtgccacattttcttaatccagtctatcattgttggacatttgggttggttccaagtctttrctattgtgaataatgccacaataaacatacatgtgcatgtgcctttatagcagcatgatttatagtcctttgggtatatatccagtaatgggatggctgggtcaaatggtatttctagttctagatccctgaggaatcaccacactgacttccacaatggttgaactagtttacagtcctgccaacagtgtaaaagtgttcctatttctccacatcctctccagcacctgttgtttcctgactttttaatgattgccattctaactggtgtgagatggtatctcattgtggttttgatttgcatttctctgatggccagtgatggtgagcattttttcatgtgttttttggctgcataaatgtcttcttttgagtagtgtctgttcatgtccttcgcccactttttgatggggttgtttgtttttttcttgtaaatttgtttgagttcattgtagattctgaatattagccctttgtcagatgagtaggttgcgaaaattttctcccattttgtaggttgcctgttcactctgatggtagtttcttttgctgtgcagaagctcttgagtttaattagatcccatttgtcaattttggcttttgttgccattgcttttggtgttttagacatgaagtccttgcccatgcctatgtcctgaatggtaaagcctaggttttcttttagggtttttatggttttaggtctaacgtttaagtctttaatccatcttgaattgatttttgtataaagtgtaaggaagggatccagtttcagctttctacatatggctagccagttttcccagcaccatttattaaatagggaatcctttccccattgcttttctcaggtttgtcaaagatcagatagttgtagatatgcggcgttatttctgagggctctgttccgtttcattgatctatatttctgttttggtaccagtaccatgctgttttggttactgtagccttgtagtatagtttgaagtcaggtagtgtgatgcctccagctttgttcttttggcttaggattgacttggcgatgtgggctcttttttggctccatatgaactttaaagtagttttttccaattatgtgaagaaagtcattggtagcttgatggggatggtattgaatctataaattaccttgggcagtatggccattttcacgatattgattcttcctatccatgagcatggaatgttcttccatttgtttgtgtcctcttttatttcattgagcagtggtttgtaattctccttgaagaggtccttcacatcccttgtaagttggattcctaggtattttattctctttgaagcaattgtgaatgggagttcactcatgatttggctctctgtttgtctgttgttggtgtataagaatgcttgtgattttttacattgattttgtatcctgagactttgctgaagttgcttatcagcttaaggagattttgggctgagacaatggggttttctagatatacaatcatgtcgtctgcaaacggacaatttgacttcctcttttcctaattgaataccctttatttccttctcctgcctaattgccctggccagaacttccaacactatgttgaataggagtggtgagagagggcatccctgtcttgtgccagttttcaaagggaatgctgccagtttttgcccattcagtatgatattggctatgggtttgtcatagatagctcttattattttgaaatacgtcccatcaatacctaatttattgagagtttttagcatgaagcgatgttgacttttgccaaaggccttttctgcatctattgagataatcatgtggtttttgtctttggttctgtttatatgctggattacatttattgatttgcatatattgaaccagccttgcatcccagggatgaagcccacttgatcatggtggataagctttttgatgtgctgctggatttgattttcccgtattttattgaggatttttgcatcagtgttcatcaaggatattggtctaaaattctcttttttggttgtgtctctgcccggctttggtatcaggatgatgctggcctcataaaatgagttagggagtattccctctttttctgttgattggaatagtttcagaaggaatggtaccagttcctccttgtacctgtggtagaattcggctgtgaatccatctggtcctggactctttttggttggtaagctattgattattgccacaatttcagctcctgttattggtctattcagagattcaacttcttcctggtttagtcttgggagagtgtatgtgtcgaggaatttatccatttcttctagattttctagtttatttgcgtagaggtgtttgtagtattctctgatggtagtttgtatttctgtgggatcggtgatgatatcccctttatcattttttattgcgtctatttgattcttctgtctttttttctttattagtcttggtagcggtttatcagttttgttgatcgtttcaaaaaaccagctcctggattcattaattttttgaagggttttttgtgtctctatttccttcagtcctgctctgattttagttatttcttgacttctgctagcttttgaatgcgtttgctcttgtttttctagttcttttaattgtgatgttagggtgtcaattttcgatctttcctgctttctcttgtgggcatttagtgctataaatttccctctacacactgctttgaatgcgtcccagagattctggtatgttgtgtctttgttctcgttggtttcaaagaacatatttatttctgccttcatttcgttatgtacccagtagtcattcaggagcaggttgttcagtttccatgtagttgtgcggttttgagtgagattcttaatcctgagttctagtttgattgcactgtggtctgagagacagtttgttataatttctgttcttttatatttgctgaggagagctttacttccaagtatgtggtcaattttggaataggtgtggtgtggtgctgaaaaaaatgtatattctgttgatttggggtggagagttctgtagatgtctatgaaaaagcaagaacatatgtggagtataccatttatctaaagtctaaaaacatgcaaaccaatactgcattgtttatagatatgtgtatatgctttttttttttttttttttttttaaagacagattctcactctgtcgcccaggctggagtgcagtgatgctatcacagctcactgcagccttgacctctccggctcaagtgatcctcctgctttggcctcccaagtagctgggactacaggtgcataccactatgcatgtctgattattttttttcttttgcatggctaattttaaaaaaaaatttttttggtagagactgggcatggtggttcacgtctgtaatcctggcacttaggaaggctgtggcgggcagatcacctgaggctaggagttcaagaccagtctgaccaatgtggtgaaacctcatctctgctaaaaatacaaaaattagctgggggtggtggcaggcacctataatcccagctactagggatgctgaggcaggagaattgcttgaggctgggaggcagaggctgcaatgagccaagatcatgccactgcatccagcctaggcaacagagcaagactccatctcaaaaaggctgggtgcagtggctaacgcctgtaatcctagcactttgggaggctgaggtaggcagatcatctgaggtcgggagttctagaccagcctggctaacatggtgaaaccccgtctctcctaaaaatacaaaattagctgggcatggtggcgcatgcctgtaatcccagctactcaggaggctgaagcaggagaatcgcttgaacccgggagcagaggttgcagtgagctgggattgtgccaatgcactccagtctgggtgacagaatgagaccccatctccaaaaaaaaaaaaaatttagtagagatagggtctcactatgttgcccagctggtctcaaactcctggcctcaagtgatcttcctgctttggcctcctaaagtgctgggattgtagtcatgatcctccacacccagcctggtaatttttaaaacaataaaaataaagaatgagaggggaaaaaatagaggcaccaagtggaaacactaagtttggctgtcaagagatgcagaaatggggtgttagctggaggggggtataggtaaaaagatttttttgtcttaaggcagagaatatatgacagcatgttagtatgtttctaggaaagagctagtagagaggagacaagtgatttcaggagtaaagagataactgaaagagcatagtcctagactgttgcccacctagtttgtcagcaaccagtccatcctccctctagtgtatcctccccagcacagcctgcttagtttttccaagacagagctttgttcttatcactttgtcccccagaaatctttaatgactcctcattacctgtgtcatcacactcgtcagcctggcattggagactctttctagccccatttcattcttctctccacaaacactctgcccccagccagaaagatgtgtttactcttccccaaataccaagaaaccattttacagttggctggtgtcctatttggtaccctcacattgcttggcacattctttaatcttatttcaccccatgtcatttttttctaaatattcccaacccacattgacctagcgctgaactactgcaatatggaggagtatttgtgttgcacttggtacatatgtgctgtcttgtatttttcttcatttcagtgactcatcatcactgttaatagaaagagcatggctctcagaatcacacagagttggggtttttctttttcaaatatgtatgaaaataatacatgtttgagtgttttatggcaaacaatacaagcatatacatatagtaaaaggtaaaagtctgcctctacattcatactttgtccattctcataccccaagagtgacaactgacaaaggttaatatattttttcagacctttttctgtgcaaatgcaaatctaaataaagagtattggaaagaaggatttgtattttattaattaaatcatattwtatatatatatatgcatatgccctgctttgtttattcaacagtttagtgtaggtccttccacattggtacgtacagctctacctcactttttattaataggataagggcaccaaaatgggtttaacttttacctttctaaaggatatttttattttcttcacttactataaactgtgttgagtgatcatccttctgcctatattcttgttcattgtgtttaagacaacttcttaaaagtgaaatggttaggttaaaatgggttttgtttttgaatcctggcttttcccagctgtatagctttgaatgaagtaatttaatctctctaagcctacttcctcatctgtagaatagatatataataactcaaagttttgtaatgattaaatgacccaaagcacactagctgtcagccttcattccctgccccgtgaattgtctttccagttagaggataaagttcaggaggagaacagtgccttaaaatctctgcatagatcatgttacttttattgcattaattaagactcagaaagttatccagctgattgaatgttttctttaatccacctacaggattgccaaggatccaagatttgaacgattaccatgtacacacaaaggaacctatgcagatgactgcttagtacagagagtaactcaggtattatcagttcataactgtttactttgtgcttaaaaaaaaaaaatgtaaactattatctcctgaatgttcatggtcagtaaaacatctaggaatatacattatggttaaattaaaaaaaaattgcatagcattccttcataagaagcataggtgtcttcatttacttgagaaagtggattgaaaatgtacactctaaccataatggaaagagcacaggcttggggaggagacatgggtttcacgtctcagcacctgcatttactggctgtgtgatttgggacatttaactgattctttatctcacaaatctctgtaaaatgattttaagtgagttaatgtagaacccatttatttttgatgtaggaattttgttcctcttcacgatgcctaatccaaaagtgcttcttagttaaatctgagagtctcccaagatgctgtttcacacataccctagaataagtaggtttttaattccttcattaagcaccacaaggacttctgctactgagtgcttttataagggcctctctgctgatgataatcttcatctgctctgctgaccacagagccatccttttagccacttcaccccatggggcgggtgggtggggccagtatttcccacagcacagctgacaccactctgccactttttataaaactcagtaggagagtcagacgtgacagatgtgaagcttcctataaaatagctttcacctgacagctaaatattactgcttttataactgctaggctctagtttcaggccctgaatatcctacttaggcttcctgtttcggggatagcttacctctaacatcagtaggcccagagcacacccaagccccaagatctagggaaaggagggagctatggcctccaaattaaggcactttttatctccatggagttcctcggagcattttcccaaaactaaagaattgtctgccccaagtgtgaaagtccctttcatttatgagcagaaaacagtttgcagcttgtgaaaagttttctaccttctcctcctcaagattctaaatgctgcattcagcccaggcaacttgtttattttatataacaagattaggagctcctagatcatagtaggtactcaacaaattgttatagbctgcccttcgctacttactgtgaaaatgaacgattctcagactrgtcagtcgttgtgccattatccagtattcactaagcgtgctcagtgacctcagtgtgaacatcactccatgtctcttacagcataagtgttacattgtggccacagttgaccgggacctgaaaagaagaatccgtaagattcctggagttcctatcatgtacatttctaaccataggtgagaaatttcccttggagaagggaatagaaatatataattgatatcaattgaaaatgaggataagtgataaggttataaaggatttgaaagaaatyattgtatcaaatgtttacatagttatatttgaagaaatgagacaaagcaagagcaagagcaaaagagagagataggatttaaggaatgaggcaaacatttaaattgttagagtaagattactggaagaaatagacgtattgttttaaataaaagcagtaatttaaatcaagctaatctttttggccagaaatacctgttttgaaagatttttttttattaacacttcatctgagaaatggaaagcttatttaaaaaaaaaaaaagctgttatccttcttggctattttttgtcagtactcagacttattttccagcttttcagcttgaggagagcacaatgtggtgggaagtctgtggactaagaagttggacttactgatctcagctcctcagttcccctcttgctgactttgtgactttgaaaaaacaatcatattgtattatagtcagcattttgctgtaaatcattcattatgatgttcccctaaattgtttccactgacaaaaaggattcacagtgggggtgagagtattgcagtctataaaggatgggtttttagatgggttctcttcccatctttcttaccggtgttgattttttgtcctgatcagatacaacattgaacggatgccagatgattatggagcccctcgattctaattcttacaagacacagttcctctgcctttcttcgaccaactttctcttgttgccagttcattacacaaaatgtagcgggatttttaaggaatcagagagactgatggagttcagggagatatttattatttaggtgcaccagcccagtcagattaacatccaaaggactgaaccctgaacagagttaagttaccttttaagcattttgtggggccgcgggggttggggggaatctgtgcagggggaagcatattacagaagcaagaaagacagttattcaattaactgagacatgcattacatcatttcttacttttcaaggaaaatcatgttttacgacttgagtttatctgtctagttaccttgcagctgcacagctagagaaacagggtatttacaatgcctgggaaaggaggagagataaggctcactagccacagaaaaacaggcagttaatttttaaaggactccagctctttctctttctcacggggaattggattttcttacatgcaactgaatttctgcttacacatttttaaatttcttttaattgcttttccaatgcaatagcatgaattattattctgttgacctatttgccttactatgagctgagggtagttcaatatgctcactcttttttttttttttcttgagatgaagttttgctctgtcaccaggctggagtgcagtggcgtgatctgggctcactgcaacccctgcctcccatccttcaagtgattctcctgcctcagcctcccgagtagctgggattacaggtacacaccaccatgctcaactaatttttcttttttgggcggggggggtggatatttttagtagagacaaatacttttgtatttttaatacagaaaagtatgcctcggcctcccaaagtgctggaattacagacatgagccactgtgcctggcctgctcactttctgatgctgcttttttgttgtttgtttgtttatttgtttgttttgagacggagtctcgctctgtcaccaggctggagtgcagtggcgcaatctcggctcattgcaacctccgcctcccaggttcaagcgattctcctgcctcagcctgcggagtagctgggactataggtgcgtgccaccacgtccagccactgatgctgttttgccactgatgctgttttgaaattgatattttgtctcataaaaactaggccaggcatggtggctcattcctgtaatcccagcactttgggaggccaaggtgggtggatcacctgaggtcaggagttggagatgagcctggacaacatggcaaaaccccacctctactaaaaatacaaaaaaaattagctgggtatggtgtcacgtgcctgtaatcccagccactggggaggctgaggcaggagaacctcttgaacccaggaggtggaggttgcagtgagctgagattgcgccactgcattccagcctgggtgacagagtgagactgtctcaaaaaaaaaaaaaaattaatgatggtcaaagggtataaaatctcagacaggaagaatatgttttatgctttttttgagttctgttgtacagtgtggtgcctatacttaataatggggtattatacatttcaaaattgatgttctcatcacagaaatgtatttgaagtattgcatatgttaactagcttgatttaactattccatattgtatccacaatttatgatatcactttgtaacccatacatttatacaattataaattgtcaatttacaataaaaaatttttgttgcgtctttttagaaatcagatattctgatgattgctcacataatttggcggtcattgttttatactgacttactcaataaacatttattaaatgtatactaggtgcttaataagagatggtcctgccctcaagacactcattatggtgggaaagaaaaacatgtaaatgaataaatgccgtaaaatagcagtgctagggtaaaagtttcagaggcatgtcatgggcacataaaggtggaatgatttttttctactggttgggatggagagggaggaaaggccagtggtcatgtggtttgagctaatcttaaaaatgaataggtgcctccccagtaaattaggaatggaagatgaagcataggaaacagtacaccatagaaaatccattaacctatgtataatcccagcactttgggagactgaggtgggcagatcacttgaggtcaggagtttgaaaccagcctggccaacatggtgaaaccccacctctactaaaaattccaaaattaactgggcgtggtggtgcaagcctgtagtcccagctacttgggaggctgaggcaggagaatcgcttgaacccgggaggcagaggttgcaacgagccgagatcacgccactgcactccagcctgggcgacagagtgaaactctgtctcaaaaacaaacaaacaaaaaacctatgtatttgtggggatttggtatattattaaggtggtatttcgtttctgtgggaaaaggaaatttcattaacaggccaaatagtctggagtcattctgttagtgttagaatactaattccaccagttaatatctgtatgagttggacaaaccatataaccatctgttgccttccttgtttcctctttaaagtgtttaatccgcaaaacaaacctgataaagtgagattaaattgaatagtacctggcccaagtaagtgttcttcagtaaatgttagtgattattacacaatggcaaggtggctatccatttgaaaaaaaattaggccgggcgtggtggctcacacctgtaatcccaacactttgggaggccaaggtgggcggatcacctgaggtcaggagcccaagaccagcctgaccaacatggagaaaccccgtctctactaaaaatacaaaaaaacaattaggcaggcatggtggcaaatgcctgtattcccagctactctggaggctgaggcaggagaacgcttgaacctgggagatggaggttgtgatgagccgagatcatgccattgcactcattccagcctgggcaacaagagtgaaactctgtctcaaaaaaaaaaaaaaaaaaagagagagagaaaaaaattagtttcctacttcacatgattcataaaaatatttcaagtggatcaaagacctaaattttttttttttttgagacagtttctcactctgtcacccaggctgcagtgcgttggcacaatcatgactcactgcagccttgaccttcccaggccctgatgatccaccccagcctctcaagtagctgggatttttgtatttcttacagagatgggattttgccttattgcccaccttggccttctaaagtattgggattatgggcatgagccactgcacccaccctaaacttatttctaagctatggaagcattaggaaaataaatgtaaagaaaaacgtgtttatcacctttggatagaattcttaagcagaatctaaaaagattgaagagtttgaatatattaaaattatagatttctgtgcaagacactcccctcccctaaaaaacaagtgactgatgagattttccaatacatgtaacaagggtttagagaaatgagtactgatgtcatgctgacagaagtgcaaatatttatggccattttttacagctgttgacaagatccactaaaataaaaattgcagatatcctgtgagcccaattctatttttttggtaactttatagtatcatacaggtgattcactttaaaatacctctgcatggacaacgtgatatgtatgcgaagaaacattcacatgtgtacaaggaagcaggtagaaggatgtttactgcactgctgcttataaaagagaaaaaacaaactaaatgtccatcaaaaggatcttaactgtggccgggcatggtgactcacacctgtaatcctagcactttggaaggctgaggtgggtggattgcctgacctcaggagttcaagaccaccctgggcaacatggcgaaaacctgtctctactaaaataaaaaaattagctgggtgtggtggtgcgcacctgtagtcccagctactcaggaggctgaggcacaagaattgcttgaacccaggagacagaggttgcggtgagctgagatcacgccactgcactccagcctggcgacagagcgcgactccgtctcaaaaaaaaaaaaaaaaaaaaagcggtggggggtcttaactatggaatgtcatgaacatctatctacaaaaaatgaggtaggtttaaaatgggcaaaggacttaaacatttctccaaagaagatatacacgtggccaagaaacatgcaaaaagatggtcaatatcactaatcattagggaaatgcaaattaaaaccacaatgatatactacctcacaccccttagccactattaaaagaaagaagcaatagttattaaaaagtatttgtgaggatatgtagaaattgtaacccttagctgtgcactgcacatgcccatagttccagctactctgaaggctgaggtgagaggcctgagcccaggaattcgaggctgcagtgagctatgattgcgccattggactccagcctgggcaacagagcaagacaccgtctctaaaagaagcaaatcagaacccttgtgcgctgttcctggaaatgtaaaatggtatagccacaaagaatatggcagttcctcaaaaagttaaaaatgaaattatcacatgattccagcaattccacttcttgacatgtattcaaaagaatcaaagatcttagagtatttgcccacccatattcatcacggcattatttacaatagccaagaggtggaagcaacccaagtgtccatcagcagacgaatagatcaacaaaatgtgctctctacatacaacagaatatgagtcacccttacaaaggaaagaaattctgacacatgctgtaacatcgatgaaccttgaagccattgtgctaagtgaaataagccagtcacaaaaagacaaatactgtgtgattccgcttatatgaggtatctagagtagtcaaattcacagagatggaaagtagtgtagtggttgccagtggctgtggggattggggaatagacagtttaatgggtatggagtttcagttttgcaagatgaagagttctggagattggttgtacgacagtatgaatgtactaaagccactgaactgtatgctttaaaatggttaagatggccgggcagggtggctcatgcctgcaatcccagcactttgggaggccggggcaggtggatcacctgaggtcaggagttcaagaccagcctggtcaacatggcaaaacccggtatctactaaaaatacaaaaaaaatagctgggtgtggcagcacgcacctataatcccagctactcaggaggctgaggcaggagaatcacttgaacttgggaggcggaggttgcagtgagccgagactgtgctccagcctgggtgacagagaagaactctgtctcaaaataaataaaataaaatggttaagatggtaaattttctgttatgtgtcttttaccgtaattaatataaatgagattgagctatatcacttaaatggaaataactatgacctattattaagagaaactaaattatagaacaggtacagtgtgatattggttttaagttttaatatcacaaatatttaattgtttatttagaaatatacagtatatatataaatggatagaaaaagttctgaagataaagctttctcttccgtctcttcactggtacagaattccttaaataaattaatgtcaggctggacgcagtggctcatgcctgtaatcccagcactttgggaggccgaggcaggtgaatcgcctcagctcaagagttcgagaccaccctgggcaacatggtgaaaccccatctctactaaaatacaataaagtagccaggtgtggtagcactcacctgtagtcccagctactcaggaggctgaggcatgagagtcgcttgagcccaggaggaagaggttgcaatgagctgagatcacgccactgcactccagcttgggctacagagtaagactctgtctcaaaagaaaaaaaaaagttataggactggattgtggctcactcctcttgctgccataatatgagtggaatcatcctggataggccaattataatatccttattccattgccattgtgattatttcaaacctggatatcaaagacaagccaattagttgtaaccagagctttcactggagagttacgctctttttctatgggagaactgttaaaagctttaaatacaagctttaaaattgagagaccatatttactaacacattggaagtgcctacctgggttttactttacatagccaaacccaatcataattaatatcgaatgtatgtctcctaaaccaagagagaaaacagaaagaaattcaattaattaaaaaaaaagcagaatttgtcaaaatgtatggaactgcaccattggtgaactgtatgtttcattatgtgtaaattttttaaaaaactaaaaggaaaaataaatgtagaagaggagagggaagaagcagcaacggtaaatacaaaacaaagtaagataagggccgggcatggtggctcatgcctgtaatcccagcactttgggaggccgaggcaggccgatcacaaggtcaggagatcgagaccatcctggctaacatcctggctaaaaccccatctctaccaaaaaaatacaaaaaagtgagctgggcgtggtggcgggtgcctgtagtcccagctactcagaaggctgaggcaggagaatggcgtgaacccgggacggggagcttgcagtgagccgagatcgcaccactgcactccagtctgggtgacagagcgaaactccatctcaaaaaaaaaaaaaagtaagatggtgggaataagactagacatgcagtagtcatgatgaatgtgactgggttaaatagcctcattaaaagacagatgctcagatttgattttttttttttttaatcttgtggctgtatgttatttacagacatagctagaacagaatggcacaggacagctggaaataaagggaaaaataaatttaccatacaactcaacaattccactcctaggtatctacccaagagaaggaaaatacatgtccatacaaagacttggatacaaatgctcatattttttttaaatttcttttttttgagacagagtctcgctctgtcaccaggctggagtgcagtggtgcgttctcggctcactgcagcctctgcctcccaggctcaagtgattctcctgcttcagcctcctgagagctgggattacaggcacgtgccaccacacccggctaattttttgtatttttagtagagatggggtttcaccatgttagccaggatggtctcgatctccggacctcgtgatccacctgcctcggcctcccaaagtgctgggattataggcatgagccaccgcacccagctgctcatattatttttcttcataataaaaagtggaaacaaaccaagcaaccataaacacagtggtccccaacgtttttggcaccagggactgtggaagacagtttttccacagatggcagtggggcatgatttctggatgattcaagcacatcacatttattgtgcactttattattattacattgtaatatataatgaaataattatacaactcaccataatgtagaatcagtgggagccctgagtttgttttcctgtaactagacagtcccatctggggttgatgggagacagggacagatcatcaggcattagcttctcataaggagcacacaacctag

SEQ ID NO: 97711 - DNA, 29623 bp, Homo sapiens
tctgtttcctgggttttcaacacacatcgtatgtttcactgacacagtttggatttgttgccattgagcatacaggtttcctttgggtagatatattgtttaatgaaaaaaatcaaggttcaatacagtgtataatatgcccaggaaaaatgggaagaattgattgactgagccccagtaaattgataactgcacctggtagtgggtcctggaggcacagaataggatacagacttccctgcacaccctttagagggtgtggatattttttatttacatttattctcctttttagtttgttttgctatgaaatatttcatatatataaaataatacaggccgggtgaggtggcttaagtctgtaatcccagcactttgggaggccgaggcagatggatcacctgaggtcaggagttcgagaccagcctggccaatatggtgaaaccctgtttctactaaaaataatacaaatattagctgggcgtggtggcgggagcctgtaattccagctacttgggaggctgaggcaggagaatctcttgaaccctggaggcagaggttgcagtgagccaaaatcacgccattgcactctagcctgggcgacaagagcaaaactctgtctcaaaataataataataataatagtacgatgtttacataggcctaaatattaataaaagaataaaagtttttaaaatatagatataaatataaatggcatcatattgtaggtggcacttaggagctgactttttttactcaggaatatgcttttgagatctgtacatgttcatgcacatagatttggttcagtttcattgttttaaaatgctgaaaataataatttaatatatgaatatcccacatgttattaattaacttcatattgatattacttatgatattatgtttggaatttattccatttcttaatattgcaagcaatgttgccataaatatccatatatattcttatgtatctgggcaagcattttcctagattaaatatctagaagtagaattgatagattatgtgtgcaggttgagcatccctaatctgaaaatccaaaacccaaaatgctcaaaaatctgaaatattttgagcacagacatgacaccaccagtgaaaaattccacacttaacctcatgtgatggatagcagtcaaaacactcaaggaccacctgtaatcccagcactttgggaggccaaggcaagaggatcgctgggctcaccaattgttgctgttgagttttccaggtggatgatcgcatcaccagaaactatggcaatttggcctcttcctttccaatccttaaacctcttgcttgtctttaaatttttattgcattagttgtaacttccagtacattgtagaagagtagaagcattgattcatttctgactgcattggatgtaacattcaggataggtcaaggtatattacagtaacaaacgatcccaaaatctagtggcttaacacaatagaaatttatttctcactcacatttcatgtccaacacaagtcttagggctgaggaggcatccatttattgtttctcagggatccaggctaattgaggctctgcacctccatggtcagctacttccaggatcactaaggcaggaggaacaagctttgggagcttccaccctaaagcaacacgtattctgttcactagcatttcaaagcaagtgccatggccaagcctaacttctaaagcggtagaggagtaggacccttccagataccagaaaaacagtcggaccgtggcaatgtttccaatgctgcaccattacaaatggtgtttgctctaagtttctggtagataacaccttatcaagttaagaagtacgttcatgagtttgttcagtttgttaagcaagttaagaggttgtctttatcgtgaatgcatgttgacttttatcaaatgactttatgccatctgtttgatgagcaaatgctgttttttctcccttagtttgttaaggcatttatacatattgtttctcctccccgaacatttccttccactgccctctctaaccacttttcctggttaattccttctcatcctttagtgttcactcattcattcagcaaatatttattgaataatactatatgccagatgctgccctaggcacttgggatacagtgatgaataaagcagacaaaaaaacccttgcccatgtggatcttacactgggggtaggaaatgaaataaacataaaaacaggccaggcatggtggatcgttcctgtaatcctagcgctatgggaggccaaagcaggaggattgcttgagcccaggagttcaagaccagcctgggcaacatagtgagacccccgtctctaaaaaaaaaaaaaaaaaattagctgacatgatggcatgtgcccatactctcagctactcaggaggctaagatggaaggagttgcttgagcccaggatattgagactgcagtgagctgtgattgcaccactgtactccagctgggtaaaagaatgagacaccatgtcaaagaaaaaacaaataagttgtatagcatcaatagtaagttatgtagctaacagtgttaagtacaatggaaaagaagcagagcagagggaatgagggggaatgaagatgttgtgggtgaggtatggtcagagtaggtctcacaagaaagtcacatcagggcaacgcctcagaacaggggcaggggctgggcgtggtggctcatgcctgtaattccagcactttgggatgcctaggcgggtggatcacttgaggtcaggagttcgagaccagcctggccaacatggtgaaaccccatctctactaaaaatacaagacttagccaggagtgatggtgtgcacctgtaatcccagctacttgggatgctgaggcagaagaatcgcttgaacccaggaggtgaaggttgcagtgagccgatattgcaccattgcactccagtctgggggaaagagcgagactcggtctcaaaaaaagaacaaaacaaaaaaagccaggggcagggaaaaccagacaaatacgtggtggcagacaatttcagccagaaggcagctgctgggcaaagcccctggggtgagagctgcctggtgtgtcccaggagttgcagtggagtgagtgaggttggtgaaaaataatggagaggggcaaggggctgtgcgaaaaaataagagaaatcaggatggttccaaaatgtttggcctgagcaacaacaggatgggcggatcatcaggatggggatgggaaaggcttcaggtggaaaaggtttcagggcaggatcaagagttcaggcattgttttttctttcttttttattgtaataattttttattgagatataattcacataccataaaatttacgattttattttatttttttgtttgtttgtttgtgtttgagacggagtttcgctcttgttgcccaggctggagtgcaatggcacgatcttggctcactgcagcctccgccttctgagttcaagcaattatcctgcctcagcctcctgagtagctgggattataggcatgcaccaccatacccagctaatttttttgtatttttggtagagatgggatttctccatgttggtcaggctggtctccagctcccaagatttcaggtgatccacccgtgtcaacctcccaaagtgctgggattacaggcgtgagccaccgtgcccggccaaaatttacctttttaaaatatataatttagtggtccttagtattattcactaggttgtacaactcttaccactgtctaattctagaacatttgatgaccccaaaaagaaaccccatacacactgtcccctccctgacatgaactttctgtctctggaaacttcctataaatggaagtatacaatatgtgtccttttgtgactggcttctttcacttagtatactgttttcaaggttcatctatgttgtagcatgtatcagcactccactcttttttatggctgaataatattccattatacggatacatcacattttatgcatgcatcaggtgatggaccttgggtgttgccactttttggctattatgaataatgctgctatcaacattcatgtgcaagtttttatgtgaacatatgtgttcaatactcttaagtatacacctagaagtagattgctgcgttatatggtaaatctattttaactttttgaggaactggcaaattgttttccaaagcagctgttccttttacattctcatcagcaatatgcaaatttctccagatccttgtcaacacttattattgtctttttcgttgtggtcatcccagtgggtgagaagtggtgtctccttgtgattttaatttgtatttctctaatgactaatgatgtagagcatcttctcatgtacttatggcatgcatttgcatatcttctttggagaaatgtctattcaaattacttgcccatttttaaatgggatgtctttttattgttgaatttaagagtcctttatatattctagatactagacccttatcagatatatgatttccaagtattttctcccattctataggatgtgttttaaaagtttacttttgggccagatgtcatggctcacgtttgtaatctcaacactttgggaggctaaggtgggtggatcacctgagctccagagtttgagaccagcctgggcaatatggtgaaaccccatctctactaaaaaaaaaaaaaaaaaaaaaaaaaaaaaaaggaaattagccgtactgcaaacctagggtggtaggtaaagaagtgaggcctagagtgtattttggtttgttttcttgttttgcttttaagaggggagaaacaagcattatgtttgtatcaggtgggaattatctagtgggagagacgggagaatcgctggagtggtgtcgctgagtaggtgatggcacgggactgatgcccacctggaagggtggccttcgatggggcacagacagtcacctgtggaaaaaggttggaagcagagtgtgggcacagccccgcccgcgggccaagagcaagcctgtgggagtctgtgcgccactgctgtcaaggtaaggatgaagcaacagtgctggctgagagtgaggatagggggacgggtgggagtcagagggagaaagtatgaaagggtgtctaaggtagagcaagtgcagccgggggacagtgtgaagccagtcagcactgaacctgcaggtgagatctgtgtcacagggttgcctgtgatctgttgccccatcacccaggctggagtgcagtgacacgatctcggctcgctgcagcctcaacctcccgagctcactccatcctcccacctcagcctcctgagtaactgggaccacaggcacacgccaccatgcccagctaaattttgtaatttttatagagattgggtctacctatgttgcccaggctggtcttgaactcctaggttcaaatgatcctcccgcctcagccttccataatgcagagattacaggcatgagccaccgcacccggcctatgtcttgaattttaagctcggttctgatatcaaaagccttctattgctgggttctttactctcggtagccctcactagactgtaagccccatgcggatgtaaacagcgctgtctagttcacggctgtatctcaacatccagctcctcatgcatgggagactctcaatacatagcattgaatcgttgaataaatgaatgaagcaatgaatgagaaaagtcctagaagtggcacgtctagatttctgaagcagccccttccgcatcctctgctctccccacccaccccacatcccatcccaccctcccctctctaagccgccccccgcccctcacagcccagccgtgcagaccttgcggctttaaggccggcaggagccgagccgggcggtgattggtggtttattctaaggctcaagtatgagctcatccgcagccaatggccgcgctgcaccggctggccccgcacgctggatgccggaaagcagcggcccgcggcgcgctctggcgtgaagggccggtacgtgagggggaggcctggcccgcggacccggctcccagctcgggcaggtacggtgttttgtccggtcccttctccaccctcccaggcgaggggcccyctcggccgtccctccaccctgggaccgtgcaccttgcggctggggccccgtgggttgcacgcgccgctttctgtgtccaggcggggccggcggctctgcccggcaggaccctgcccggcggggtggaccctgaagccagtcctacccgggcaccccccagagcaaggcctcagagcctcaagttcccctgggcttggccgagcagggatggtgcggcctccctctgcctcctggccgcatcctggccgggattcagctccccgccggctgaggctgtgggtctccctccccgccccaccgcccatcctgctctctcctctttctctccaaatgacctggggttggaagttccgggtcctgcccattcccagtgggacctgggagagcaaaggcggggtagctttgtgggcctctctctgagccccttcccttcccgcagccacggctgtcatccctttggccgcmtgggtcacacattgctcaggaagaagctgctgtcaggtccttggaggccacatgaccttctcaaaagtaaagccaggaggacagagcgaccctccctggggctgggtcaccctgccctcttctaccccccatccaacgtggcaccgagtctgccactcagtcattccgtctgccaacagttcttacagcccagctctgtgctctgctctctgctggctccaggaggggtcctcactcgctgaccacactgacctcaggaccaagggaacaaaacacagcaggggcaatccatcyggtccacggagaagtgctaaaccccaaagggtaaatgagattcccacaggaggagcagggaggagacaacaggcagggtggagggaacagcatgaggaacagcatttgagcccagcgtgtgtggcctccatgtgctgaatgcgtactggataccaagcttgctctacggaggccctgtgaaggtggctgtggatcacagatatcctcagctctctccagagctcaacacagtaccagatgctccagaaatgtttgctgaactgaatttgaytggaaaggaaaacagagccccaggcctgcgcggtggctcacgtctataatcccagcactgtgggaggccgaggcagacggatcacttgaggtcaggagttcaagaccagcctggccaacatggtaaaaccccgtctctactacaaatacaaaacatagccaggtgtggtaggcaagtgcctgtaatcccagctacttgggatgctgaggcaggagaattgcttgaacctgggaagtggaggttgcagtgagccgagatcgcaccactgcaatccagcctgggtgacatagcgagactctgactcaaaaaaaaaaaaaaaraaagaaaagaaaacagaatcctgagctggttatgattctatcattaccaccacttaggaaggacctggatccatgaaaagacsttacccactttagctctgaccccttcagtctttggaggtgaatatgagtctccctgacattcagtggaggaaactggggtgcggataggggtgttgctaccagctaggtcctccctaatgcatttgcccattccaggtcccagctgcagggcagccatgagcctggtggcctgtgagtgcctgcccagccccggcctggagcctgagccttgctcacragcacggtcccaagctcacgtgtacctggagcagattcgcaacagggtggctctgggagtgcctgacatgacaaaacgtgactatctggtggatgcggccacgcagatccggctggccctggagcgcgatgttagtgaggactatgaggcggccttcaaccactatcagaatggcgtggacgtgctgctccgtggcatacacggtgaggaccggggctgggcagggctggggtgggtggggaagggccagtgcagggctcttcctgtcacccatctgtcttgtcccctgtccatttgtactgagtgagcacggcactatgctggcctgcagggcctccataaaagacaatgatagctggcacttattaagcagtttctacatgccaggtactattctaagggcttcatgtagattcattcatttgagtgtcacagtaatagaaattactatatatgttgttgtatgttgttccaagcacacaggaaccattttttacattctcatgttccagatgaggaagctgaggcatggggcagttcagtagcttgctcaaggctccacagctatcaaatggcacaattggggtttcacttcacaggctgtgtacttggcccactacacctgactgttcctggagctgggctgggctcctgccctctgggagtttgcattctagtggggggagactgatgagttgatttggaccattatagtctcaggtaggaagaggattagtggggaagtgaagagaggaaagagggaaactgaggtcagactgggccggcctagagcattttctagatgttagatctctaatctgagcactggagaatggtaggtgcgttatccagctgaagaactggctagagttccagaaagaacattcaaggcctagaggcgagaggggaggtccctccagggcagcatgaggaacttccatgtcaggggagaggctggtgctgaggccattttgagacgcctgtgggccctggtggccaggccttgaggtgggcactgggcccttcctgccctctggctgaagagacccttcaagcctgggcttccagtctgtccagcaaattcctttatcccccgatcctggtccccaccctagccttctttacactgggcatcagagatggaagaagcaatgctctctggaatcttctrtcccctcctctgaaaaaatggatggggaaatccccaccctgtcccttcccagggtgtgacagccgccagcaaggcggtgggtgctaatggtgaagtgctgtctgctgaggagtgaccctggttcctaacctcctcctgccagctcccttcctcctccttcctggctggccccccaccccagaggaggggctcatgaagcaatctgggggcagaatctgccgaaccagccttagaaacaggagctcactccttgggagggtagagggcaggcaatgggagctggaactccagccctccgaggccatggctggggaccctggtgactcttgtctcccacagttgaccccaacaaggagcgacgtgaggctgtgaagctgaaaattaccaaatacctgcggcgggcagaggagatcttcaactgccacctgcagcggcygctgagcagtggagccagccccagcgcggtgaggagaccccccccacccaaaggcctgagcgggaggagggctctgaggggagactgcggaggycccgacacccacaggcccgccctgggctgcagggcagaggccggcagtggaagtcattatttgggctggagtgtgccagggcggcccatcttcttttcctcctggcttcctctctctcccacgcctcatggttcattcattttcaaacaactcactgagtcatctccagtcgtctgcctccctcacagagcacttgccatgtgtgcacatagacatctgccagccttgcacaccgttcaatttacacgcttatgtgtgtccacactcagagcctcctgattctgtctcttgtgaaccggcatgcaatttggagcagaccccgacacccttgtgtgcacacacacatatctgtgtgcatgtatgtgcacacacacagtccccacatggctttctctaaaccagtaagtgttcagtgagggtggaaaatgcacgcacgcttcttaccccacggttgcgcgtactcacgcagccctccttggctcactgcatcctgtacggctgcctttccccaaagtaggtgcttggtcttcaaggcacgttccctgagactcacacgttcccaggttacttccctatccccaccttgggagcatctgcatcttttgagatggagtctygctttgtcacccaggctggagtgcagtggcgtgatcttggctcactgcaacctccgcctcccaggttcaagcgattctcctgcctcagcctcccaagtagctggagttacaggcaggcgccaccatgctcggctaatttttgtattttagtagagatagggtttcaccatgttggccaggctgatctcaaactcctgacctcaagtgatctgcccgcctcggcctcccaaagtgttgggattacaggcgtgagccactgcgcctggcctagatggggcttttgagagggggcttctgaagcccagagaacttcatgggccttggacgggctcagcagagaggtcggcctgaccaccctggaccagtatgggtgcctatcggtaaaggccagcttttccacccagcctgccactgtggggtggggcctrcctatacccctgccctcccagctgttctccttgcatccagaagcccctgcctgatgcctggtgagaaggccatggccaaggagggctcggccctgaggctgtgtgtggcctgtctccctcctctgcagggtttcagcagcctgaggctccggcccattcgcacgctgagctctgccgtggagcagctgaggggctgcagggtggtcggggtcatcgagaaggtgagtgagtggacactcgccttgcaggagggagacagtgtatgcaatttggggtggcggtggggagagagacatgatatgctgaaagcaggtctgtagcagtggcccccactcctccagaggaggtgggcaggggtcagtggggagtgcgagtgcagttgtttccagcagttcccacctctcccccatccctaacacgcatgactttggtcctgggtcctggggaggaaaatgcagggaacgggaagaggctgattggccagccacagtggctcacacctggaatcccagcactttgggccaagcaccaggccaaggcaagaggactgcttgagcccaggagttagaggccaaccagggcaacatagcaagaccccatctcaaataaaataaaatataaaataaaataaaataaaataaaatataaaaagaagaggcagacaggccctttccacagccctgcagctcagatccagaaaacctgctccttgggagagttgggacagaaactgcaggaggagcgaggagctatgcccagggcaccctgccagtcctcgaggccctgctcactcccacttcccgcttcccacagcacccccaccacactcaccctgaaccccagggctgcagccaagacgctctaccgagcacagctggggacttcctgcggctgggacgtgctcaactccagaaacctgtccagagagggcccgttctggcccgtccttgcccagggccttggcaagtctgccctttttttcctctcctgacctaactgtaactttaccctgtcccaatgctatctcgcatgctttgccttattcagggcagacaagaagataggaggcgacgtcccaacccttactcggggcactcattgttagagtgcttctgattagaaggacagacaatgaggtcaaatcagagtccagccagtatgaggttcccctcttcccctgaaccctggaatagtcacccaagaagttctttaccaagctggctaaatggagagcttcctaaaaatacagatgcccaagaatctgttatttaacatactcrctgggtgattttggtagatctgggggcccacagagaaaaggagacagtcctgtacttcccacaggcaagaggatgacatgctgcctgagggaaggccccgcgctgggcaccaccccgggtggccacgggcaagccccctgctctctgagctgtggtttcttcctctggaaagtgagatgagaattctcccccaatggggtgatctgggaggtaaaacaaaacaattttggggaaagacctggcacatgctgtgacactgagtacgtgcttgatggctctaaatacaagtgacaggagtgagctgggaggcacgcaggcttctgctcccgggccttactccagctgcttctcctgggtccctggggcaggtcccagactgtcagcgcaggccctgccagcttccatctgccacggtcccctccccactgcttgagtgtcagtggccacgacccaaccttggctgagcacagccgttcccagggactggccgggaggtgactgacaccgtgcctcccggtacgatcccgctgaaccatakgtgttgtggtgagaggggttktgagctgagtatgataggaaaacagcgagttgaagttatatggctttgtttcttaatgatcggagttcttagagtgtttaggtgcagatgtacactgtgacacagaattccccaaacttgtttagcctcaggaaagtggtttaggaatccagtgtttcgaggcccctgcagatggaaagcacaaattaaagccaagcccaaccattttttttttttcttgacacagggtctcgctctgtagctcaggctggagtgcagtggcgtgatctcggctcactgcagcctcgacctaccaggctcaagcaatcctcgcacctcagcctcctgagtagctgggaccacagtctcaagccctgctattgtcttctattttttgtagagagatctcgctgtgttgcccaggctggtctcgaactccttgcctcaggtgatcctccacctccgtttaggcctcccaaagcacttgggattacaggcgtgagccagtggcccgccgcattctatttcaggactacccttcttttttttcttttttatcctgtcttgggtactcaacttaaggacttcacctccctcctgagatcctacttcctttccctgtgtcatgcccaagccaggagcatcactttccycaaattaggaaaggtgttactgcccctgggcctgggtccctgcagccagacttggatatactgtcacccttgttccattccacagctgtgcccagacagatctgggcaagtgggcagtgccagccagcagcaaccctcaggcccagggaggaagcaaagggcttgctcgggatgatgcttgagtgacccctaacgtgtccggctrttaggataactaagggctgaagagatggtggcagggagcagtgaggtgggtgggtygggacttggcaagcagccagaatacccragggcctggcctcagagcctgggggccagggagacatcaccgggtatttgctgagcctcgtgcaggagccaggctctgagacagggtggaggaagaaaaagaaggtcatccaagtcacttcttcttttatttggcttaaacacaggggtgttttttttgttgtttgttttttgggtttttttagttgttaccaacatttgaaaatgtgcagattcttataaaagtccagatttcctgcttctcttgaaaaaatcagatctggaaacgctggcctcccattcccctgtggcagcagggagtggaggaggagatgcctgccttagacggggcaccagccctcctttctgcgcctccaccctgcctatttgctcacatgcctggcccctgtggacctttgagtttaagaacttgtttgaaacctttaggcttgtttgttccatgggagagtcctcctgggattttgatactttgtgcatctttaaagaaaaggtttaccgtgtttcaccaaagctttaattgtccctctgtcccaagaattcagtgggtctctttatttaaaacaattgctcttttttaaaaggtgagagaaagcactcagaactgccttccatcttcccaaatggaaggctcacccgacagttgtatggaaccttctcatttacagagctgtggcattaaatcctcacagtcaccatgggggaacgaagccttatagggtgctgttcaacacagtagtcactaggcacataagcctctgtgcattcatattcattaaaatgaagtcatctgtgtctcagttgcaccagtcacatttcaagtgctcaatggccccatgtggctactggcttccatattggacagtgcagacatataatcctgccatcatgataagaagttcaattggacagtgctgcattttaatacttgtcctacagagaattaaactgaggttcaaagaagtcagcggggctgggcgcagcggctcacacccataatcccaacactttggggagccaaggtgggtggatcacctgaggtcaggagttcaagaccagcctgaccaacatggtgaaaccccgtctctactgaaaatacaaaattagctgggtgtggtggcacatgcctggaatcccaactacttgggaggctgaggcaggagaatcgcttgaacttgggaggcagagattgcagtgagctgagatcacaccattgcactccagcctgggcaacaacagtgaaactccgtctcaaaaaaataaataataaacaaagaagtcaaggcactagacagtcctccatcctccaaaccactgagtaaaaggagtttcttgtttggttggatgaatgggaaaatgcctgctgctttgctgcccttttgaaatataatgaaagaaaaaggagaagaaaaagaaaatcccctgaatcctgccgaactccaagataatcactgttaatgttttagtctaattatttctgaatactgaggttggttttaatatgtttttaacagaaatctttcagtgtatggatcaaggtttatttctggcctcctcagccttccctccttcgctagtttttttggactctgtcagttacaggcccttgcccaggaccaggtggtggggaatcccacttggcaagggacagtggggaattatctggggtgtcaggatttgtgggaaactctgttctcctaaatgactccagagttttcttccttgctttttctaacattgcacaagtttggtcagggagccaagcccaggctggactcggtctctggctgttggaggagagacctctggtggttggagaggacacctcgctcctgctgagaaaagggtcctgggcgctctcatctagtccactgccttcctttcactgatgatggagaaacaggctcaggagggaaggccattgccagggtcacctggttgtgcccccagttccagtaaagtctgcagggctccgggatcagcctgtctgggttcaggtcctgacttgaccactttttagcagtgggacagtaggcaacataacctctctgaggctcaggcctgaattttggcaggattgtggggataaaattaaacaacctatgtaaagtgcttagcacagagtaaccactttacagccagggtgggcttcccctcggatgacactggtaataatcacgacaggttatcaagggtgtgttctgcggcaggtgcaggctgctgctctgcctgaattgcctgctttaacagaatcctcttcaggaccccctgaaggaagtgctgctatgaccccgttttgtacttaaaaagagcaaggttcagagaggccatgtgacttggcagatgtgatcactgacattctcacagcctttccactcaccaagggctttcttggttttttgttttttgttgttttgttttgtttttgagatggagtctgtctctgttgcccagactagagtgcagtggcttgatctaggctcactgcaactctgcctcctgagttcaagtgattatcctacttcagcttcccaggtagctgggattacaggcgggcaccactatgcccagctaatttttgtatttttagtagagacgaggtttcaccatgttggccaggctggtcttgaactcctgacctcaggtgatccacccgccttggcctcccaaattacagggattacaggcataagccaccacacctggccctcaccaagggctttcagaatggcttcaacaatccagagatgtagggaaggtaggcatttggaattcctggttggtagatgagaaaatcaattcaatttgcccaggatcgaagcccagtgccccttcccctaccctgatcccaagctgtggccttcctcactgcccagcagcctggcctcagggcccagttcccaccccgaccatggctggccacagcctccctggggaatgtccgcagggcaggccaacagccaaggagtcacaaccccagggtgctggccttgcctccacatgccctcacctgggctgaatcctctgccttcccgccctcgacgtacccatgtgcccgctcctatgctggggcccgcccctgcccaccatgcagatgagtcaagggcccaactccaaacatggccctgaccttgcgattgacagcgtctgcctctaatggaaaccaacacaagaaggagaggctgctctccaaagacggcctctcaagcggactttacttatttattttaaatttttatttgcagtcaggagtacatgtgcaggtttttcacatagataaacttgtgtcatgggggtgtgtgtaaatgaagggggtggagtggagtgggaaaaaggcctgaacgcagcgtgccaagcccacacaacatggctgcgctggggagacctggagtcacctcagagctgcggcttcctcagttgtaaaacaagagatcagaggaagtgactggctctgaggtcccttccagccatgacacctcagaccctgcaggatgttggggctctagctaaggccttgggtgaggggttgatckctggaggtccagttggaacagggcttctcagttgatctctggggtccaggtggaacagggcttctcagctgatctctggggtccaggtggaacagggcttctcagccctcccgtcaggtggcatgaggcctggcccagcgtgggcagggagagggcagggcattctgctcgcatgcccaccacgcacacagtgagccaaggcccgggctgctcacagtgcatgtgtctagcacctactacatccctgcactgtgcagggctccgggaatactgagctcacagtccagtgggagacagattagacagtgtgaagaggctctcctaagggtgaactaagagagcattggaggcagattagggaccccagcccctgtaatcttgggaaggcttcctggaggaggcagcatctgagaccacaggtctagcaggggtgggtgagcaggataggatcgatgtctgcttcaggagtgccaccaaagcccgccctccctgccctgccactggagtgagtcagcctcagtggaggaacctgggagggggtcaggctggggtcacggagccccaggagctagtacctgccttaaccagtgcctcttggactttggcaggtgcagctggtccaggacccggcaaccggagggacctttgtggtgaaggcaggtgccaccctgcccctgccactctgcattccccttggatctttctcagggctcttggaaactcctacccagaacctgcatttgaagcctgcactccctcccacaaaagctggttgttctgcctgaacatgccccactttccagatrgacacacatgcatgcrcacacacacatacacatacacatacacacaaacacacatgcacacacactgccccctctttggctagagggtggaggacccagattctacaggggcagtgggggtaaggacaggtcaggaactgagggaggcagttgctycaccctcattcgggtgcccctgaagccagggctaggaggtcccctaacagcagcagtctctggcctgtccccggctgatctgcctgccctgctgctcccagagcctacccaggtgccacatggtgagcagggagcggctgaccatcatcccacacggagtcccctacatgacgaagctgctcaggtactttgtgagcgaggactccatcttcctgcacctggagcatgtgcaaggtgagcaggcctggggccccctgtcagctccccaggcctttggggtatgtcgtcaacccttaaaatgcggagccctggcagggcgtggtggctcacgcctgtaatcccagcactttgggaggccgaggcaggcggatcaactgaggtcaggagttcaagaccagcctggccaacatagtgaaaccctgtctctactaaaaatacaaaaactagccaggtgtgcttgcacgtgcctgtaatcccagctacttgggaggtagaggcaggagaatggcttgaacccgggaggtggaggttgcagtgagccaagatcacgccactgcactctagcctgggcagcagagcaagactccgcctcaaaaaaaaaaaaaaaaaaagctgagccctggggagggkcggagcttgcaccagatgtacagcacagaccaggggacccggcctttctggaggccagtcaggctgttgtgggcccctgtgtggtaccaagggggcaggggacatcctggggtggatgtccacatcgtgggtgggcgtgagaatcacagctgtctcctctgtcgctgtttcctccagcgttggctcttttcatttttccgggttgtgccgatcccttgggagtggccagacagggtggtggtgactgaagttatgaggacaggaactgggccatgtagcagatactgatggttgtattgatgactttttaaagtgaggtgcacatctggggtcatgacatatagtcatcataagtgtgtgcctgacttttctttaaatttctttatatcggtctccctaaaaacagtgttcacactagtgaacccaccacccaaaccacagacactgatagtgctggacatctctcggtggtgtgccagtttgtaaggctgggcccactttagttgggtcaagaggagggcagagggcattctaagctgaggggtgrgagggagcagaggtgaggggctgaactaggccaggacacccagaggcggaaagtctgcgcccaagacagaagggaggcaggagtgggagccggccctggcatccatactctttttctccctgtccccacgctcaccgctccctctgcatggcccaggaggcactctctggtcccacctgctctcccaggcgcactcccgacattctgggctcagctctggctctacccaggagaggatgaaggctcagctcaacccccacctcaacctcctgaccccagcgaggcttccctcaggccatgcccctggccaggacagaatcgccctggagcctcctaggacttctccgaaccttctcctagctggggaggccccatccaccagaccccagagggaggctgaaggtgaacccacagccaggaccagcacctctggctcctcggaccttccaaaggccccaggtggccacctgcaccttcaagctaggagggctggccagaactcagacgctgggccccctcgggggctcacttgggttcctgagggggccggcccggtgctagggggctgtggccgaggcatggatcagagctgcctgtcagcagatggggccggccggggctgtggcagggccacctggagtgtgagagaggagcaggtgaagcagtgggcggcagagatgctggtagcgctggaggcgctgcacgagcagggggtgctgtgccgggacctccaccccgggaacctgctcctggaccaggcaggtaggtgccctcckcacccctcagtggggtggcccccaaagcgtccaggcagaggacgagagatccccaaagtcgaggggacctccaaggttgtctgctcctccctggccccagccagcctttcagggggcctaggctggagtctgttggccgaggctcctgggagtaccctgtgggctctgtgggcctcagagtgctgtgcctctgtggagggtgctgtgcccctgccgagtttctgcccagcaaggccattggctcctaccgcatgactgttgggggaagycctgcaaccccctcccctgtatcagctgtcctcaatctgtcccctcctttttcctcccacacactggaggtcacatccggctcacatattttggccagtggtcagaggtggagccccagtgctgcggggaggccgtggacaatctctacagcgccccaggcaagaaggggggaggccagggtgggccttagcacctgggtgcctttgtgtgggttgtgcccagagtctgagaatgacagagcgggtgggtggtgtctgggtaggctgaggagaatggaagaggccctcttaggtgaggctgggacacctgtgttcttgttcccacagaggtgggtgggatttcygagctgacggaagcctgtgactggtggagctttgggtctctactgtatgaactgctgacgggaatggtgagtggctgggctgggtgtagtgccctggtgggtgccactgagtgtgggatgggccaggcttagtccatccagccagtctgggcagagactgcctggctgtcctaccagcacaactgcccccgaagccagggacacacttagcactcccaacacattagttggctatagctaaggagactgtcaacttctatgaatacgagtagagwgggatggtcagggaaggtttctgccagagagcctgggcccaggtggtgtcagatttggaggaagcgcggaatgtgacacagcccttcttccctggaaggctgttcaatcatcctgagcccgctgttcactcctcccacccatgacctcgttggctgtcacccccagaccttagctggaggatgggagagaggggctctttcacccaggcaagcagctgccctgtccagcctgggtcagccaagagctcaaaagatccccctgcaaacactccgggaacctgtgtttgcaggttgcaatcagagcaggcactcttgggaacagttgatggctctgccttctgtcctcccctcatgagctgaacactgcaactgaggccagttatgtaggcagcaagggggaggccaaattgcatttgagcaggaaatagccgaaatggatgcagcgtgaactgaagtccagagctgaccagtccatccaggctccctcctgctttcgtcccatggcacggggtcccgaaagtcctggctgcaatttcccccagagtggctctctcttttcctgtctcctcccacctctccagcccagagctcttggccttcctcctgggggttcctggaagctcatacttccctccagacagaccctctgctcmtcaaagctgtgcctttctggggtgtggagaggtcctattttcttttattgccacgccgctgccttggccccgatggtagcatgccatggcctgctgccaaatgaacagcccgtgtggatttttaaaataaggagacaagttccatcactattcccaagagtgcctgccctgattgcaacccaagatagttgcttctagcaagcttggagccaagagacctaggttcaaaccctgaactcagcacaagtccctttacctctctgggcctgtttcttgcctttcgtggataacataaaggcactgcttagccatcaggcactgtgtctggctgtagcaactatcattattgtcatcctcctcatgggctrtgacatggggaaaaaaaatcctggctgccactggagtgtagacggtcctggggttgcctcctcagaggcccttccctgtgtcctcccaggcactgtcccagagccacccttcaggaatccaggcccacacccagctccagctgcccgagtggctcagtcgcccagcggcctctctgctgactgaggtgaggtgtagcccggccagaggaagcagctgcctagcctgaggaaggtgctgggaggggcacagaactrtgtctgaaccacgtgtgcttcgtgctcagtgtctgatgtgggtgcagagggcagyaggggcaacacatttctatatgttggtggccaaccaccaccaatgttcccagggtaaaatgggggttctgtgggccaggctgccagggagcaggccccctagaggccatagtggttggagtccctggaggtcaccccatgcctccacagctggagtggcccagctgactgggcctctctctgcagctgctgcagttcgagcctacccggcgcctgggcatgggagaaggtggtgtcagcaaactcaagtcccatccctttttcagtaccatccaatggagcaagctggtggggtaagagggcagagcgggtgacggaagcagctggcctggtctggatcgcctctcctccttgcctgacacccaacccagggctggccctctatcagcgggctttgggcgaggaatggagggcactgtctgtcctgctgggctcccactggggcctcagaattatggccaccacccaggaagggccagctcctggaaaagctggaggtgggggcagtcaaggcttgccctgctaagcagcttgaaccatctacccatcagtcaacagacccgttgagcatgtggactcaccatgttaaaggttgccttctgtggcactggcgctgagctgttgaccacctgctgcaccctactgtgaggttctgtgactcactcactgccatgttgtgccccactcaggacatctctggagactcatctcaggacactgatccactggctcagtggacccaaaccagactgtcctggctagtcctctyagtcacacagcgagtaggcctcttccaccagaagctgttcgtgcagctggggaggcccagaagcagggatgccatctgttgtgcagggagggatgaggtaggggacaggatgacccccacccccacccccccacccccgattcctgaccatgccccctatcttgtgatttcagacttgggagagcaaaagggaggggaagaaaataagagkaatggggggaggaaggaatgcaygggtctgccccttagagcaagtctgaaaccagaatcaagagtcctcctccccagtgggcctgtgtgggggaagaggggcagcctgccccaggggtgcaagaggacagcaattcagcttccaggccaaagcagtttagacaaggtgtgcccatcaggactccctctcaggccctggctgtttaccatgtcactgcctactgtgacttcatgcccttttgggataagaaaccacaaaacgcatggaacaactatccatggctcttagccagaaatgtcttgcctctggtctctgaaaagctggggtgagtggttacctcaaagacaattgcctccagtttgggggctcctctcagggttcaccctgtcaccggggcgtgggaccgacctgggaaatttccactagagttttgccctcagctcctccctgccagcatcccagtcaccaccaggtggcgcttctgacacggtccacgtgcctggctctgaaggcccaactgtcagaccagacccctcactcatggtggggagacttgacttcctcgggctcttcaggagactgagacagagaagacaagtgaaagcgcagcctgtacatgactctctgtggtccacgtcctgcctctccctggggtttacacggccccaataaagcctgctctggcctacggtgttctcgcttcttccatgcaatgaccacggctcattggggcaggttggaaggctcccctgtagaagctccagagtgaagtcaagagcgagcttggggctgccaggaagtaggacgcagggctggtggtgagcagcatgccatgtgggcctcaggggaaggggtggggtcggggaggaccaggttctgtggggaagaggatgaagaagccttggaagaggctcatggtgcctgggggaataccagtttcatcctcacagtgaccccttgcaacagacggtagctcctgagaaaactgaagctcaaaaaggttaaggacacaacctagccagagttgcaagttagtgttccttctgctactctccctaagtcaggctggaccacttccaaccaccgcttcatgaagcacaagtcccttctggaacttctgtgcttcatccacccaaagctacacatctgacactttgttgggccctgagtttagaatactgtgggtcccagctcttacagtcgacctcctttcgataaaatggggtaaataatgcctattttgcaggtttaccagatagataaattaaagcttctaacaccaaatcctgttcttcctttcattcaacctaatttgtttttctatctactagagctctagttctactctctgggacccacttccctcctgtgacagaccttcacagagggatggcctcactgcaagagctcagcagacagggactctggaaaagacaaggctgtgtttaagcctggactccatcacacctgccacctgcagtctaggttagctacccaccctgtacactcacgctcactgaccactgctcctaggtcatcaaccctcacctgttcatgtgtattgaccttgagcatcttggtccacaaggctatcaaatccaaatgaaatgagatgcccccactcctcccaaatccatcactgaaataatgtaagcccacacaaaaaatgcaagtctactggtgttttgaaagggcttcacaaagatggtgaccccaaattctctattctagagtatggcttgacaggctcaaggaaggtggggcactaagagactatgatgctttatggaaacaaaacaaaaaacatcctaagccccccaaccatctgtatggacccctcgtctcagtcaagggtattccaaagttaacctgaaacgctagttcgggccatggtgggaagagggagccagccattcctcattatactcccctcccttttggaattactgttaaaacaggctccttaagtctgatgagaagcatttacaatctattttctctgaagcctgctggctggaggcttcatctgcataaaaccttggtctccacaaccccttactgtaacccagacattcctttctattgattccaggtctttagataataactctttcaaccaattgccaatcagaaaatctttgattctgcctatgacaacatccccaggtcttgagctgtcctgcctctccagaccaaaccactgtacatcttacatgtactgactggtatcttatgtctccctaaaatgtattaaatgtataaaactaagttgtagccagacgaccctggacacatgttctcaggatctcctaagagttgtatcacaggccatcagtcactcacacttggctcagaataaatctcttcaaatatttttacagaggttgactctttttggcaacactttcccggctggcagtcagggttctaccttctgtcaaattatgagtgttaagttccacataagggatttctgatttcacaaaataagcaacaggaccttgagtggctttcaataatttcagtgcaacagtgctggggacttgtaccacctcagtagccaaaaggaacagatacaggaaccctgtttgagaatatctgccctttaatttgcatttaaaatcagtttctttaaatactttagttacaagttctgaatagtgaagacagagtagtagatgctgcaggcactcagtattggctcccaccccttcccccctcccccacccccaggcctcacttcttggcttaagatacaaaagggcactctctactggccctggtgtcaaacgtcagcagcctcaggcctggatgcagttggatacaaagccatgaatcccagtggctccaaggaattccaatgattgtgcccagatccacgggcaacacaccttagaaatgacctcatccgtttcaccactaggtactaacaccctcagggtggtttcctaccccagtccacgtcctccagatctgtgtcctgcagaggaagagacaaggccccgctataacgcaggaaggaacaaaaactgcctcctcagcccaggtgcttacagcaacttaactgaaaagctcaaggcaatgtgagtcagtctagaggagacctcccttccctagtctctaccaggctctggcccttcctcgggaccacgcttggtcccactgccatgatgtgctagaatctgctctaagaacaaggtgctagaatgaggcccagcaaccagcaaaggggttggaaagggttgctacagccccagctgtgtgagattgtgccaagacgagtcttcttggtgtcagcctatgatggagagcgtgagggcaggcctgggctctccttctatgatgattacaatgcatgacctcaggggacctctgccctctcctcccactcacacacccagatcccctggcctgtgcttcctggaagaggtagaagaggcatcttgaagtcaatgacaacggagaatgaaggtgccattgaagaagcaaagcagcacctctttgcctgtgttcaatccctccacacaagtggaatcaagggagaatgtgcacagccaggacagaggctgctctgagcttgggaggcacagcatcctcctagaagtctctgcagaacaaactttcaaaagataggaacttaatcacatggtccccaggggtttctctatagtataccagcactagggaaaagcaaaatcatctttgcagagagctgatggaagaaaggcaggaatatgaatgagcatccattaaggctctctctcttaagcctaaggaattaagatattcgaggctatgagacaggtgcagagagggagagcctggcaggaacgccaagaaaagacctgtgactgctggttacacagtgctctgcttccttgcttgaggccaacagcatgtgtctgcctgtcaccaggctaacccgggacccatgaggggacagggagaagactggttttcagttcctgcatgatcaacttgtagggtgtgtgggttcctcctaaagatccaggaggaggactctgggatcctctaccgctgccttgattttgcggaggaaagtcacagcctctctgccatcaatcagccggtgatcataggtcagtgccacgtacatcatgggccgcacctctacctacagagaggaaaggtaaataggtttgtctccagcaagccacagccagcctcgctgaaggagatttagcacagcccataagaaagttcctaattccagagcctttcctattgatgttgcctctgcatatttacagtatttcaaagaccaggacttaccctcagtgcaaagcttccccactcagaaacaaagtttgccaagaaaactgtcttctcacaactgccttttattttttaaaaacatactctgccctctaacgcatctgctgcctacaaggaaagttttcccttcagttctggctgcctgtacttgcttctctctggggttagaatttaaaaaaaaaaaaaaaattaagccagggtctacaaattctggaattgtatgtgtagttgggtgtatgggcattttccaggaagatctacagactgtggtttcacacaggagtcagtaacccaaaaggattctaaacacaggagttcccagaaagcttttttgataccaacgtatcttctaagggccagctcaagccccttttaatacttaattctctgaactcccgggaaatttacaagctttatcatacaacttggcagctcacagactgacatgcataattgtcatctgtttcccaggggcaagggaccacgtttccaactatatcccccactccatagaagcaaacaagcctcctcagctcagtggttctcaaacttgaatatgcatcaggatcatctgcacttcttctttaagtctgggatggggtctaagaatatgcatttctaataaggtcccagatgatgctgatccagaccacaatttgataatcagtgccttagctattagaaactaagaaatggaacttaggcctgaaattatagttaatgttttacaattagcatttagttggatttccctttcatcgagacctagccactaggaccttagaagtgacggttcctaccttgcctcctatagccactggcctgtcaaagatgccatgcatccccaggatggcagactgaggggggttgataatgggtgttccaaagagcgagccaaaaacgcctccattgctaatggtgaaggtaccgccatccatatcttcaatggcaagttcattctttcgggcctaaaaacagatttcataattgaaatatcaagccaacccagtttccttcacctaaagtcagtccataatcccagcgctttgggaggccgaggcaggaggactgcttgaggccaggagttcaaggccaacctgggcaacatagtgagacccccatctgtataaaaaacttaagaattagccaggcatggtggtgcacacctgtagtcccagctacttgggaggctgaggcaggagaatcgcttgagcccaggagtgcaaggctgcagtaagctatgactctaccactctactccagcctgggcaacacagcgagaccctgcctctaaaaacaaaaaagcaaaggaagtccagaaagcttgtatcgagatcgatggcacaagcgctagcttccgtgtgacagttgttcggctaaggtgtctatgaccagtgctccaccagagaaaaggcacaatttcatacagttgaagacttcaaagatgatcttttctagcaggtctcatctgatgagatttcagttaccagagcatggtaaactccaccagatatataaaatacttagctctcatgggcaactgcttttctcaggggctatgcacttgactttccatgagcactgcttgctagtgagcccagccttctgaaggctctcttccctcgcctgcttagcagcttgtatacatctttctactttaccttctctcccagttcagtgatggtccgttcaatatctgcaaaattcatagcttccacattcctgatgactggaaccaccagaccctgaagggggtgaaaagctgttttcagttgcaaattaatagtaccttttatagttaacaactcccttgattcaacccatggtatgccctccctagaataccttcattactcagtgtgattaacagaaagtgttaaaagaatgcggcatggtttaaaagaaaaaaaaggttacttttactaactcccttctaaaaatacagaattaaagaaatgatttctcttgtgtgatctccttcacacagataaggtgagggtctaagaccaacattccccacctcctgccccaacatacccgtggggtggccactgcaacactgatgtcaatataatccctatacaccacctctttggttgtgtcgtcaatcactatgagagagaaaatacatgttacatacaactccccaggaaggccaagactaatgaggtaatatgtgcattaacagagtaaaaatctgcagagcttgatacagtgtgggctgaccaaccaccatgaacaccactgcattatgcatggcagctggcattccacttactcccatcccaagtatagtatctcccaagtccctgactgagcctgggcataggagcatccatttctttggcagccctaagaagggctcaacacactggcttccataggataggtat

SEQ ID NO: 97712 - DNA, 139041 bp, Homo sapiens
  misc_feature (1)...(139041): n = A,T,C or G
acacacatcctcccagatactttaaatcatctctagattatttatactacctaatgcaatgtaaatgcaatgtaaatagttgttatactgtattgttttttattggtattttttattgtttttaaatatatatatattcaatacacagttggttgaatctattgatgtggaatccgcagatattgagggctgactgtgcactttaaacgtaatcctcacagcacatctacgaagtctaaatactatcattaccccacaatgaactgagctttaaagagcttaaataatatcccaaggttacttagaaagtggcaaagctggaatacaaactcagagcccaggaacactattatgccagaacacgtccttttgtaccttgtacctattgaacatgattcagagggagaactgaagccaaccccagcaacgttctctaaactctcaaagcctctatgtctaataatgatctttctaatgttatgcatttatcattttatttatttttccaagctcaagttggaaataacatttgcaatactatccatccttttttttaaggtgttgatactagaattggttttgaatggccctagatacaggtgtacacacatgtacatgaactctggacccagggtaaatacatagcagttgaaagggtaaaaatgccaactgggacttctaacagaccaggttcaaaataaaaagagatgagggaaagagggggaacaaaaggagaaaactaacaagtgtttattgagtatttcatgttaccagttactgtgttaaaatgctcatttaatccttaaactctattattagtcccattttacatgggagaaaaataaagtgcaaagagcttgttttccctctttgcagatgaacaagctatgagttagaggctgataataaagtcacatagctaaagtgtcacagccaagtttaaagcccaaggttggccaaactccaaagcctgtggtattaactataggctcgagggtagcccttcatgattgctaccatcaaaggcaaccatgattgttcacactttttgtaatcccctctcctcaagtgtgagtgaaacttgtgacctgctataaacctagaaaatatgctaggatatcactccatttggctagcagattcactttagagactttaaagacactcctcactggctgatgaagtaaacagctgtgttagggaaacccacagggtgaggaactgcaggtggcctctaaaatctgagggcagccttgagccagcaaggagccagggctctcagtctgtaaatgcaagaaaataaatgctgccaacaacctgaaggagactggaagcagattcttcctcagtcaagctttcagatgacaatacaggctgatggatgctttgattgcagccttgtgaaaccttaagcaaagttaagttgtgctgagactcctgactcaagaaaccatgacataataaacgtgtgttgctttaaattgctaaattggcgataatttgtacataccaatagaaaactaatataccatagtatcttggtttttccctatgcttggggtgcagtaaattcttagtagattacagctgctattattataataatcaaaatggaaatctgaaatatcgaggtcaagaaaaaagttaacagagaaatttaacagagttaaataattgcttccaaagtaaccaagcggctggtgtagaagacaaaaagatgatatgttgaagacttgtatattactcccaacaagtattgagtacattatcatcaccacataaaatattataaattttctagtggtgcttatatctacatttagctttaatatcttacaccatactcaaagtaaactggaaagttttcctacattaagatagtcctatattacctatgaagaaatatcaaaacacagtttcaggttagagtcatattgttataaattatcatttatatttttatatactatatattagctgtatcaaaaattgtaaaattttttaaattataaaaacacatataattatatatttatatatataacatttaagaatagctcaaatatgatgcataaaataattcaggacattattggatccaaaccctaatgaaacaattaccagcttgacaccttcagttcattagtgcatgtaaatcttgcttatcaaagatagcttatttatactaaacacacaatataattacacatatttagctgtagagtaggttaagaatgtggatgggtttccattgcatagattcaaggtttgctatcacagaaaaaagaagctagtgcttctatcttactaaattggaaaattatttttctcattgttcattctatcagtgccccctttcccctctgtatttatatagcacgggaatgtatagtttctatcaaataaatcattagaaaggcaatgttcaggccggacatggtggctcacgcctgtaatcccagcacttggggaggccgaggcgggcagatcgtgaggtcaggagatcacgaccatcctggctaacacggtgaaaccccgtctctactaaaaatacaaaaaattagccaggcgtggaggcgggcgcctgtagtcccagctatattgggaggctgaggcaggagaatggtatgaacctgggaggtggagcttgcagtgagtcgagatcgtgccactgcactctagcctgggtgacagagcaagactccatctcaaaaaaaaaaaaaagaaaggcagtgttcagtgattgagtagctatgttaaccttactactgccacctatacaaatatgcacagaatacacagtaaacataaacatagcccttttataggtgttatggcattagaaaatttgccattctccctctaattagaacatataaccttgatggactatcacttttcatgtgattggtcggtaacagatataataaatatgccaaatacagtgttagtgacatggtagctaaatattttcttcctgattcctttttttgaaggcaatgatggaatcttaactcctatccatttcttaattttgtattaatttcttaattttctatcatctgtgctttctggaaatgtacactaataatatatctatacctatttatttgtgatttggcttttagctctcatactgactgaaatgattcaagtgatagcaagtgaacatagtaattaatttgaaatttatctaggtttaaatgaaattgcttgcccagtttacacactttaaaaaaatttttgcaaacctgatcatcagcatttactttcctgtttagattcaagattatgaattgttctgtggaaaagtaaaagtaaaagtaaacattgagctggatctctgaaagaactaagcacgacactcaatgtgtattttcttcctatggtatgttatcaacagatggataatgaggaagcaaaccagactgtcttgttctagtgtctgggagacaactgacggctatcatttagtccaagtgccaagttggaatcttttctggaacaaggtggggtataaacacaaatatttttttaaaggccaaaccagccaggcttaaggaagtttttgaactgttgttgacttcctgaggggggtcaaaatataagaatttgctaaatccaattcctagcataatctatgaactgattctagacataaagaaaaattattttcctttctggccttagataaaacttggttaatcctcttgttaatattttcacagtataaacacatcttttttaataaaaaatttttaaactgacaaataataattatatatatttataggatccaatgtgatgttttgatatatgtacacactgtggaataactaaaccaagctaattaacatatctttcacctcacctacttttttttttttttttaagagatggtgtctggctatgttgtccaggctggactcaaactgctagtttcaaggcatccttccacttcagctgagactacaagtgtgggccactgtacccagcttattttttttatggtgagaacatttaaaatgtactcttggctgggcgtggtggctcatgcctgtaatcccagcactttgggaggctgaggcaggtggatcacgaggtcaagagtttggagaccagcctggcaaatatggtgaaaccccgtctctactaaaaatacaaaaattagctgggcgtggtggtgcgcgcctgtagtcccagcggctcgggaggctgaggcaggagaattgcttcaacctgggaggcagaggttgcagtgagccaagatcatgccactgcactctggcctgggcaacagagccagacacagtctcaacaaaacaaaacaaagaaagtactcttttagctattctggaatattaaatacattgttattaactgtggtcatcgtgctgtgcaatagatcactaaaatttattcctcctacctgaaactttataccctttgactcacatttcccctttcctcatcaccctttaccccccagtctttggtaaccaccattctactctgcttctatgtaaactcatctggttttataagtgatcagggatttaagaggacttcactcttttacagttaaatttatttcatattggggaatgattttctcactttgtttcttacataattttagaggattgaacttagaaaaatataatgtaagagttttctctcaactatttttgatgcttccttactttttgtcctctttccccaactttagctctttggtggggaaaatattatttcataaaagttatgtttgcagttttcaaagtgacttcttagaagtgaaacttggatcaacatttttttcaaccccccaactataagagttacattttcacttttgatttgttaaaacatactatgtcttataaatgcttgaaatttatttttaggcaagaatttcaacattgaataaaatcttcccaaaattaagtcacaagcactcaaaggattgaggatctttttcttcctaaaatatatgtgtgtgtgtgtgtgtgtgtgtgtgtgtgtgtgtgtgtgtgtctttatatttatatactaagaccttccctttcttgtggactgtgttttattggtttaaagttgcaagtcctgtgaaaccaggctgaagtcagaattagaaggtattaattatcatacacactccaagtatctcagtcaagtaacaggaataactgattacagtgtctgggaggaaggcctggaacttggggaagacttggaggggaggactggatggggaaaaggcctcaatagagagaactgggttgttgcggaggggtgacctttaacctttggaagggcatttactagggaacagctgaaaagcatttacttcgagggggtgggggagaggaggaatctcgtggaagtatttgctttaataggtcccgggtgatttagggatgtttcgagtcggttggtcttgggggtggcgagggctacgctggaggggtcgcgtcccagtcccggggaaggcggcaggaggttttctgggtgttcctgaaaactgggagttggggggaagggtggtggggaaagtggaattcagcgtggatttgtctgcgtgtaggactattagaggaggcgcaggggagccacgcggtgtattccccgccccgagagaactctggctgcgcctgcgacgggcacgccggcctgcgccaaggccgctttccccaggcggcgggcgctccccccggcccgggccgcggccctcccgccccggcggagccgcgcggtggattgtgggctgggggctgcggcggcctccggcgctgtctccccgcacccgaccgggccgagccggctgggccggcggggtgagggaaagcagtggagtcgggagcagaagcgctagaggcagtggtcgtggcgcggcggcggcggctcccctggaggccggggatgtgggagaggcggtggcagcagcggcggaggcggcgctgcggacccgggggaaactgctggctgacaggacacccgggagagacgtgagggagccgccgctgccacctctcacccctgagtgaagctgggctcgagagggcggccctgtgctccccgggccgactggccagcgggcgcggggcgggggcgggaacccgggctcgggcccggccgggcgccgggcggcggcggccgtggagcagcagcctcggtgcgacgtggagggctggaggcggcggcgatgcactaggcctcgctcagggcggctgccccgggacccgcaggtaggtgtgccccgcggccccccgcgcgtctcagcccactctcaccccgacctacagcggagagagggaccgagaccccaccccctcggctctcctccccagccccaaacggaccgagtttcggtcacagctgaccggcactgaagcttccatgctcctctccgccacttcctttttttttttttttttccttttcactctccctccgggatcggggctggcagctgtgttccctgcctcctgtcagcgaccgcaaacgccgctcttgcccctctcttatctttccgggatcccagctctggaacttccatcacccccttagacgctgcccccaaactttccttttctttttccagccaggcccttagtcctattggattctactggaatcgttaaaacatttgtttgtttttctctccggggaaggctaacccaaagagttactcagtattttgcattttggcaatgtagcttgaaataatttgtgcaataattttcttcagttctgcctccttccatctctgcatagacagaaagggcaggccctctctgccgtttctgctctcccgtcgttgacttgggaactttggcttgccaattataattagccgtttggtctgttcatgtgttgagttcaagatggtatttttagcattttgactgacaggcgtttcaaaaaaaaatttttttcttctaaccagctttattttttggtctttattgaggctctttcgaagaattaaattgtttggactgtttttgtttttaattggctgtatttctgatttgtcaaatcaagggcggtcttaatactaaacgcctttaagtaatrccgtgataaattacttgtagtataccgagaaatattactgcgataacctaaactgcagattttgatgtacattcacttttataaatccgaaggggagttctaattggaaaaagcaccttcagagcctaaatgatttctaagcagttaaatgatggaacagagggaatgatgggatttgtttgactgtatttgtagtgtagtcagaatcggatttcctagaaatggatgttgatggttcgtagtgctcatcattgcttatgataggttaccagtagctgtaattgatagttgtttgggacgacagtagatgtttgcgattttattgtaatttggctatttttaaattatgttctgataacttaagaattattacactaccaatctaagaggcagtctgaggatcacttttttaaataaatgaaaaatgttttaatgggtttttaaaataaagaatgcatcacaaccaaatcgtaaagactgttttgttgttgatattcgtatattttgttcttgtagaagtattgttactacagcatttggctttctgaagtgtttttgaaattagaatttaatactaaaagtttactaggaaaaggtgattacttttgcatatgcttatattttctggaaagttaaaattgatttctggataagataattttttgtgtcagaattaaagtcaattcctatatagcccrtgaaacggcaaattttgcagaatttcttcatcacactctttttttttgtttcttttctttttttttttttgagacggggtcttgctctgttgcccaggctggagtgcagtggcgctatcttggctcaccgcaacctccgcctaccggcttcaagtgattcttctgcctcagtctcctgagtagctgggactacaggcgcccccacgcctggctgatttttgtatttttagtagagacgggggtttcaccatattagccaggctggtcttgaactcctgaccttgtgatccaccggcctcggcctcccagagtgctgggattagaggtgtgagccaccgccccggccccggcccatcacactctttttttttttttttttttttttaatcaacaaaagttaattacaattcctctttcctgctctttgctttttaaaaactgctttattgagataaaattaacataccataaaatacacccatttaaggtgtaccacttggccgggttcagtggctcacacctgtaatcccaccactttgggaagcctagtcaggtagatcacctgaggtccagagttcgagaccagcctagccaacatggtgaaaccccgtctgtactaaaaatatataaattagccgggcatgggggtgagcgcctgtcatcccagctactggggaggctgaggctggcgaatcgcttgaacctgggaggtggaggttgcagtgagccaagatagcaccactgcactacaggctgggtgacagaacgagactccatctcaaaaaaaaaaaaaaaatatacaattcagtggtttttagattaaataattgtgcaaccatcaccataatctaattttagaacattttcatcattccctcaaaaaacctttatccattaacagttactccccattctcttcaccccacccccagctttaggcaaccactagtctactttctgtctcaatattggcctaatgtgggcctttcatataatgcttcttggctcatagcttcttgaaaagcttttcctttaaaatcagtgtacatgttaaaattttttatttgagctagggaataagcaactgatcaccaatattaaaagtgatgttgtaaataactgatacactttttggttgtattcagcataaagttggagaaggcatgaatggcttcagtaacctcaagaggtagtttggtcagctcggaatcaataagtaaaagtgggcatttttgtcattgaatattagaatatcagggaaaagatcttaaaggtcatcagcttacttcctgcttacctcgctattagttggcagcaaccagatgaggaaacatggagattagaagcttgaatctctaggatgtgtggctcaagaaccacagcgtggccatgtaaagcaagaaatgggactttggaagttagaattgtttagattcttgtatatatgtatgtatttgacattttgctagcagagctgagaaagaactggacattcccccaactttgggggaaaagtgggtgactatatgtagctacattgatgaaacccatgttacaaaatcctctaaaaatgctttaacctaaggaagggtagcaaatgtattatttagatatcttcttatactattaatgtcttatttttttaaatccaaattttaaaaaaatataattaacagggccagttggaggtttcctttttcaaatatccagtgccctaacatctaaaacaatggctctgcgaggacggttttgactccaagggaaatttggcagtgtctagagacatttttggttgtcatagctgaaggaaatggtattggccaaggatgttgctaaataccctacaatgcacaggacatacttctgcaagaaattatccggttcaaaatgtcaatggtaccattgtaaacctaggggctgcacgatttctggtaaggacctagtgtttttgattcctaccaggtgggagaatagtctcagtgggcgatgtttggtgaattagattaacaccttagatcctctagcaactaactctatttctttgcaagaggaggaattgagggaaaaataaaaggaaatctgtttacgacatgacgcagatactgtttcgtatgtttaggttgtcttcaaatctgaaaaaagaacccctttttttctaaaaacagacttaatttactgcaaatttggactactattgttttgaattgttatttttgcatatgtttttgaaattgtaaatagaatatagtcatatcttttttatccagaagtgatttttttttttcctggcagcttcaactaccaagaaaggagaagtaagctaagtgtttaactttatggataacacttatgttatatatgtatgtataacacttatgttatgtatgtatgtatgtatgttgtgaatgtccagaaaaattccaagcttataatgaatctttttttcccctatgagctccactttagactatttaatgtttttaacaagcttaatttgttgatgaaagaaggtaattgacagttgagatcacttttgctatttatcatccataccttatggataagttactcaagttattctttctgagcctcagttttctcatctataaaataggggtagtgataatccatgtattacaaggctattgtaagaattattaaatgaggtaatatgtattaagatgcagtgtcaactataatatactgtagaagagttattcgcttcagaagaatcaaattaggaaggaatatagaggttgtcaaaggcaggaatgtagatagtaaggcggagaatagtgatggctgacagcctctctagggaggagagaagcactaaatacaaatattgataacaaactagtaaaataactagtatatcactataatctgaaactccttaatataggggcaaactgacttccttctgtagcacctgagagtatcaccgttatagcacagtaaaataactgattattataatggtgaaattaacttattaagaaaagattaccttgttttcaaatatgctatttgagaagacttgaaaatatatatattttacttcagagttaaaatttttggaagtgacttattcaaaaagttttagtgtttttaagagtatgctgtcgttatttggattaattcccttttggggaataatccttttgtcttcatttactatgcctgccttcctgtgtatttgaagggtttttctattatctgaaggtaattattcttcagatgtgagaatttaactgaagaaataggggttgtaagcctgctcaccatttgtaaaatctcatttccttctagatttcttttaaaattatttttcatctttctggcgtgtcactacgcccagcaaatttttgtattttaagtggagacagggtttcgccatgttggtcagactggtctcgaactcctgaccttgtgatctacctgcctcggccttccaaagtgttgggattacaggtgtgagccaccgcgcctggctggtttcttaaaattttgttaactggtcacctttctttcagaatcatataaaaataagggtagaggtggtcaaaggcccagctattcagtaagatttttatggggtaatttgagggtggaatagttgcagacaatattcagaataagtaatgtggtattgattggtattatatatgatatatatatatctctctatatgatatatatatctctatatatgtgatatatatcaatatatagatatatatatcaatatatatctatatattgatatatatttatatataaatgctgatatatatcatatgatatatattgatatatatttatatataaatgctgatatatatatcatatatatatatcagcatttacttaataacattatttgatgtatactctatacttaaatcttcccatttgtcccaaaaatctttatagctttttcccccctcaaatgcaggattcattcaaggttaatgcattgcatttggctggtatgtctctttaagtctcccccaatctggactagtcctaccgccttcctctcttctttaggtttatccattgagaagtagagaccatatgtcctggagcatgttccacattctgaattggtctgttcctcatgattagattctagtcagacatttctggtgagaccatcacacagatgatgtgtatttctgctgtattacatcaggaggcacatgatttcaggctatcactatatcggtaatgcaagtttgatcacttggtaaaggtgaactgacagatctctctactgtttaataaataatttatagaggatacttaatagccatgtaaatatcctattccctgacaaccctttaaccagtgattttggtacccattaatgatccttgcttgaatcagtcattatgttggaggattacaaatggtaacttttctttttgcattccttctacttttattaccttctttgactttttcagggcattgaggtcaggttagataaattctgaatataggccacggaatgtagaaatcaggtcattcctaaccttttctggagccaagtaaatggtgaagatggaagacagctaaggaagtagaccaaaaagagaacggaggtttgccaatgaaggggaggtgagaagtagtagctggaggaggcagggaggagggaaagggccttcatttggtgcttgaaattttcttttcttttttttttttttgatgggccgatgaagagattaaagatagaattggggaataactaatagaaaaaggtcccagatgaagcaggaagaggtaagatcaaaaacagctgttgggggattaactctggaaaagagtagacacctatactctatctcagaaagttaagagttgtgtatagatgagaattaggtacatttggatatgaacggaaaaaactacatctggggactttttttttttttttttttttaaacagttactttttgagccttgcgttgttggaagtaggctaggggacttgaggagagtgatgaaaatgttccacatattgtggggaatggagaagagaagtgtttcaagataaataagtgaaagaattgctgagcagcatcagaggctcatctgagattggaactcataaatttgtaatcagcatattttactgttttttctggcagtgttctgcaagcaggagaaaagcaaagacacactgtattgaaggtggatgagggaggagagatgcaagggagatgaagtaatggggatgtaggctaagtaatgaagttagtaaagtagagcagggctaagatagccaaccagtggtgagagatgcaagggtaatgccaaggagtgattaattaaaatactaatttattgtttgtttgaggttatagtaatcataaaccctgtatttacttttcccttaaactaacatttaatatttttatttgtaaactatttactgacttattgcagatgtttcttagctattttgctttattttccctaaaatgaaaattccttgaaagcatcatctttgttacttaataagtatctaatagtttatatatttgagacatatttattcttcagtacctctgaatgagagattttaagattatcttgctaatatttttggctgggacaccaagaagagaataccagtgtctaatatggttcattttgactgacaaaaatttcactagtaatacaatcgtatcagtggcccaaaggagtaagaaagcatccaagctattttttgttgttgttggaatttttacatgctagagacagattttatcttagtatagtttattcatattccaggcctgtgacccttaatcaattttttttttcttttgagatggagtctggctctgttgctaagctggagtgcagtggtataatcacggctcactgcaacctccccgttctgtgttcaagcgattgctctgcctcagcctcccgagtagctgggactacaggcgtgcaccaccatgcccggctaactttttgtattttagtagagacagggttttaccatgttggccatgatggtctggatatcctgtccttgtgacctgcctgcctcagcctcccaaagtgctgggattacaggcatgagccaccgtgcccggcctccccttaattttaatggctgctataatgttataattctctgagtgctggggaaaaaaagacattgcttttatttggaataatatctagacttaaaaagtatatattttatgaggatatttatgatttttcttcctgataaagatatcacatgaaatagcatttgttttataagccatttaaaaatatttaaatttaacattacaaattgttataatttttatcctcctagtcaatattatttcttattgtttcttgtcactaaataaaaagtaaataagcaactttaggaagcgcatgcattcagagtttcctgcaaagcacagggtttcataaatgccatatgaggatgtaaagaaaaagaaaattagattactacaactttgttcttattttctgggttccttaagcctcttccatacttctttaatgctcaagaggactatagaagtacttatttatatgacagccccaatgttagtatttcttgagattatgtttaaattgtaccttcaatattgagatttttgtgagcaataatatgtgatacgcattttaaaaaaatttaaagatttttaaaaattatgattaaactagattttgtcaaatgataaatagtgtagaagtatattgctatttgtgtataggtagtatgaaaaacttacatttgccagaaattggcttttacatttcaaaaatgttgtggaaagtacttcttagaacatgagatatttgatgtattttgtaggcaaacagcaagaaaccaactgaaggatgagattaaataggaacaagaaaaggtggtggagaaaggagggggcagagtttttactatggtaacataaactcctgagttctgtcaaactgatctttggtaggacattacagtgtggttaagtttttcttgcatattatcagtacttgtaaatttggagaaatgaaatttgagatttttttgtttgcttttaaaaaaacagcagtcagttgtggacttttaaaaaaattaggtccaaaattgtatcaaaattatgtcaaaaaagctctgtccagctccagtgttaaaaagaaattccactttatccatgttttctcaaattataaatagactttttttaaaaaagttcatttataagtcaattatatggggccaggcgcggtggctcacgcctgtaatgccagcactttgggaggccgaggtgggcgaatcacctgaggtcgggagtttgagaccagtctggccaacatggtgaaacttcgtctctactgaaaatacgaaaattaggcaggcaaggtgacaggcgtttgtagtcccattttcttgggaggctgaggtaggagaatcagttgaatccagaagcaggaagttgcagtgagccgagatcacgccactgcactccagcctgagtgacagagcgagactgtctcaaaaaaaaaaaaaagggtcaattatatggaattcagaagttgttgttgttgaaatggcctctctccactgccttggtcagagtgcagtgatgccatcacagctcactgcagcctcaacttcttgggctcaaactttcttgaaagtgctaaaatgatgcgccaaagtagtatatttatcccacgttacaggtgcacaattactcctttggtaagaaaaatgcagtaaattacactgatgaaaatgtaggctgggcatggtggctcacgcctgtaatcccagcactttgggaggctgaggcaggcggatcacctgaggtcaggagtttgagaccagcctgggcaacatggtgaaaccctgtctatactaaaaatacaaagattagccgggtgtggtgctgggtgccagtagtcttagctactcaggaggctgaggcaggagaatcgcttgaacccgggaggcggaggttgttatgaactgagatcttgccactgtactccagtctaggcgacacagcgagactccatctcaaaaaaaaagaaaagaaaatgtatagtatcttttttcttttggaatagtcctggtcttataaaattgtcacaattagatgttaattatttctatcattcaatagaagatgaacataagtaacagttatgagagtaaataattattgattcagtcattgatctgataaggagacaaagacagaaraggaaagcaccaggagcctgaaatgggtgggaaggagtagtgacataatttaaaatttttttattggtgcagagacagaggcatgaaacttagaatcagaaaatctgaattcagattccctcttcacagttaactcactgaatggtctgaaatcaagttactctagaacttgtttcttcattcatataatggagatcgttgattcattgattcattcagaaatatttttcttactaggttattttgaagatgaacaaaaacatctgaaagtaagctattatgaactgtatagtgttcactgtatttgactgtatagtcagatattagtgatgatgcaattcttcttgtctttccatttcattcttccctgtcatccttccttctttcattgatagcgtatttttacatgctcttgatctagcgcttcacagaaccttcagagcctgcagtcccagctgatttccactcctcctcccactcacacattgggcacaggagtagggtgtgaggcaacttttctaggtcagcctgcttattttctcactgttgactgacaaagtcctgtctttctcaaggtgtgacataaacctgaggtgccttttagtccctgggcttgatattctttctttctcactttgcctctccttttcccatcccctctcgccccattcctgtgtgtatgtaactctgaccatctcctttctccaccacttacttgttcctttttttttttttgagacggagtcgcgctctgtcacccaggctggagttcaatggcatgatcttggctcattgcaacctctgcctcccaggtccaagcgattcttgtgcctcaaccktctgagtagctgggattacaggtgcatgccaccatgcccggctaatttttcgtattttttgtagagatggggtttcaccacgttggctaggctgatcttgaactcctgacctcaggtgatctaaccacctcgtcctcccaaagtgctggaattacagacatgagccactgcgcccggcctcttgttcctctttaatctcacccttcaattggcttcttgctgtttgcctacaaatatggtcaggtctccgatagcctaaaagattcttgctcaactcttgttctttttttttttttccttttaccaccaaagagatgttgatattgttgcctttattacttcatcacttacctcttaacctcagtgggattgcttcttccctaaccactgtcctgaaactgttcttaatccagtatcctttctaaagttagtaatctccttgatctctttgcagcatgttgatgctacttactgttcgcactttacttcctgacacatcttccctgtgtaaggatggtatttctgattgcctttgtcttttcctctaaacatatttgccctaccccttcttcagagctttcattagctctcttcttcggcactttctccatttgtaatatcactttcctgtgactatctgtagttatctactaattcattcctgtaatgtaattgaactagaagcagtaatggaaaattcagggaagcaggattctgttcactacaagaatattttttctccaaagtaattatggttgttttacagtagtactctgcttttaaagtagttaattcttcattattgaagttttcaagtagaggcaaaaagacaccttgtagaaaggatttatatatgaagtagaaagtcaagccagatattcttttaaagtcttgtccaactcaaaaattgtaatttttatctcgtctactctacttccatggacttaactttgacctatgctcagatgtcttccaaaccattatttccagtcactcccctaccacctcctcgtctgtcttctctcccacgggcacaattttgtcatcaaagttgcttatgttctaggccaccatattttctagcttcattatcactttccaatattctttttaccccctttagtggcaaggcaatgaggatcatttttctatgctttggtgacttttctgaaagtaagttatgtctgcccatattggtttagtttgttattgctgttttccctctactttctcctacccaccacctctctctccaggattaggaatgctcaagcaaagaaaaggacgccagaagaggaggctcaggatcctaaagtttgcatttattttaaaattttgcatggcacagttgaaatgttaatgtttgctgaccatttaaaaagtaagatgtttgccgggcgtggtggctcacgcctgtaatcccagcactttgggaggccaaggcgggtggatcacctgaggtcaggagttcaagactagcctgaccaatatggcgaaaccctgtctctactaaaattacagaaattagctgggcgtggtggcatgcgcctgtagtcccagatactcaggaggctgaggcaggagaatggcttgaaactgggaggcggaggttgcagtgaagccgcgattgcaccactgcactctagcctgctgacartgagactgtctcaaaaaaaaaaagtttataataatagttgttgcaattatttattgaatgtctactatgtaccaagtattatgctatgaactcacataagttatttcatttaaatcttatgacattcctatgaggaagatactgctgctgtcccattttacaaattaggaaacagacttaggaaggtaagacagttgtcacacaactaataaatgacagtgatctaactgattgtatggccaatactcttaactagtatatcgttttacaaggaaggtggagatctagaatcaaatttcagaaagtcaagtaatgttaatacaaacaaggaaatatattttggatttatatttttagattatttgaaatgtatgtgaaccttttgaggtattgtgttagtggcttgtgtgtcttacacactttctgtgatattcattcatttgctcattcgttcattgaatagtcatgcagtttattgaatgcttagactttgtattgggtgtggtataggaaagtgaatgaaacaaatataagtaagtaagtttacagtatagtgggagagataggaaacaagcaggtaaataatcacataatttattttagtctagagtagtttcccacctttttaaaatgactgagtatccaagccattttcttaatagactatctcatactcttaatttgtctcattgtttcctcatatatggtggtttaaaccttactatcctacttccttctatttactgtaaactcaaaggtaggtctagagcaagggtgctgaaccttgagttcacagactcttgtagggtctgtagaattcagggaatctgtgaactttagatggggaaaaaattacatctttattttaacttattccctaactcagtggttctcaaccggggtgagtttgtcttctccttccccaaccctaggacatttttgattgtcacagctgggtgggtacaagatagtccctgataacagaattatccctttcaaaatgtcagtagtgtcaaagttgaaaaactctgccctaactggattttagcatttcctttaattaggaatataagaaacgcttcatggatacagtatggacagtacatttacagtacctgtagctttgtcaccaatagaaatctcaggtattctcatatcacattcaattgctacagatatcttaagatttaatttatgctcatttattgcctataaggtagttactagattcgtattaagaagcaatagtaggctgggcgcggtggctcacgcctgtaatcccagcactttgggaggccgaggcgggcggatcacaaggtcaggagatcgagaccatcttggctaacacggtgaaaccccgtctctactaaaaatacaaaaaattagccgggcgcggtggcgggcacctgtagtcccagctactcgggaggctgaggcaggagaatggcgtgaacctgggaggcggagcttgcagtgagccgagattgtgccactgcaatctggcctgggctaaagagcgggactccgtctcaaaaaaaaaaaaaaaaaaaaaaaaaaaaaaaagaagcaatagtagactgggcatggtagctcatgcctgtaataccagcactctgggaggctgatgtgggaggactgcctgagcccaggagttcaggaccagcctggacaacatagtgagacctcgtctctacaaaaatacaaaaattagccaggtgtggtagtgtgcacctgtggtcccagctactcaggaggctgaggtgggaggatcgcttgcacccaggaggttgagattgcagtgagctgtgattatgtcactgcactccagcctgggtgacagtgagagcctgtctcaaaaagaagaaataatactatgttataatttaaacagttattattgtagctgtagttcagtataattgtccattgtagtgttgtgtgttttatgcatttaaaaacattattctaagaaggtatccataaacttcgccagactgtaaaagaaatccacaggacaataaagcttaactcctgatctagagattggattggattggattggattaaacatttttgaagagactatttcataggtaatgatgtttatttcctattttgtcatttcatgaattacataatatcaggttgtcctcctgttatcagtaatgttaactttaatgacttatgtaaggtggtgacagccaggtctccattttaaagatacattttcccctttgtgttgctaagtaatctgtgaggtaatacttaggcgccatgagaatataatgtttttaacaacttttcacctaatggccttagcatactttggtgatttttgcctgaattagcttttacattgggggttgcaaattggtgattttctaatttggttattccttttatatttattactggcattcttcagtagagattttctttccccaccccctttccttatctttttttttctcccttaagtatctctatgtatccattaatttttacttattccatatgttatactctattacttttaaaaaaatatgctcaagttgtcccaaatgtggccagtgggaacccccttttaacttggtcctttgtcctcttgataggtcctgctggtctttgagcatatcttgctttctgacacaagagtgctcagggtagacttattctttctgtattccatgtctggagttacatattcyttcaaagagtcctggttcttttagttggaagtggtatttagaaacagaagtctgggcaccacgtgtgttcattgcttggtggggttctggctggtggttggggttgggggaggcaatgcttctagtgcctttcaaaagaagtttttaactgaacataaaaagatattttgagctataagaaagaaaatcaaatctctatttactcatccttggaaatcctttttttttggaatggatgattgttttttcttttccttattagcccagacccattctgttattacttaagtattattggcagctgtctgtctgttttgtctgtctgttctgatatgttctacataccatccatttcattcatctataaaatttttattatatgtatgacaggaactgtgataagcaaatagaatacacagaaaaacagaaacatcaagaaatgcaaagcctgatagggaagaactgtatgaaaagcaaaacctcagtatgattgatgcaaaaattgaaatacatagagtgactaagtgtgagaaaccaaagaaagcttcaagagagaataatatttgaacatagtattcatacaattataaggagattaccatgtgaaaaaggtagagctatttatagattctcattacaattgttaaaatgccaaatttgtttctagatggtagttaacttgaactatcagaaatcagtagttccctgtgtttagtgcttagagctttccgttttcctgtattttgtgtattttgtttgcttgtttgttttttcgaactgattttttttctgagtagacaaactatcattgcttatcctgaaaccttcttaaggtttntcatcatttttgttctttagcctttcaatgaaagattatttctttgctgaaattttgtgattcagatgccatgtacatttgttgtatttgtctgtacatctacatcttatgaataaatccatgttttcttaccagtgattgtacttttataattatgtgatgatcagtacaaagtttggttcttactgtagggagatctttttaataataagctgtggatggtgaaggcagtgaagagtcaaatgtttggaaactgggactcatctttataggcagtccactagttttatgtaatccccttttactagagatcttccctcttgttataagaattaagagtggtataggaaaaaagagaatgtgcatatgttttccaagtcaaaatctttaaagagtaaaccatgtgtttttctcctcagatacagaaataacttagaagaatctagaaatatttttctgccatctccctgcatatttctaggtttctaaaatggcacttaggattttttttctgtaaaaacagcatggtaaatagaataaatcaagatatcaacatagtattgtcagaatgaatatctaatttatctgacattaagcaatggatgtttaacataaatacattttccacatgtctgtggcttaacacttcatgtcaaaatgtatttattttagatttgggggtacagagcaagatggtggactagaaggctccactggatgtccccctccataggaacaccaaatttaacaactacacaccaaaagcactttcataagaaacaaaaatcaggtgagcactcacagaacctgattttaacttcatattgcccaaagaagcactgaacaggataggaaagacagtcttgaattgctgacaccacctctcccccatcccccatgcagcgactatgtggtgtggagaaatttgtatgcttgggataggaggagtgcagcaattgtgagacttctcattgaatgcactataacagcaaaaagcaaaaccagggtgaactcagctgatgcccacacatggagggagcattcagaccagccctagccagaggggaattacccatcacagtggttggaacttgagttctggcaagccttgccactgtgggctgaggtgtgccggggtcctaaataaaaggcagtgtaagccaaaaggactgcaagtcctagtgctgaactgggctcggcaccagtggaattaggggcacatgacttactaagacatcaattggaacacctaagggagtgcttgtgccaccccttctccaagcccaggcagcccagctcacagctctaaaagatatccctaccttctgcttggggagaggagaaggaagagtaaagaggacttttgtcttacatcttggatatcagctcaaccacagtaggatagggtactggtcaggcccccattctaagccctagctcctggataacatttctagacacacgcctgggctagaagggaacctgttgccttgaagggagggacccagtcctggcaggatccatcctgtgctgactaaagggcccttgggccctgaataactagcagtgataaccacgtagtacgccatgggccttggctgagactcagacatgctggcttcaggtgagacccagcacattcccagctgtagtggctacagtgagagactctgcttgagaaaagcagatggaaaaataaaggggactttgtcttgtatcttaggtatcaccttggccatagtgggttcaaacaccgagtgggctcttggggtccctgattccaggccttggctcttggacagcatttctggacctgccctggaccagaggggagcttactgaagggtgagtcccaggcctggcagccttcaccacaagctgactgaagagcccttgtatcttgtgaacattgacagtagcctggcagtactccctatgggcctttggtggtggtggccacagggtgaggctcctctgcctgtggaaaggggagagagaagtgggaatgaccgtgtctcatgatttgagggccagctcagctgcagtataatagaacaccaggtagacttctaaggtttttgactgattcctagctcctggagataacttctggacttacatgaggacttgggggcacttgctgtcttgaagagaaggacagaagctgggctggctttgccacctgccgatggtagagccctaggtccttgaacaaacataggcggtagccaggtagtggttacggtgggccttgggtgagactcagtgctgtgctggcttcaggtctgacccagtgcagtgccagtgttgaccacagggtgcttgtgttgccctgctgcaagccccatgcagctcagcagaaagagacttcatttgtttgggagaaagtaagggaagagaacaagaatctctgcytggtaatccagagaattcttccagattttattcaagactaccaaggtggtacctctacaagtctgcaagaaccacagcattactgggcttggggtgccccctaaagcagatacagcttaaatcacaacacccaaatccattagagtatctggaaagccttcccaggaaggacaggtacagataagtccagacagtgaagactacaataaataacttcaatgtccagacactgaagaacatctacacccatctacatcatccaggaaaatatgacctctccagatgaactaaataaggcaccagggactaattctggagaaacagagttatgtgacctttcaaacagaaatcaaaacagctgtgttgagaaaactcagagaaattcaagataacacagagatggaattcagaatcctatcagataaatttaacagattgaaataattaaaaataattaaacagatattctggagttgaaaaatgcaattgacatactgaagaatgcatcataatggcttaaaagcagttgatcggccrggtgtggtggcttatgtctgtaatcccatcagtttgggaggctgaggagggtggatcatgaggtcaggagttcgagaccagcccggccaacatggtgaaaccctgcctctactaaagatacaaaaaattagccgggcaaggtggcacatccctgtaatctgagccacttaggaggctgaggcaggagaattgcttgaacctgggaggcagaggttgcagtgagacgagatcgtgccattgcactctagtctgggtgacagggcgagactccatctcaaaacaaaaaacggcagttgatcaagcagaagaaagagttagtgagcttgaagacaggctttttgaaaatacacaatcagagaagacaaaagaaaaaagaataaaaataagcacacctacgggatttagaaagtagccttgaaggggcaaatctaagagttattgtctgtaaagaggaggtagagaaagagataggggtaaaaagtttattcgaaggrataataacagagaacttctcaaacctagagaaagatattaatatccaagtacaagaaggttataggacactaagcaaatttcacccagagaggactaactcgagacatttaataataaaattcccaaagacaaggataaagcaaggatactaaaaggagcaagagaaaagaaacaacatacaatggagctccaatatggctggcagtagacttttcagtagaaaccttacaggccaagagagtggcatgacatgtttcaaatgccgaaggaaaaaaccttttaccttagaatactatatccaatgaaaatatccttcaaacatgaaagagaaataaagactttcccagacaaacaaaagccaagggatttcatcagctccagacctgtcctacaagaaatgctaaagagctggccaggtgcagtggctcacaccggtaatcctrgcactttgggaggctgaggtgggtggatcagctgaggtcaggagttgaagactagcctggctaacatgatgaaaccttgtctctactgaaaaacaaaaattagccaggcatgatagatagtccatgcctgtaatcccagctactcaggaggctgaggcaggagaatcacttgaacctgggaggtggaggttgcagtgagccaagatggtgccaccgcactccagcctgggtgacagagtgagactctgtcttaaaaaaagctaaagggtatgtacttcaataaaaaagaaaaagattaataagcaaaaagataccatctgaagatgtaaaactaactggcaatataagtacacagaaaatcatagaatattataacatgataactggtgtgtaaactagccttaattagagaaattaaaaggggccaataaaaaattataactataattttttcaagacataaggatagtaaaatataaatagaaacaacaaaaagctataaagtggggggacatagttaaagtgcagagttttattagttttctttttgcctatttatacaagcagtgttaattgttatctgcataaaacagtgggttataagatagtatttgcaagcctcatggtaacctcaaatcaaaaaacatggaacagatacacaaaaaattaagaaaccaagacattaagtcataacaccagaaaaaaatcacctttactaagaggaagacaggaaggaagagaagactacgaaacaaccagaaaacaaaaaacaaatggcaggagtaagtcgttacttatcagtaataatattgaatgtaagttgactaactctccaatcacaagacataaagaggctgcatggatagaaaaacaggacccagtgatctgttgcccacaagaaacacacttcacctataaagacacacacagacaaaaaaagggatggaaaaagatattctctagtagttatcagacaaaatagatttcaagacacaaactataagaagagacaatgaaggtcaccatataatgataaaggggtcaattcagcataggatataacaattgtaaatatatatgcacctaactattggagcactcatatataaagcaaatattagagccaaagaaacaggttggaaataaagaagamaattcaaataatatcaagcatcttctctgaccacaatggaataaaaccagaaatcaatattaggaattctggaaaccatacaaacacatggaaattacataatatgttcctgaatgaccagtgagtcaatgaagaaattaagaaattgaaaaatttattaataatggaaacatgacataccaaaatctatgaggatacagcaaaaatgatacaaagaggaaagtttatagctataagtgcctacatcaaaaagaagaaaaactttaaataaaaacctaatgatggattttaaagaaagggaaaagcaagagcaagccaaacaaaattagtggaaaaaaagaaataacaaagctcagagcagagataaatgaaattgaaatgaagaaacaggacaaaagatcaataaaacgttgggtttttgaaaagataaaacaaaacaaaacaaaacaaaaactgacacatcttttgccagactaagaaaaaagaagaccccaaaagatcagagatgaaaaaaggagatgctaaaaccgataccacaaaattcagaggattattagcggctactgtgagcaactgtatgccaataaattgcaaaatctagaagaaatggataaattcctatatacgtacaatcttccaggactgaaccatgaagaaacccagggtgtgaacagaccaataacaagtaataagataaaagttgtgatgaaaagtctcccagtaaaaagtccagaacctgaatggcttcactgctgaattctaccaaacatttaatgagggtctagtaccaatcctactcaaactagtctgaaaaataggaggagggaatactttaaaactcattctacgagggcagtattaccctgataccaaaaccaaacaaagacgcatcagaaaacgaaactgcaggcctatgtctaacgggggaaccagccccctgtatttcaacataggttctcttctattttccctaagtgtcggccagtctgagaaataaagggaaatagtacaaaagagagaaattttaaagctgagtgtctgggtgagacatcacatgtcagcaggttccgtgatgcccccgagccataaaaccagcaagtttttattagcaattttcaaaggggagggagtgtatgaatagggtgtgggtcacagagatcacatgcttcaagggcaacaaaatatcacaaggcaaatgggcagggcaaggtcaccaggccagggcaaaactagaattactaatgaggttactaggcaggaatttcctaatcctaataagcctgggggtgctgcaggagactagggtgtgtttcatccctatctacaactgcataaggcagacactcccagagcggccattttagaggcccccctccccggccgggaatgcattcttttcccagggctgttaattattaatattccttactggggaaagaactcagcaatatttctcttactcgtttttggcaataagagaaatatggctctgtcctgcgtggcttccaggcagtcagacctaatggttatctcccttgttccctgaacatcgctgttatcctgttcttttttcaaggtgcccagatttcatattgttcgaacacacatgctttgggaacaatttgtgcagttaacgcaatcatcacagggtcctgaggtgacatacatcctyagcttataaggatgatgggattaagagattaaagtaaagacaggcataggaaattataagagtattgattggggaagtgataaatgtccatgaaatgttcacaatttatgttcagagactgcagtaaagacaggcataagaaattataaaagtattaatttggagcactaacaaattgtccatgaaatcttcacaatttatgttcttctgccatggcttcagccggtccctccgttcagggtccctgacttcctgcaacatctctccctttctttttatataaatgtgccatggtgatgaaggcttgttctctcgattttgacgcaggattctttgactggtccagcacactaaagacaagccgattaaacagggaaacataattccgraatttactacagtggagcccccartagacttaatccaagttgtggggtttagtccagaaagattttctgccacctgatctaacgcctcagctccaggcacaatggataaatgagcttgagagacttcaaaaatttgtttatttaatttagtcatgtccaatgataaattatcttccctacccagaaggtgtcctttgaccatttcccatgaatgatcagtctcgttataggaatacagggtgatacggaaatctgaagtattccagtcgcactgcatttgcatgtgatgttcgagactcactacccgatctccaagccaaataacagactgtcttaaatcattaatttgattagccaatttttggtcaatgccttgttgagaattcaacatttggtggaattggcttgccagtcattaacaaaatgagctgtttgaatagactgatgtaacgccattccggcagtggtggccattgcagtgactgtaattaggcccatgatcacagcaattaaagtgaaaacaaatctcttagatctttaaagaattcgctgtaacacttcattaattaaatgtattgagggggaggattcccaaggtctgggcaaagttaccggaatccagatttcttctccagctcgaaccaacattatacttttcctggagtcaaaatgggagttaatacaagtgtataaatgacaatgcattggacagtttgattcttcgtccaaattttgatatttcccactaatggcatgtaaggaggcttaacacaactctttgtggaaacaggttggaggtaagtaaaacagaatgtctggatctacgttgatagtgagagagggggacggtagcagggacaacagacaaaatagtttccccttcccatacttgcagtccagacatggcaatagccaatttctaaagttgtgggtgttctggactcagaatggggaatatcatacgaggcctcagatgggggtaatgcctttatcttcccattttaaggaaaagaatgagctgaacctcctatgcaaagtagaatgatgattctcgttctcccaataagaaataaaataagtagcctccaggcattcccttccaccagaagagcacttgttttttaaatagccctttggtgcccagtctattactaaaccatatgagtcatttataaacattactgcatgtgagttaacacaatcttcccaaattaaggttttagatgggccctcaaaatttttagggcatggttttcctgcaggtttatattgaaagtatgggatatctcccattactccccctttcatttgtcttaaaggagaaagggagaggctggagaccaaatgtcctggtttctctgtagctgatctctctggaagataagcagcccagacttgagtttctagatggatacaaccaggtgcatgtccgaggcacagaggtgggtgtttgtaacccatggtaacattaaatgcagtgccgccttttcctgattgagcggggcaacggtcatctgtagctccaggcatccacacactatcattagtgtagatttctgcaggagcgtccatccaggtgagtggtcgaataagtggaggaaaaggcacataagcccaataagaataattttgtgtagccggtaaatcagtgtgaaaggaaactggtgagacagaaagtrtaaggaggggaatcattaaataaaacctagtgtaagcgagattcagtgccgaaagaggaagagaagaacagagggatgttattttcaggctaatataaatggtgagatttttaggtttgtaaggagaaaaagaaaggtaattaggagaagtgggattggttagatgggtctgtgttgccatcagggaggattgaatgagacccattgtgatttggtgggccagcttctaaggagttggcacagatctcaccacatctgagggyggtttttgacgcggacgtcttttccctgtggttttcctttgatgatctcctggtgacacacaagcatattctctttcccacgttaactagaatcagagacaatatttaaaggttttggggaaatcctataaggcagtaattacagcaatttaactctgccttttgagcagaggtataaggggtagaaataagcttgtttgtaggacctacataaccagcatttccattactggagccatcagtgaacactgtaacagcctcaggaatgggctgatctttggtcaatcgagggaccacccaagaagtcatttttataaaatcaaacaatttgttttttggataatgaatgtcaataatgccaataaaatcagtcaagtgaatttgccacagtatggaatgttgaaaggtgacttgaacttcgagccgatttaaaggaactacaattaaattcggatcaaatccggaaattttaagtattctacaccgagtctgtccaattaagatggccagttggtccagataaacagacaaagtttttgacacagaatgaggaagaaaacaccactccgctaaatcattatgttgaactattagcccagtaggggagtgcaatgaggcgaaaaccagaagctgaaaaggctgaaacggctgtactctagataactggrtggtctgaattctttacgaattccagttctagtgaagcctcaggggtcaaagtcctgggactgcggagattggaatctccccgcagcatagaaaacaagttagtgcataggtcggaatgcctaaagtaggtgttaaataattaatgttacccaaaagtttttggaagtcatttaaagttttcaaataatctctcctaatttgaactttttgaggttgaatatgtttatcgaccatgattcctaaatattgaacaggagtggtctgttgaattttgtcctgagcgatgtgtaatccagcctctaacacagcagctcaaaatttgataacagtcaattctttatcagtgggggcagcaattaaaatatcaatataatgaagaatataggcctggggaaactgggctcgaactggtgaaagcacttgcccaacataaagctggcagattgtagggctatttagcattccctgaggaagtactttccattgataatgagctgcaggctcttgattattgatagatggtacaataaaagcaaatttttcacaatctgatttatgtaaagcaatataaaaaaatcaataactatgagaggccaatttttaggtattaaagcaggggcaggcatgccgagttggaaggctcctataggtttaattacagcattaatggcccttaaattggttaccatccaccacttgcctgatttcttttttactagaaacacaggagaattccagcgggaaagaaggttccaaatttctaagttgtaactgttcagaaactaattgagttaaagcctccagtttttctttagagagcagccactgctgaatccaaatgggtgtgtcagatttccattgtaaaggaataggatcaggaggcgtggcagtggcygccattaaaaaggataacctaaaccagccctgtcttcttttatagtaattgggaggggtttagtaatcccttcatgttttggacggagacggagtccaggaacataccgcatgttttccatcatatgctgactgggagtactataagagttaggtggaatgttaatttaagccccagtatctactaaaccctcaaacttttttccttgaatgtgtatggaggtaggctgttgttcagaaattacattaatccaataagcggccttttcgctgctggagccccttccagggccacgtgtcttatctcctttgtttaaaacaatattaagtagtaaaagcaattgagcaattgagtcaccggccsgaatggaaacaggaagcttggcagacacgattagtttaatctcgtcaactgaatcagaattaatgagaccagtatgaatggtgattcctttagcagaggtggatgccctacctaacaccaggctcaccaaaccttgaggtaaagggccagtgacccctgtggggacaattaaaggcaaagagttaggtagtaaatttagaggaatagtgcyacagagatcgaccgccccaacccctaacgtggaggtggacaagcattgtactgagaagaagaggctgggacccatctgggttgactgtaggtaaatttgtttgtggtgggggctgcgttgggactgcctgaagtggaaatgcaatgttggtctgagtctgaagcatcccatttgatattggggcctgggactggtcccacttcccatttccctggttctgtggtagggggtttccatctgtatcatacttagagtggcaagtacttgcccaatgtttaccttgcgacgacgtgagcaaacagtagcagcagcatttggccatgtttgttgagccggcttggccgcttttaagtttttaacagtgcaatttttctgagtatgaccaagttgactgcaattatagcaggctccaagaaaagaattagtggggccagtttgattggtccttcatggcccgtgcccacagaatagctttgtgggtgtctgatccaatgccttcacaagctttaatatatgcagggaacacctcgtgatcaggtaaattttgtcattggatggaatgcatggccattttacactcatggttcacattttcaaaagctaacatatgaaaaagaataccttgagcatgctcatcagacagatttttcaatggcatcttgtaatttagctaaaaaatcagggtataattcatcatgaccttgtttaaccatagtaaaagaaacaggagcttggcctggggcgcataatttatcccaagctctcatacacacctttgttacttgttctgtggtaagagcatcaaagtttaattgggcataagtatcagagaaactatcggagcctgtgagctgagcctgagtaattagaatactattagtccgatttagctgagcctgcagatgggcctcttctgaccaccagatacgaaattgtaaatgctttaatggggttagaaaagcttttgccaaaaggtcccagtctaaaggaagcaaaatgacctcagtacaaaaagtttgtaataccatttaacataaggagaagtaggaccatactgagtacaagcatccttaaattcttttaaaaagctaagattaagaggtacataacgacacatttgtaccctttggaagataggaggttctagtgtgactgggtaagcccacgtgtctaatccacttgtttctttgttttggcataataagtgttgcattgaagtttcaagagtaggtatctgagacagagttggcatagaagtgataggaaaagcrtgtgtagataagggaaactgaggttgagggggtcggaccaggatgagagtgtgagaaaggggcattgagggagcagaaggagcagaggtatcctggtgattactggtgtgcatgtgtgaagaagggtacagagaggcaggctgagtggatggcaaagtgaccggttgaggaatggaaatgacaggagagtgaggggctgaagtggatggggtagggcctgaagaattataggtaaattgtagtttggtcctggagccattaggtgactccggaggtttgaagagagaagaattagygtatatggtccygggctgtctgagtcgtggccgcgggagcttataagtactggctcttcgtgaaaagaaacaaggtcagcagggggtaacgttaagccaaagtcaccagagttagacattgaattttcagcatcgttaggtgggggaggagtagctgaagggagaggctgatcagataacgaagtccatgcgggagaggaaagttggagaagaggtggagggtcctcacattcagaaaattgtgttaactgtagggggtcacgggattggtatgtcattaggacgacatgtaccaaggcccaatcaccccaaaaagtgacaggaacacatttccctgccgggaacagctcctggaatgttgcaccaacacgatcccatacttttacatatggttcccttttcaggaaaccaaggacagtatttttccaccgccttgaatagagtgaccatattttccatggttactcggacccttccctgttttaacaggtccacatctaaggttgcttttttaggaaaccaaggacagtattttcccactgccctgaatagagtgaccattttttccatgggcactcaaacccttttctgttttaaccagagtgtaatatagaagagataagcataatttttagactccgtgtgacccgtagttaacctggacaaattcacagactactcaccagttgtcagggagtcgaacaagcatttctgtggaccgaaccgatgacatttctccgcacctaccaaagggaatcgggttcccacgtgcacttaggaaaaaaagaaaaaccatgctgggcaccagatatcgggggaaccagttcccgatatttcaacgtgggttcttttctattttccctaagtgtcagccagtctgagaaataaagggaaagagtacaaaagagagaaattttagagctgggtatctgggggagacatcacatgtcagcaggttccatgatgccccctgagccgaaaatccagcaagtttttattagcaattttcaaagaagagggagtatacgaatagagtgtgggtcacagagatcacgtgcttcaagggcaacaaaatatcacaaggcaaatggacagggcaaggtcacaaggccagagcaaaactagaattactaatgaggttcccggtcccgctgtgcaggcactgtcattgataaacatcaggaaacagggtttgagagaagatagccggtctgactacaatttactaggcaggaatttcctaatcctaataagcctgggggtgctgcaggagactagggcgtgtttcatccctatctacaactgcgtaaggcagacactcccagagcggccattttagaggccccccttcccggccgagaatgcattcttttcccagggctgttaattattaatattccttactggggaaagaactcagcaatatttctcttactcgtttttggcaataagagaaatatggctctgtcctgcctggcttccaggcagtcagacctaatggttatctcccttgttccctgaacatcgctgttatcctgcctgttctttttttcaaggtacccagatttcatattgttcaaacatacatgctttacgaacagtctgtgcagttaacgcaatcatcacagggtcccgaggtgacatacatcctcattttacgaagatgatgggattaagagattaaaataaagacaggcataggaaatcataagattgttgattggggaagtgataaatgtccrtgaaatcttcacgatttatgttcagagattgcagtaaagacaggygtaagaaattataaaagtattaatttggagaactaacaaatgtccatgaaattttcacaatttatgttcttctgccatggcttcagccagtccctcggttcggggtccctgacttcccgcaacacatatctgtgactattgatgcaaaaaatcttcaataaaaatactagyaaaccaaattcaacaacaattaaaaatattattcatcatgaccaagtgggatttatttcaggaatgtagatagttcaacatgtgcaaaggtgatacatcatatcaagagaatgaaggagaaaaaacatatcaattgattcttaaaaagcatgtcataaaattaaacatcctttcataataaaaaccctcaaaactgggtatagaaggaacattcctcaaaacagtaaaagccatgtatgacagacccatagctgttatcacactgaatgaggaaaaactgaaagcccttcttctaagatctgaaacacagcaaggatgcccactttcactacagttattcaacrtagtattggaagtcctagccggagcagtcagacaggagaaagaaagaaagcatccaaattggaaaggaagragtcaaattatccttgtttgtagattatatgatcttatgtttggataaacctaaagaattcatcaaaaaatgattagaagtgatagattcagtaaagttgcaggatacaaaatcagcatacaaaaatcagtatcatttacatatgccaacactgaacaatgtgaaaaagaaatcaagaaagtaacaacagctagatttacaacagctagaaataaaatacctgggagttaaccaaaaaagtgaaaagtctctacagtgaaagctataaaatgttggttcaagaaattgaaggcaaacacacacacaaaggaaagatattctgtgttcatggattggaagaatcaatattgttaaaatgtccatactaaccaaagcaatctacagattcagtgtattccctatcaaaataccaattaaattcttcagagaaatagaaaaaacaatcttgaaatttatatagaaccacaaaagacttggaataamcaaagctatcctatgcaaaaaaaagaaaattggaagaaccgcatgatgtgatttcaaattatacaacgtattggcatataaccagacacatagaacagtggaaccaagtagagaacccagaaataaatccattcatctacagtgatctcattcttaacaaaggacaatcttggggaaaaggacagtctcttcaataaattgtgctgggaaaactagatatccatggatagaacaatgaaactggaccctatttcgccatatacaaaaataaaatggatgcaagacttaaatctaagacttcaaactatgaaacaacgaaaagaaagccttggggaaaatgtccaggtcattgaagtgagcaaggatttcttgaataaataccccacaagcacaggcaaccaaagcaaaaatgaacaaatggaatcacatcaagttacaaagcttctgcacagcaaaggaaacaacaaagtgaggagacatcccacagaatgggaggaaaatatttgcaaactacccatctgacaagggattaataacaagaatatatagggagctcaaacaaccttatagataaaaatccaatatgttgattaaaagatgggcaaaatatctgaatagatattactcaagagaaaacatgcaaatggcacatgggtgtatttatcatcagaggaatgcaaatcagaagtacaatgagctatctcaccccagttaaaatggcatttatccaaaagacaggcattaagaagtgcttgcgaagatgtggagaatagggaaccctcatacggttagtggtaatgtaaattagtacaatcaccgtggagagcagtttggaggtccctcgaaaaactgaaaayggagctgtatgatccagcattcccactcctaagaatatacaataaatgaaatcagtatattgaagagatatccatatttattgcagcagtattcacaatagcctcgatttggaacagctgaaatgtccatcaacagacgaatgagtaaagaaaatgtggtacatatacacaatagagaactattcagccatagaaaaggatgagatcttgtcatttgcaacagatggatggaagtggaggtcactatgtaagccaggcacagaatgagaaacttcacatgttctcccttatttgtgggagctaaaaatgaaaataattgaaactcgagtgatggttaccagaggcctggaaggataagtgtgggggaagggggcctggaggagaaggtagtggtggttaataggtacagaaaaatagaaagaatgaataagacctagtatttgcttgcctaacagggtgattagagtaaaaagtcatttttattgtacattttaaaataactaaaagtataatttgatagtaacacaaaggataaatacctactgtgtactcacaaaaattgaaaaagtttcaaaaatgttttttgctgttttatttgattaatgagaaagttaacatggtcaatcttaaatgtagaattgtctttatcacttagtacagtgtttctgtgttgtacagtgtttcttaccctttagataagtatgtgtattatcctttagataaagatacatgtttatctctcttaaatatgtgtaaacttttatacasaaacaaccatacacttaatgtgtgtggatataaatgacagaggcctttcaaagactcttaattttcccaaaatagcattttcatcacagaacttttgccaccaaacctctgatgtctccttattgcatagagaaccaactacaatttaactatactgtgtgtgtgtgtgtgtgtgtgtgtgtgtgtgtgtgtgtataatttgtcacttcttcccagtgtaaacatttcacttaggtcagtttccactatagtcagttccttagtcttatgattgattattcagtgttcattatcttttgttcatgttattgtaggctttctgtttaagcaccttgaggaagttgtttatctttgtgtatttttaaagcagcttgtttcttactgtttcagtgaatggtatatttggttatgtttcctttgctttgaaagtactgagacagatacatatttttagttttccagcaaactagagggaagttagaacagatgaactatttgtcatgggttcttgcctcatatctctgctccttattttttatttattgtttgtttgtttgagacggggtctcaccatgttgcccaggctggagtatagtggcgtgatcttggctcactgcaacctctgcctcctaggctcaagcaatcctctcacctcagccttctgagtaactggactacaggcatgcaccaccacgcccagctaatttttgtaatttttatagatacgaggtttcatcatgtcgttcaggctggccttgaactccaggactcaagtaatccgcctgctttggcctcccaaagtgctgagatttacaagcatgagccactgtgccagcctctgctccccatttcctactcttatttatctttttgccagattttctaacttggctttttgttttgttttgtttttttagacttgttaaacctcatattctttctgggcctttctattcttctctgttttgagagaacttagactaggtgatctctaaacatttcagtagtaaaacaatgcatgttctttagtgtccagtttcaatattgcttcatttataaagtcttacctgaccctgtagcctgtattatgttgtcttgctccacaaattatttcagtatttactttaaaatgtagacataggttaacttgtgttttgcttacatatatttgttttaattacttaatacagttgcaagctctttgaagaatgacacttcctttttaaagaatttaattactatttattttttaatcattatattactatgtagcagtcacatcatagtaataattacaatgacagtaacctctgaatactaactctgaggcagacattattttaaatgctttacttattatgtccattctcataattggtaacaggatgttgatgagataagatctcgtttcatctccatttcactgatgaggaaagacagatacataaaggttaagtaaatttcctcaccactagtgagtaaacatagatggacctaagcagggatacttcaaaacccatgcacttatctgttttgctataatgcataactactgtgtacttgctgaatgaatagagtgtttttaatctttaatatatgttgggtacaaccttggtattttttgtactttgaataaaatattaagggtgtttcacttttttaaaaatggggacaaataactatcttagtaaactaaatattgtgatcaattttcccaattaagagcaaatattcaaattgcctactttgaggtattttgaaaaattcttttgcttttgaaagaaaatttgtgacatgtataatacttggattttgatttgcggtgtcttaattagtatttcttactcattttcagttgagtggtgattttatgcaatggcttcaagccacagttcttcaccagtgcctcaaggaagcagcagtgatgttttctttaaaatagaggtagatccgtcaaaacacattcgacctgtgccatcactgccagatgtgtgtcccaaggaacccacaggtaatgctttttttttttgtaggatttttactgatgatttctattatctttaaatgagtagtcaggttttatataccaacgttagaagagtaaattttatgatgttaaaaatcatttgggggggccgggcacggtggctcacgcctgtaatcccagcactttgggaggctgaggtgggcggttcacgaggtcaggagatcgagatcatcctggctaacatggtgaaaccctgtctctactaaaactacaaaaaattagccgggtgtggtggcaggcgcctgtagtctcagctactctggaggctgaggcaggagaatgstgtgaactcaggaggtggagcatgcagtgagctgagatcgggccactgcactccagcctgggtgacagacagactccatctcaaaaaaaaaaaaaaaaaatcatttggggcccggcgtggtggctcacgcctgtaatcccagcactttgggaggccaaggcaggcagatcacttgaggtcaggagggagttcaacatcagcctggccaacatggtgaaaccccatctctaccaaaaatataaaaaattagctgggtgtggtggcgtgtgcctgtaatcccagctgcttgggaggctgaggcaggagaatcacttgaacctgggaggtggaggttgcagtgcactccagcctgggtgacagaacgagactgtttctcaaaaaaaaaaaaaaatcatttggaaatgattgggaaattgaaatttttttttaatgtatttcatgcattacttatataaactgaaaaagtgttgaaaatgaaggtacagattgaaagctgcttagttaaaacatggtacagtcagccctcatcatttgcatattgtgtatttgcaaattctcctgactccttaatatttattcataatccccaaatcactacttgcggcacatttgtggtaatttgcagtcatgtgcagagcagtgaaagatttgagatacctgacacatgcattcccagctgaagttgaacaagacaaagctctgcctttttgtttcagctctcatactataaactaatgttctttttgtggtctgtttttacttggtgccacatgtttggagctttttgttggtgattttgctgtttaaattgcccctaagcgcagtgctaaaatgctatctggagttcctaagtgcaagaaggctatgatgtcccttatggagaaaatacatgtgttgtgtaagcttcattcaggcataaattatagtactgttagccacaagttcggtgttagtgaatcaatgatgtatactgaataaggcgtctttaaacacacaaaacaaggttatgtattgatcagttgatgaaactattgtgaccaaaggctcgcaggaacctaactctttagtttccctacaagcagtggttcaatatttgctaattcaatattcacaataactttatagaacaaatacactactaataatgagaatagagtaaaattttccttcttgtatggttaatgccacagcaacatttatgtcacctaattataagccaaaggatattttatctaggagatcctgccatgatataatagaaaagaggcctacctctaaaaaacagtggggtattaaaggatagaaaatacataatagaaagcagcatagttctgatgttgaaaaaaaaaratagagtaattgtacattaaggaaaggagttcatgaaagactttctttactattcactccaccctgcaatcgtagttctcaaattttgcatatcttttatctcgtgcatatttttcaaagccttagtaattgatgctgccagctgaaggttattcaatcagattgatttttattaaatcatttactgtggaagattagttggtttgcgtaagatggaatctgtgcatttttagttttctagtgtgtactttcaaacatagaaccaattttacagcatttacagagttctcttgtttactttttgcaggtgattcacatagtttatatgttgccccatctctagttacagatcaacatagatggactgtatatcattccaaagtaaatctcccagcagcattaaaygatcctagattagcaaaaagagaatctgacttcttcacaaaaacatggggattggactttgtggacactgaagtcataccttcattctacctcccacagatcagcaaggaacattttacagtatatcaacaggaaatctctcaggtaatatctaatcttggctagttacagtcaggtcaaaagtaatagaaatatttttagtatgctttattatagatttttgaccagtaatgtttgatgaacctatagtattcttttcgttcatacaaattgtactgtcctgggttgcatttaattctttgcttaaatatattttaatacatttctcttacagtagtgatttttcagaattacacattccaaataatgctaagattcaacatgaaacctaccctgcttaccaaggagaaaatgattctgttaggcctataaagtccagatgatttgtgaggtttgagaaattggcagaatattactgtttctgtgtctgattcactgcatacaattctatagagcaccctagctctagcagatagttataatatctccagacataattataacttaatatattactttaaaccctgtctgagagcaagaactgagtatagtgcagagttttagatggtctatcaattcatcttcagattattagtaagtggctgttatcaatacaattaaaatcattaaagtggtacaggggatatttatatttttataaccattcctttttatacttttttcattagcaagcctaatttgaatttagctggttttattttacttactttgcacttttttgaatatggctgtattaacattaatactatatagcatctggttcatttttattcctatcaaatatttttatacagaacctatatattttatttgcctttgtgtgtatatattgccatattaacaatcacttagatctgatcattgaaaacaacacaaaaactgttttcaatgatcagatctaagtgattaagtagatgaacattaatatgcctttgtaacctataatttggtttttctatttgtatattgatcaaatatttattgagtgccttccatgtgtcaggtagtcttctaaacatgaggatacagcagagaacaaaactgacatccattccttcccttacaaagctatgtttttagcaaggggtttaacaataaaccctaaagcaaccactaaaatagcaaaacaaagaattacagctaataatggaagacagaaatggaattttaaaaattctcaatccaaacaaagccataaatagaaaaaaaagaatggataggacataaaataaatttcaagatgataatcttaaacctaatcatatcagtaattacaccaaatctaaatggtttaagcatcccaattaaaaggcagagattgtgagatctgatgacccaagtatatgctgtatataagaaacataccttgaatagaaagaaaaaagcatttgaaaggatgaaaaaatatataccatgcttaacagtagtcagaagaaagcagaaatggctgtattaataacaaagtagatttcagagcaaaaactattagtatgtataaataatgttattttataatgataaaagggtcagctaaccaagaagacattacagttttaagcatttttgcccctaatagcatgcttcaaaacatgtgaagcagaagctgagaattttatggcaaagtagctattcataattacggagatttcaatactctttcaataaataataggacaagcagaatatcagcaagattataatagacttgaaccattaaccaacctggcctgacttgaaagagcactccatataacatagaagaatatacttttttttcaagtgttcatgaaacatttatggacatagactatattctaggtttgaaaacaaattttaatacatttagaagactttacctcatacacagtatgctctctgaccacagtataattaaaatagaaattaataatggaaaggttggtggaaaatccacagatatttggaaaccagaactttatgcttctaaataaaatgtgagtcaaagaagaaagaaaaatcagaaagtagtttgaactgaatggaaatgaaaacacaacatatcaggatttgtggggtgatgctcagttagcacttagggagaaatttgtagcactgaatgcatatattattgaaagaagaatgatttcaaatcagtgacctcagcttccacctkaagaagctggaaaaatggctgggtgcagtggctcatgcctgtaatcccagcactttgggaggccaaggtgggtggatcacctgaggtcaggagttcaagaccagcctggccagcatggtgaaaccctgtctctataaaaatacaaaaaaattagccaggcatgatggcaggtgcctgtaatcccagctactcaggaggctgaagtgggagaatagcttgaaactgggtggttgaggttgcagtgagccgagatcgcaccattgcactctagcctgggtgacagagcgagactcygtctccaaaaaaaaaaaaaaacaaacagaaaaaagaaagaataaacatcaaagtcaaaattagagaaacaacagagaaaattagtgaaacaaaaagctgattctttgagaagataaactcgataagcctttggcatactgattaggaaaaaaagagaagataaaagtcaccaataacaagaataagaaaggtgatatcactacagattctacagagattaaaagcctaataatgaaattttatgaataactttgtgccagtaaattcaacaacttagatgaatttacagatttcttgaatgacacaaaataccaaatctctttcgagaaaaaatagataatctggctgggcatggtggctcacgcttgtaatccccacactttgggaggccatggtgggcagatcacctgaggtcaagagttcgagaccagcctggccaacatggtgaaactccgtctctactaaaaatacaaaaattagcygggtgtggtggtgcgcgcctgtagtcccagctactcaggaggctgaggcagaaggatcccatgaacctgggaggtggaggtttcagtgagctgagatcatgccattccactccagcctgggtgacagcaagactccatctcaaaaaacaaaacaaaaagaaatagaaaaatctgaaatagctttatatttattacactgatgtatagttaaatacctttccacaaagaaagctcagatccacatggcttcactggtgaattctaccaaacatttacagaaaaagtaattccaaatctacacacattctttcaaattttggtaaagatgtagaagacaggtctggttctaggataaggtgaggcaggtgagcaaaatttgagaggcactgaaatctgagagtgggtacctccttaaatattgtaccgtatgcttcttgcttgcttcatcctactgccagccttcatggagtaactggaactctcatataccgctggtgggaatttaaagtgctacaacccctttggaaaaaagtttggcagtttcttaaaaagctaaacatacttctgatctgtcatgtaaggagcttggaagttgtcacttccgttctcacaacaaaaaaccttagcaaactgaaaatcaacaactgagaagcacctgtgaaggtcgcagcccaggggcacaggctcactaagactgaaacctaatcataagatcatagaatgcttcccctcccttcacgcattaccaccacatcagtggggtgcttgaataatgagaatacaacggaaaggactacatgtctcagaccttatttaagaggtctgcagggaaacctgaagatagtaggagaggtgaaaaacaaggacacaagtggaaattttagcctctgacacctgcagctatagcaatcagtaaataaagcctaactcttagccagataaacaaaacttcatactaaaggcctatttacctcagttctttttaactttggtatatcatatctggctttcagcaaaacattacagtgcataccagacagaaaacactgtttaaacagacagatcaagtatcagmatcagactcagatgcggttgtgatgttggaatgatcaaactgggaactcaaagtaactatgtttaatatactaagggctgtagtggaaaacatggacaacatgcaagaacagatgtaagcagagagatggaaactaagaatcaaaaggaaatgctacaaatcaaagatagtataacagaaatgaagaatgcttttgatgagttcattaatagacttgaagtggcaggggaagaaatcagtgagcttaaagaaatgctgatacaaacttataaaaatgtgtgggatgcaagggaagtaaggcttcaaggaagtcttgcttaaataagcactgaaggcttcatttaatgcttaagaagaaaatttaaaattaataatccaagcttctaccttaggaagttatcaaaagaagagcaaatttaatccaaattaagcagaagaaaagcagtaataaaaattagagcagaaatcagggaaattgacaatagcaaatcagtagagaaaatcaacaaaagcaaaagctggttctttgtgatcaataaaactgataaacatttagctagattaagaaaaaagagaaggctgggcatggtggctcatgcctgtaatcccagcactttgggaggctgaggtaggtggatcacctgaggccaggagttcgagaccagcctggccaacatgatgaaaccccatctctactaaaagtacaaaaattagctgggtatggtggtaggcacctgtcatcccagctacttgggaggctgaggcaagagaatcacgtgaacctgggaggcggaggttgcagtgagctgagatcgtgccattgcactccagcctgggtgacagagcaagactctgtctcaaaaaaaaaaaaaaaaaaaaagagaagatataagctactagtatcaaaaatgaaagaggggctgtttctactgatcctgcagacattaaaaggataataagagaatattgtgaacagttctatgcccagaaatttgatagcctaggtgaaatggaccaatttattttgaaagacacaatttaccaaagcttacacaacaagaaataaatattctgaataggcctatatttattaaagaaattgaatcaatcatactgctcaaagcagaaatcaccaggcccagatgggttccttggtgaattctaccaaacatttcagtaggaaattataccaattatttataatctatttcaggaaatagaagctaaggacatacttactaatgcatttggtgaggctgtcatgaagctaatactaaaatcagacaaaagcattataaggaaagaaaactttagacctcttgtgtgtttttttgttttttkttttttttttttttgagacaaggtcacgctctgttgcccaggctggagtgcggtggcaggatcacagctcactgcagcctcaacctcccggctcgagcaatcctcccatctcagcaacccccaagtagctgggactgcaggcgagcaccaccacaacaccacgcctggctaatttttgcatattttgtagtgacggggttttgccatgttgtccaggctggtctcaaactcctcaattcaagcagtctgcccgtgttggctattcattatttttaaaaaaagaactcttagcaaactaggaacaggaagaaatttccttaacttgataaagaatgtaccgggcgtgtcggctcacgcctgtaatcccagcacttcggcaggatgcttgaggccaggacttgagaccagcctggccaacgtggtgaaactcatctctactaaaaacacaaaatttagctgggcatggtggcgcatgcctgtaatcccagctatgtaattgccaatgggttcaccttgcctgctgctggctaggcagctgatttattgagacaggggaatttcaatagagaatgaataatccacacagagctggctgtgtgggagactagagttttgttattactcaaatcagtctccccgagcattcgaggatcagagtttttaaggacaacttggtgggtaaggggaatccagtgagccggcagtgctgattggtcaggtcagcgatgatatcatagggagaagccatctccatgtgctgagtcagttcctgggtggggccaacaagatcaaatgaggcagtttattgatctgggtggtaccagctgatccgtcaagtacagggtctgcaaaatatctcaagcatggatcttaggagcagtttagggggagggtcagaatcttgtagtctccagttgcatgactcgactcctaaaccgtaatttctaatcttgtggctaatttgttagtccaacaaaggtagtctagcccccaggcaagaaggtggtttgttttgggaaaggactgttatcatctttgttttaaactataagctaagttcctcccaaagttagttcaccctatgcccaagaatggacaagaacagcttggaggttagaagcaagatggagttggttaggtcagatctctttcactgtctcagttataattttgcaatggggatttcagctacttgggaggctgaggcatgagaatcacttggacccaggaggtggaggttgcagtgaaccaagatcacgccactgcactacagattgggtgacagagtgagactctgtctcaaaaaagaaaaaaaaaatctacaaaaactctgtagctaatggggaaactagatgcttcccactaagaacaggatcaaggtaaggatgtcccctgtcactgtttcttttaacattgtcttggaagtcctaactaatgtaataagaaaaggaaataaaatatataaaaattaggaagaagtaaaactgtttccagatgaaatgatcgtctatgtggaaaatcccaaagaatccaaaaagaaactcctggaactaataagtgactatagtaagcttgcaagatacaaggttaatatataaaagttaattactttcttatataccagcaatgaacaattggaatttgaaattaaaaacccaatgccatttacattagcatcaaagaaaatgaaggctttatgtataaatctaaatagatataagatctatctgaggaaaaccacaagactgatgaaagaaattaaatatctaaataaatggagagatatttcatatatgtggataggaaggctcaatattgtcaaggtgtctctttttcccaacttgatcaatagagtcaacataatcctgattaaaatcctagcagttggtttcttggatattgaaaactgactctaaagcttatatagaaaaagacccagaatagctaacacagtattaaaagaggaacaaagctggaggactgataccactcagtttgaagttttgctataaagctacagtaatcaagacaatgtcatattggtgaaagaacagacatatgggtcagtggaacagagaacccagaaatagacccacacaaatacaatcaactgatttttaacaaaggggcaaaggtaattcagtagagaaaggatagttgtttgaacaaatggtactgaaacaactatacatccacataccaaagagaaagaatatagacataccaccttgcactattcatggaaattagctcaaagttgatgatagaccttaatgtaaaatgcaaaactataaaacttctagatgataacataggagaaaatctaggtaaccttgggtttggtaatggctttttagatatgaaagaaaagcacaatccatgaaagaaaaaattgaaaagttgaacttcattaaaattaaaaagttctactctgtgaaagacacctttaagagaatgaaaaaacaagccaaagactgggagaaaatacttagaaaacacatatctgatacaggattggtggtcaggtgtggtggcttacaccttgtaatcccagcactttgggaggtggaggtggaagaatcacttgagaccaagagttcaggaccagcctgggcaacatagtgagaacccatctgtacaagaaaaaattagaaaaattagtcaggcatggtggtgtggacctgtagtcctagctgctctggaggctgaggcagaaagattgcttgagccctgaaatttgaagttacagccagcaacttcagcctgggcaacagaactagacccagtctcaaaaaacaaaaagggactggtaccaaaaataaacaaaggagttaaaactcaacaacaacaaaacaaacagccaaattaaaaaatgagtaaaggactttgaatagaccttttcccaaaaaaagatatagaagtgtgcaattagcacatggaaagatggtcaacatagcaaataattttacgtgataaattttatgttatatgtatttttccttaaaaaatatgagcaaaagatctaaatacctcaccaaagaagataatgcagatggcaaataagcatataaaaagatgctaaatatcaaatgtcattagggaattcataattaaaatgagatgccactacatatctattagaatagcaaaaatctaaaacactgacaacaccaaatgttgacaaggatgtagaacaacaggaactcttatttattgctggtgggaatgaaaagtggtatggccactttggaaaacagtcctgtagtaactgatagaattgctaccagaactctgaacactgctggcctgctgcttttcttgttaccacacttcactttctcaggtatcctttcggtgatatctctgaaaagataatgacattgttagtggtcatctaattctaaatcagagtgagattttttttttttttactcagaacgtgtcaataactaatttctatctttctttcctttttttctttttttttgtgatagagtctcactctgccacccaggctggagtgcaatggcaygatctcggttcactgcagcctctgcctcctgggtttaagtgattcttgtgcctcagcctccccaatagctgggatttcaggtgtgcgccactactcctggctaatttttggtagagacgaggtttcaccatgttggccaggctagtattgaactcttgacttcaggtgatcggcccgccttggcctctgaaagtgctgagattacaggtgtgagctaccgcacctggcctaatttgtttctatcttagatatataggtttttgaattttctttcttgattcaaattattctcctaattcatacataaatattttccatttgctttctcactttattctacatatggagattttactataattatatgagatggaatggatgtaggtatatagatgtgcatagatctcatagaggtatttggtttattaaccgcttgttacttgtatttaagttcaggaggctagtgatttcatattaaaagtcgtaggactaatttggcatattctgatattctgttgcaaaacactttcatgctttgaatactcatgtttacacatacattgatgatgttatttgtctttttattagagagagaagattcatgagagatgcaagaatatttgtcctcctaaagataccttcgaaaggactcttttacatactcatggtatgaatatgtgttatttatagataataaagcatagcataaatattagtgaacaaaatctttattttgggaccttattgcctgttatatctataatttttatttctagtaaaatttttataacctatgattataatattttctaagaacttctaagagaaaaagtagatctgatagtagtataatcctttagttcaacaaatattgattggatatcttcgtggttggtatgttccttgttgcttaaaaatagatgagtaagctagacatgatggcacatgtgtgtagtcccaactacttgggaggctgaggtgggaggattgcttgagcctatgagtttgagaacagtaacgtagtgataccctaaagtaaatctatagataagtaaaaagtagctttggtcctcaaagaactgatgttgtcctgaataagtttaaagaaagaaaccaataattgtatcactgtatattaaagagtaagttcagtgtggtaatgttttataacatgcgtaacttagctttagaagcattcctagagttgacagtgattacatgtgttttaaagtcgttagtttgaaacatttatgtgggagaagacattccaagaaaagggaatagtttatacaaagccatagaataaagagagaacagaatattcaaggaactgtaagagtttaatatattggttctactgggagcaagagatgagactgaagcataggcagtggtcagatcatgaagaaccttatatgctgtggtaaggaattttaccttttctgaagacactataaagctacataatatttttaactaggcatgatcagatttatgattatacatttatgtgaaaatagttgtggatagtgaattatgggatgatgattagactagaggcaaggagacagttggaggctactgcagtaatacaaatgagaaatgatattccagtaacagttacagtggagatggagagggaattaggcctttgagaagtaactcagagattgagacacaggttttggtggccagttattggtaatggagcaaaatgattcaaggacaattcccaggtttcttgcttggacaactgggtgggtgacagtgcaattcagtgagagaggcaatataggaggaggaattttgagggagatggaggcaagtttagttgcagatttgcagtgaagaacatgcctttttggcaacctggagctcaggttgaagatttaggctgaagatgtaggtatggtagacatcatcatagacaggtatgctggacaatagcatggtagttgaatccaaggacgttgggtgagattgcccagggaagatgtgaacagtgagaagaaaacgactggtgatggagcactaattaagctgtctcatttaaggggcagacagaagatgagatacctgtgaaggagacaaaaagtggtcagagagataggaaagtcaaccaagagagaattgcaccttaaaagttaaagctagtgaggatttcagaaagtaagaacagttagttggtctgtaatgtcagaatagttcgggatagatcaatttgtacactgagaagtctcctttattttggcaatcaggagatcttagagcatttatggcagttccagaaacctcaatactatatattaaggagtgagtacaagagaaagaaatgtagactaccagtattatgtcactagaagatttgagatagattattgactacagggaacagagtggaagaatattttttcatggccaggactagatcgggtaagaggcatttgactatccctgagagtgagtgcttttgcatctgaggtcctgcccttccctcaacctggtcctggcctgggttttatctatatctatatatatctatatatatctatatatatctatatatatctatatatatctatatatatctatatatatattagaatrtgtgtgtgtgtgtgtgtgtgtrtrtrkatttttttttaatgggaaagaactgagcatgtttatatacaaagataagagagctagtacaagggaagaggctgaagatactgagatggagtaaactgattaaccaagctcacagcagaggcaggagggaatggagtctaagtgcagaaagattggttttgaagaggagagtagtaccttatctgagttgggattggcaggatgaaagtaaagtaggttcatttgaagataagtgtgtatctcagccttaagatgtctgagaagaaaattaatgtagtataaaaaagcaacctttgatcataagaaattctggatgggatgatagatcttttaaacaataaaaacaatattcctactttagaatttaattcattttttaaaattacatagcatgccatattcagtcttaccaaaacttraaaagatagcacagcagtcctcaatctttttggcaccagggactggtttcatggaaaacaatttttccatagaccaaggggtttgcggggagatagttttgggatgaacctttattatgcactttatttctactgttattacattgtaraatataatgaaataattatacaattcatcataatggagagtcagtgggagccctgagcttattttccgggaactagatggtcccatctgggggagatgggagacagtgacagatcatcaggcattagattcttataaggagggcacaacctagatctctgacatgtgcagttcacattagggtttgtgctcctatgagaacctagtgccaccactgatctgacagaaggtggagctcagacggtaatgtgattgatggggactggctgtaaatacagatgaagctttgcttgtgcccactgctcacctcctgctgtgcaacctggttcctaacaggccatggcccaggggttggggaccactgagatagcataaagccttttatgtctgattaaaaagatttgagatgtattttgctgttttattgctgctatataattgattacaattacctgaaacattgttttgttcagcgctttgcctactactaggcatgtaataggtgcttgatagataatttgttgaaggaataaactttagttatttggatgtgacccagtacaatactgaatctgtcaaaatgtattttacggagttaaaatgaaaacaagttttaaaaataatatttcccttcttttttaaatagataaatccaggacagatctggagcaagtacctaaggtaacaaagcttaaacatgagaaaattgccttataatatttgatctttaattttgccttacaagcagatttcatttggcttttttttttttttgaccctttggctactttgtctcttgtggggctgtgttgcatcacttttcttctttctttctcacttttctttttttctttccttccttctgtcttttctgtctttctttctttttctttctgcttttctgttctttctcttaacttagacagaatcttgccccgtctcgcaggctggagtgtagtggtgcaatctcagttcactgtaacctccgtctcctgggttccagtgattctcctgcctcagcatcctgagtagctgggattacaggcgcatgccaccatgcccagctactttttttgttttgtatttttagtagagatggggtttcaccgtgttggccgggctggtcttgaactcttgatttcaagtgatccgtccacctcagcctcccaatgtgctgggattacaggtgtgagccaccatgcctggcctttttctttttttttttttaaacgaaaaaatgtttttaattgacaaataaaaatgatgtatatttatggtgttttttctcttttgcatcatcagtctctttctcatcactgaaacctacaaatattttaaaatctttccattaaaaaaattttgctgatcattcaacctcttcaaattattaagagatacttactttgtatgaaaaattttgtcgagatgtataatccatttttttctgggaagagagtcagttaccttcatcagattctcaaataggtctgtgacagttgttctttagggtaagaaagagatgaaagacacaaaaaaggtagaaggatatcatttatatcatttatttgatcctacaaaataaaactcaaagtttgtcatttaaggctcaatgttcacttcatgtaatctttacacattctttacttcagccaaacttttttttgatggctctgtgctttacttacactgtttcttgatcctggaagacttttccctcatcttcccatatctaattctctgtaatcttttgcttaaaatggcagctttacatgggtactttcttgttctttccaacagaagataattggcccttttgccaaattcccataacattttatctgggactcttccctcatccctctgctacccctttaaggatttgtccctcttctccttataagatttttttttttttttttgaggcagagtctctctctgtcgcccaggctggagtgcagtggcacaatcttggctcactgcaacctccgcctcccaggttcaagcaattctgttacctcagcctcctgagtagctgggattacaggcgcctgctaccaggcctggctaattttagtatttttagaagagacggggttttgccacgttggccaggctaggctggtctcaaacttctgacttcaagtgatccgcccacctggcctccgaaagtgctgggattacaagcatgaaccactgggcccagtctccttataatattttatcacatcccttggattgaagcttcatgagattggggtctctttaataaattatctttgtttctccctcagtgcctagcatcagaagtagtcagtaaatatttattgaattaatcaatacttttagttataataccaaagcagggattagaaaatttactcatgtctctagttagatttttttcctaccatattcattctaatttttgtatataggtaaaataaatcagtaaataaaatatagcatataaataaatacataaattgattaaaccatgttttaggccctatgctaggtgttagagrtacaaaaataagctataaatttaaccctgcaagaacatatggtctccagagggagatatgcatactaaataaataatttctataaagtatgaggtaaataattaagtatgcatgatatatttgtgttcagagatgggagtcattatgtcatgcacaasgacacatttgcccttttgattgggtcatgttcttcaggaagatgtacaagaaaaggcgttctaggccagaagtatgtatgtaaagatatgcatactttatgtattaatacactcattgtaaaaagaataagagtatggaagagaattgaatattgctagagtgtaatgggtaaatagtgggagtgacaagatacaaagaggtaagtgggtccagaaaaacaatgaagggttttggatgccattctaaatagtttggtctgtgggtcatgggaatctattgagagttttaaacagggaagttaatacagttatacttgacattgtagaggagtatctctaacagtagtataggggatagattagggaaggatatcagtaaatagctattgaagagctgaactactraatgctgtggagatacaggaaagcagagattcaaggtatatttacaaaatataacgggtaggccttattgcttagctggtcgtgatatgtaagggaagagtagtctattcataaaattgaatttgttttggttttaatatttattgtatgcttaatctaaactaattttaaaacaattttgagcaggagaaaatagaaatataggttagagaaattgatatttggcattttaaaaaactatcagtgggaaataatgtggaaattttaggatgagtattatatctgcctctggtatgtacctgtaggactgcatgagtgagtatgatcatgtagtaatagaatgaccatctccattggtaaaggcaaaaaacattttgtatcttttatgagtattttaagcttggtgagaaatttacacatttttcttatagatatttgtgtaaagaactcaactgttatcacttgcttttgctattcatactcaagatccacgttaattttgtttaatgatcatgatgttagaagagataatgggtataaagaaaatacttatctaattgagkgaaatgcatttttttaatagatttttatgaaaccagattttgccttggatgattccttaacttttaattcagttttaccatggtctcattttaatactgctggtggaaaaggaaatcgtgatgcagcttcctcaaagttgcttcaagaaaaggtaatttctttttgactttttccatgtaggaaactattctagttaagcggtactgtttgcttgggttcagatttagttatttagtaagctgtacttttaaattcatttttgttcttactgataactataagcctcccaatcttaactgataaactaacagcattttggttcaatggaacacaagttgtgcagatgaacaaggaaaaacttactatttgagtgcttcttacctgaaagagcagttgatggaattttaattgaaaggctatattagctaacacaataaattgctttgcatttgtcccagatattttatttacatactggctaattttatttatttttatttttatttttttgagacggagtctcgctctgttgcccaggctggagtgcagtggcacgatctccactcactgcaacctccacctcctgggttcaagcaattctccttcctcatcctcccaagtagctgggactacaggtgcgtgccaccatgcttggctaattttttgtatttttggtagagatggggtttcaccatgttggccaggctggtctcgaactcctgacctcatgatccgcccaccttggcctcccaaagtgctgagattacggatgtgagccaccatgcccagccccacattggctaattttataagaatgatttaaagcacagaaaaccaatattttccgaggtactgtttttcattttcacctagggatgattattttgaaacaaaaatatcttaaagaatacaatattcctattgtttttgtagctttgcaaagcctagtcttttacatgttactagtcagcagttctttacgttttacaatgtcatagtccagaagtcagcaccttgaaagtcatttaatatttagatctttaaatataatttacttatcaagagtcttctaaagacatttgatctctgttctttcttagcattcagtttagagctcgtctaaaactgaaggtagttcttaaaatgagaagtagtgattttgttttactttagtgatatcccctggcaatctgaaagcttgtctcaggaagacatcaataatatcaggttcagtcctcatcaggaactgaagaaaagactagcttggggaggagagaagaagaaatgtggggaaggaatcatgagtattccttttctcacaattgaaaacgaaaatgagctttttcctttggcaacattgtcacctataaaaaggtttttccatgcataagaacaaattgataaatctgacgaaaaccatgggtttagagacacaggcttgctcatgacacaggctttcatattctaagtatatgccctgagagaataataccttaaaaagagaaaaacagcaaaagccagtaaaagtctcatcaatgtatacaggtacttttaatacagataatttaaaaattatttcctttatagcattttaataggaagtaaactataaaaatgttatgccttgaaaagagtaaatcaatggattattgaaaattcaaaaaatctttgagactcaaatgcttttcttatgctgaatgtttaaagtgactaaaataatggaaattttttttatttgtaaattgcagaatcagatttgctatatttacattctgactccttttcgttctgctctgttcttagaataggaatagaagacaggattccaagagagcactttgaaactccttttatgatggacaacagctggtttatcatgttcgcttttaagagcaaggatgctataactagaattaaagaaatttgtattctattgtactgtgcaaagtgctggtctgcagtaaaataaggagtttgcactggaatgcaaatcactgcactgcttacttcattaagaaagtctgaaaaaaatacagtgtgcttaatgatgtagttgatttactttctagcaaaattctttattttattatggccctgttaaacagtccacagattggcagcagcatataaatcacattctgggtagcactgtcctaaagttatctattctccatttactattctgggaattgagtccatgttaccttgcaatttaccctagtatatttgtgcccattttgcttttttagtgaataaatgaacagccatattgaagatgaaagagcaaaagggcataaactcaagatttaaactgtggaaaaatttcttgtttgtaacctatttagatattgtaagattattgaaggagcattattgaagatatgaatratactctgtgtttccttagggaaacagatttgatgaccaaatagtctcttctaatcttatgagacctaaatgttgaaagttcattaaccctttgaaactatgaattatcccaagacattcagagataatgcccgaagtctgagctgtgggttaaaaaatctcaaagtaaaaaaatgggtgaataatggaaagataatatagccaaaaaaggcatatgcagttagaaaggaagaaaaggcaaaacaagttttagaagtccatatttgaaatttagaaagcattttaaatatatattaccataagaattaatcttggtaatgctactaaaaaaatatatatgagctaattgtttaaggtatttgtcgaacttttaagaggaaaattcattggaaataaactgaattttacaaattgataaaagaatcacttttgaaatgtaaaataagcagcctgaaaaaaatccaaatgaattttagtaccttatctataatttgtgactgaaccatcagtctatcttggattattcagcattttgaggcagaatggtataatagaaacagcttcagtttttcagtcagagatataccaacattttagttttgctacttagtaactacatgactgtgtttcctcatctgtaaaatgataataatactacctatatttcaagattgttaaaattagaaaaattagatgtgtataaaatacctgtgcctaatccataggaggaggtcaataaatggaaggtgtaatcatctatttagtcagataaatgatgtgcaatgatattgggggctaaggagatcattctctttctctcagatcttagaacatctgaaactggaattgtaatttgagatgtctgtggggtactcttttagaaagcagttggtgtttggaaggtgataatgacaggaacagaggaggaaagtaaatgaccttgtactcttttgtcttacatttatatctttggggtgtaccctttatcttccttccattttgttgtgcccaatttcaaggatctcacaatcaaacaattcacacaatggaatttaaagtatatgtagaaatcttttatcattgtcataaagtatttggataatcaaggaaggtatgctcatagtacttcatattttttttccttctcttttaagctgagccattayctggatattgtggaagtaaacattgctcaccagatctctctacgttcagaagcattttttcatgcaatgacctctcaacacgagttgcaggactacctcaggaaaacttcccaggctgtaaaaatgcttcgagataaaattgcacagattgataaagtaatgtgtgaaggatcactccacattttaagactggcacttaccagaaataattgtgttaaagtatacaataagctgaagttaatggccactgtacaccagactcagcctacagtacaggtgttattatctacttctgaatttgttggagcattggacttaatagcaacaacacaagaggttctacagcaggaacttcagggcattcacagtttccggtatgttcattaagtaagccactagaaataatgttagaaatttttaaaggataaaattgagcatgtaatgttaaaagtgtgaatatattcaaagttaaatggatattttttcttccagattgatcatttgtttaataatgttattctgatattgtagtattagcaaaacaaaaaccataaggaataatattttcagagacatttggatggagaagcaaaattaaaatttctaggagatgagataaatgcaaggccagtcacaacattaacattttgaaagtgttgaaatagctttgtgtcacaatggtaggtcaaggtggagagaataccagcatatttaaaattaagtttgtgttgaaagcctttaatagatttaaaattgaataattattaaaattcatttctgatttgcagtctgtttatcaaattgcaaaagaaatccacatggtgatagaaaagacccaatttctcctgttattattttgaaaataccttaggttttaaatattttatatgaaatcattccaaagtgtttattttrtagactaattgcaagccatcaaaatttcgttccattaagcaggcttgcagtatccttgtagaagttcatatctgctgggaaaaccatccaaaccacgtactagtaagtgactataaagttttatggaagatgtgctctgtaacttaatccattatggaaaagttagcttcaaaatacatttattttaattgaattataaatcttattgactgaagatatgtaattggaatgtttaggatatatttttaaagctgaaaccaaatttaattagatgaacaattgattgattcattcagttaaggtatggctgttgagcacctattacatgtcaagtaccagacagaatgaatactgggaatatagtcatgaatgaagtagagatgttcagtgctctaaaagtctctacaatttatttggcatggggaaggaagcagacaaattactgcatagttatgatatagtgtaatatagtatgatgaatggaaagattgctgtggagctctgaccttaggggtggaacctaatccagacttggatggttaagaaaacgttctgagtcacaaacttctttgagaatccattgaaaggtactgttggaccatctttccacaaaaatatacctgtacataaaattttgcaatcaattttgggtgattcatgtttttttgaagtctactttgaattccccagcatggaacccagggcaactaaattatttttaatttttccttcacctttgaaattataaggatttatctttgaatttgtatgtcgtatgtattttttcaataaatgtcaattttgtcattgccttagagaaatggatttctataatgacagaagctgtgtttttaacttatcacttactgtataatatcatgagtgttgatgaatattgggagccagtatcccatagatagtacagagctgagaaatagaatcaaagattgaatgccgccttggcaaacacaaattctcaaattgttctaatttttacctcaaagttcatgcagtttacttttactttccttgactcataagtttatggtcaatactcatgaaaagtaattttaagaagagggttggatatttatttattctcagtagtttatgatttattgggttacagaataaaaattttataatcttgtatttattatgagctcaaggaagagcttacctttgttttcaaccttactttttttgtttgtaccttaagtcaaagtataaaatattcttcatttaaaaatgtctattatttacgtatgtatttatttcgagacagggtttttattctgctgcccaggctagagtgcagtggtgcgctcttagctcactgtaacctctgcccccacccccagtcccctgctaccctgttaactccccacccaccaccagctcaagccattctctcacctcagyctcctgagtagatgggattaaaaacacacaccaccatgcccagctaatttttatttatttattttttatttttttgagatggagtctagctctgttgcccaggctggagtgcagtggcacgatctcggttcactgcaacctcctcctcccgggttcaagcgattctcctgcctcagctcccgagtagctgggattacaggtgcccgccactgtgcccagctaatttttgtatttttagtagagacaggttttcaccatattggccaggctggtctcgaactcctgacctccggtgatctgcccatstcggcctcccagagkgctgggattacaagtgtgagctaccgtgcctggcctgatttttatttttagtagaaacggagtcttgccgtgttacccaggctggtctcgaactcctgagctcacgccatctaccttcctcggctccgcagagtgctgtgattacaggcattagccaccatgctcggccaaaaatgtttatgatttttaaaaagactttcagatgttctgattttctacattttgctcaatatctttctatttttttttagaaccacatgtgtaaagagtgttatttcttcatgtaaaacatttctgtaaagtttcctatcaaatgtcagttccaatatatttataactgtttaaaagtttggtatcagaacttgagtctctgacttccaataaacatatagcaatttattttcaaaaacaaaagtactctaaaagaaaatgtttttatagtcaaggaagaatactgaatcatacgtgaagtagtttaagacttgttattataaccccattcttttgtttgtgttttgttttaaatttgtgtcaaatcctatatgatgatttactttcttgactttatctttccttttgctaaaggttgttaaatatcagcattagttactttcttatatagtttcacagatgtttttaagaccatttaactttatttagaagcataagaattagttttggacgctttatagattgatttttatccagtacaatatgtattagagatctcttatggtaacataagcattaggttataagctgttctccttagtttattaaaataattacactctcccattaggaaataagaaatattctacttgaatttcacacgtttttgtcttttttatatcagagtccatattttagtcatttcgtgggccrtatactaagccatagggtcttacttgaaataagaaatctttcagtaggacaagcaaaggactcttttaaatttatttgttaatagtctttccattttatgaatcttagtccaagttttgcttttggctatactgttctttgtattgcttttttaaaatgttctatttaatatatatatgcagtcttgccctgtcacccaggctggagtgcaatggtgcgatcatagctcaactatagccttgaactcctaggctcaagtgatcctcctgccctagcctcctgggtagctaagactgtaggtctgtgccaccacgccaggctaatttttaaatttttttgtagagataaggtcttgctgtgttgcccagactggttctattgcttttaaagggaactttcataccacaattttccagtagttaaattaccacaaatgcaaatctctgttttcaaaaaggaattttaatagttgtatttgtctgccatttttctgtgtactattaacctaacatcacattttttctagtcattagtagcaaataatgcttacgtgtgtcttcttttttctcattccttctgtattttttgactttgaaattatttttcatgtaaacttttttggtgacctctgagctcccagaacaccttgtttatattctgtaatgaaattttacagtctcctaccatgttttgtcatggtttgtgtttttattttaaatctttctattgggctttgaatttaaatgtcttggacaagagctatgttgtacayatcttaatatgtatttgtgaaatctgtgaattattcagtatattaccaaatgtatcttgacactttattccactctttttttttcctgtctataatcattgtccctaatttcccatttataatctatatgactataattcttaatcctggctgcataataaaatctccagaagagcttttaaaaaagtgtgccacacctcacccaagccaattaagtcagactttctagaggttaaggcttgagcatgtgtatttttttgaaagctctctgggagattctaatgtgcaccataattgagaagcctggtttataactactattggatactcaactttttcatgatttgtaattaaagtggtagcatcttcctacatacatttgttctttctaaaatgaaattttcaactaacacatcttcctgtctctattcaaagaggtttctactaatggatttgggggtatgatgtatctgtataagttccaagtttgatttcccctcttcagaacttgaagggtaattttgactcattgcataactcataattattattattcttttgtacatttgtagaatttttaaatttaaaaaattttgaatgattrtactacctgaattgttgcaaaattgggcaattttaattattaggacataaattttttttttttttttttttgagatggagtcttgctctgttgcccaggctggagtgcagtggtgcagtcttggctcactgcaagctccgcctcccggattcacgccattcttctgcctcagcctcctgagtagctgggactacaggtgcccgccaccacacccggctaattttttgtatttttagtagagacagggtttcaccgtgttagccaggatggcctcgatctcctgacctcgtgatccgcccgccttggcctcccaaagtgctgggattacaggtgtgagccaccgtgcccggccgggatataaatatttttaaccattacatgtgaaatgaaattttgctatctattaccaataaaaatgataatcattgaaacaatatatatcatttatatactaatttaactaaaagtattgctgaggctaatggcattcaaatgcttaagcagatgtagtacataagtctcgtgagcccaagaatgcattcgaatgttgatatcttgcaggttttgatacagaaaatctttagttaccttgaaacttagggctgtggtgtcgttatttgctcttactgtaaagctttgtgtagaaactcttagttttcataattgtcgttaacactctattcctactacttcataccatgattactaccaccgccattctacaacagaggacatatattgaatacttgagtattctgtaccagatactgtgctaagtatattgacatcgcccactccccaaaaaactgtgagatagggaatgttacccacactttacagataggaaaactgaggtcatatagcaagttaagtaacagtacagtagagattcaacttgggtctcactgggcttgagagctatgctttttaatatatttgtttgaggatcttatggggcctcaaatagatcactctgaacatcaatactaatttgattgtacaaactgtgggcaattgagctataggtttgctcagcagccaggaactaccatattaatggattttggcgtaaaaattactgcagctagcttgttttctacttgtaagcctttttttgttttgttttgaaagaaaagatgcaaaacactcagtttattatagattccagtttattatgatttcattgatcagtggccactgtgagattccatttaagggatctttattattggatgtatcaaaaggtatttaacatgttatttgaccttaaatctcctataatttagattttaaaatattgtagtaagaaaacatccacattgtatgttttgtgatgaagaaatcagacttcttactatttgatgaaactagaattctacagagtttattgatatacaaggttttctgataagaacagcacagaggtcactgtattgaacatacagcttagtagaaggtctgaattaatgtgcaaattgaggcatatctaagtagaaagtattgggattgtttcagtttacttagctggatatatttttcagaaagtgatattttagttgtcatttcagtagattcaccactctaaattactgtatgtgattattaggatacatacttttaaaacaaggtgttagcagatttatcttaaatatttttgttaaggttaataataatgcatacatcattattattgcatctattgtcaaagtagccaagaatatacaagaatagattgaggatgaataggtgaaacttgtaaaatattatagttctgaaagttgcatttaaggatttgtgtagacaaattcttgcatatataaaatacctgtgattataaaataagtactgtttggtgttagtattgaggttctttattaaattaattatatagcctgtattagataattgaactttaaaattactgtaaggatacataaaaatgaagctaytcaagttrtttaaaataatatctaaggtcaaatagaacattgcatttaagttgtgccgaaatgagggaaagttttattattttgatgcccaaatatcagtaggtacagtcatatggacctcccaccataattctttatggagatttgttgaagattatttatacttgaggtaacacatacctgagtgctaacctctagtctgcattaaaaaagaatcaatgatcttcataaaaataattgagagccaagcaatattaggtctaaatttatatcctacactgtcactgtttttttttaaacttatactcaaacatacacaacagtaaaggaaattatatgaaaagaattataggaagctagatgaattgtttatctaagttgtcaatgcaaagcaaagtttgttttatctgtatcctgtattattttgtaacaaaccctgaacattttgtttcattcataaatatttcattaggtatctttgaaagataaggattttttaaaaatataactctaatgtcatttatattttcaaatatagctagtcagtgttcagattttcctgttagtctcaaaattctttcttatggtgtgtttattgtaatcagggtccaaataatatctatatattgcaattggttgatatgtctcaagtgttttttgatccatagttatccattctaattttctttcaaaatactaatcgaagaaactgggttgtcttatagtgcttcccatagtttggattttgtaaactatgtttccatgtttagcatgttattttttcacctatattctctgtaattgatagttagttttaaaagcttgattagctttaaattttactttttaacaagagcacctaatagacagtggtgtgtatttcagtcaagaagcatgaaaagtctctcttttgatgattagcagccatttaataattgctgtctagatttatcattaattgtgggctacaaattatgatactctaattctatcccactttctttacttattcactggaatatttctatgaattgatgtttccctataacaattatttggtcaccctttgaaggacaattcttacaagattagacaggataaatgctagattcttttcctttatttagctgttttcaaaataacgaattggaaatctagcatcctccaaagataactgatgaatttttaaagatattataaatacatggatttatatgcaaagtgttttaagttctttctttttaatttttatcaatgttcaaattgaattatcatttgtaggaacctcctcaagttcattcttgagtctttttgacatgatttcctaagtagttattgacagttttcttactttgtgttatgacaggatgtttatagtatgcatttcctaccccagacctgtaatctgccatttgtctagggagccctactttcttttagtaggaaatagtatttagaaatccatatgggtagtaggcatgwtcttgctactggattggccattatttctaggcttttgtagtggacagaactgggaaataattttcttttttaagtgactttgatacatcttaaggaaaagaagaggaaaaagtcctatattgtttgtattaataatattgttctgagacaatctgtgtatgttgtgggataaaacaagtgaggaattatgttagtgtcattagtaatcacagttttcagcctgattaaaaggagacgcatatgtaagattgaagaagtgaaaaccatatagtcttgaatttaaatggaagtatcagtatgacctcagtttttctcccccacaacccctaccataagtcgccatttaaaagttttagtttgtatctatctatccatccatctatctgtctgtctctcatcttagataagtgttagcgcactgtacatactgttctccaccttgctgtttttaccttaaaatatactctggatattgtacatgcgctacagcatgcattctcaatgggagatactaccgcaagagggcaaatgttgactcttgaaaggtgaaaaaaaatcttgaatataacaatggtttttgacccttcaaagggccatagtacataaacagatatataatacatttgtggcattaaagtttcctaggggtggctgggtagcgtggctcatgcttataattccagcactttgggaggccaaggcgggtggaccacttgaggtcaggagctcaaaaccagcctggccaatatggtgaaaccctgtcttttactaaaaacacaaaaattagctgggtgtggtggtgcatacctgtattcctagctacttgggaggctgaggcacgagaattgcttgaacctgggaggtggaggttgcagtgagctgagattgcaccactacactccagcctaggcaacagagggagactctgtctaaaaaaaaaaaaaaaaaaaaaaaattaaaaatttcatggggttgtgtgtgtgtgarattaraaaaggcttctagaggggaaataatgaaaaaaaaactgctctatagctgtatgtataggtatttatcaattcttttaaaagtgagtaatatctatttaaaataaatgcattgtgatttattcaaccattctccattggtcagcatttgggttgtttctattctgttacagttatcaacagtagggcagttaatgtatgttctttggtatttttgctcatgcatctttgagacagattctaagaagtgagattcctaggtcaaaattcctctgtgattttgctagatactgccaaattcctcttgtgacaatgttttagtttgtactggtggaaatattctaaattagtctactgtaagatattgatgccatttatgagaacgtttttagtctattaactataagaaatataatttcctgttgtaagatgcaaacttacatgttatttcacttatcagatttgtttcataattatcactactcctacttaccatatgttgtttataaaacaagaataatgcatctacccaaaaggtcaaatggttttaactaattttttaaaaattgtgttatatctcatctttcttagtaaatatagttgccagtattaaggatttgtttttcaagtaaatgtagtgtggatatagtttaaatgttttttaaattttaatgtaatataaaatttaaatgttttaaaactgcccctcaaaatagagcttaaaacatttttttccctgagatataaacatattttccattggactctttcacttaagttttgaaattctttggaccaactaggttatctaggcttctttagctcattgcttttacacagctatttgaaagtatggcagaaatccctttgtatgtgaaagtacttcatccttacatttttcagtcttgtgtttcaatgactttcagtttaatgacttaagcgatgttgcacagtaactcaaactgattataagaaagattgaattgagtccatctgtacatacagtccttcagatatttatttgcacccagaacagggcctagcgcagggtaggcacaaatgtttgttgaataaatgaatgactagggagctaccaccattgatattcagtaaatagttaataaggaaaggacttagaatgtcaatattttgtctgtggaaaacaatcataaatgtacccagtaaccaggttttctagaacacatttatttggaggctaaaggtacacctttgaccttgaacaacatgggtttggacttgtgggtccatttatacacagattttttttcagtaaatatattggaaaagtttttggagatttgtgaaagttgaaaaaacttaccacatagcctagaaatatatatgccatgaatgcataaaatatatgtaggtactagtctattttatcatttactaccataaaatatacacagcactatttaaaaagttaaaatttatccaaacttgcacacagactgtatatggccccactcatgcagtattaaatcataactgcagaaaactaactgtggtacatattgtaccactgtaataatttcataaccacctcctgttgctactgtggtgagctgaagtgatgctagtcatctatgtttgagcagttcctctctccagtaaattgagtatcacagtaaaaggtgatctcttatagtttttgcatggtttttattgtctttaatacatactatacaccttaaataacaccatgggacccatactaagttcactggtgatgctggaagtactcccaagaagcagagagaagtcatgacatttacagtaaaaagtttaattccttgatgtgtatagtagattgaggtctgcagttgtggttgcccatgactgtaaaaaaaaaaaaaaaaaaagggaaatttgtgaagtcctcactccagctacaacagcatttacaaaaaccttttctttttgcaagtacctttttatccattattgaaaatgcagattttatgcaggtgcaggcttactatgagaaaggcatacctatagactctaatattacttgagaaaaagctaagatatcaagtggtaatttaaagcaaaaggaaagtgaaggatctaaagctggagaacttaatgccagcaaaggatggtttgataattttagaggtttggcttaaaaaaatgtcatgataataggagaagcagcttctgctgacaaagaggcagcaaatgagttcctggataccatttagaaaataatggaggagaaagaatatctacctgaaaggttttaatgcagacaaaagtgccctactctgggggaaaaaaaaagccacaaagaacatttattagcaaggaagagawagtgagcaccaggatttaagacaggaagggataggctatctcttactgttttgtgcaaatgaagtcaggtttctgatcaggactgcccttatctataaagctgctaacccacaagcttcaaagggagaagataaataacagctgccagtcttctgcttatacaacaaaagacctggatgagaaccctttttctggattggtgccattaatgctttgtctctgaagtcaggaagtaccttgccaataagagactgccttttaaagtacttttggtgttgaacaatgcccctgtccacccagaaccccatgaattcagcaccagaggcattaaaatgatctccttgccccaaacacaacatctctaatctagcttctagatcagagagtcataagtacctttacagctcattacacacactactctatggaaaggattatcagtgctatggaagagaaccccgatagaacatcacgaaagtctggaaggattacaccattgaagatgccgtcattgttatagaaaaagttgtgaagaccataaagcccgaaacaataaattcctgttagagaaaactgtgtgcagatgctgtgagacaatcaaggaaatcatgaaagagattgtggatgtgacaagggtgaggaatgaaggatttcaagataagaatcttggagaaattcaacagctaataggtaccacaacagaggaattaacagaagatgacttgacggagatgagtgttctcaaaccaatgccagacaatgaggaaaaagagatagaagcagcagtgccagaaaacaagatgacattagacaatctggcagcagagttcccattattcaagacttcctttgacttcttttatgacatggactcttctatgggcactgaaactaaagcaaatggtgaaagaaggattggtaccatatagaaacaaacatttttagagaaatgcaaaagtaaagtcagaaattacagtgcatttcggtaaagttatactgagtgtgcctgcctcttctgcctccacttccacctcctctgccacccttaagatagcaagaccaacctctcctctccctcctcctcctcarcctactcaatgtgaagataacntttatgatgatctgattccagttaatcaatagtcaatgtattttcttttccataggattttcttagtaccatattttctctagctttattgtaagaatatagtatatggtacacataatatagaaaagaatgtgttcactgactttatgttattggtaaggcttctggtcaacataagctattagttaaatttttggggagtcaaaagttatacacagatttctgattgcactggtgtttggtgcctctaacccccatgttgttcaagggtcaactgtaaagagaaaaatggaatttagaagatgaaatgtttgcagttattttggtaagttaaaggacttcattttttgaaaacattgcattattgcacaggtactgtcaactgaaaaagttttacctactagttcccttgattgtggagcgaatttgtagtttttagtgaatrtaaatataacatttttctcttcctttttaggcatttgggatcacagctttgtgaattagaaaaactgatagataaaatgatgattgcagaattttctacttattctcacagtgacttaaatagaccactggaagatgactgtcaagttttagaagaggtatgtgttttaactgtggaatgaagttgatgccattgcttaacagtcttggcttagaacacatttttctcagattataggaatcaaaattatcttaaatttcaagggctatcagacctatgaagtccttcactagctatgtgacttgagcaagcaccatgattgttcactatcctatggaattagagaataaaataattgtatagcttaattagaaattagagttaaaatgagcttacagaccaagttaaaaatacagatataggatgaattaatttatattctgtgtttatgtgtgcgagtgctggagcttgtcttttataaaaagtgatcatagttgggcgcattggctccatgcctgtaatcccagcagtttgagaggctgaggtgggaagattgcttgagcccaggagtttgagaccagccttggcaacacagggagactccatctctacgaaaaataaaaaaattagctgggtgtagtggtgcatgcacacctgtagtcccagctacttgggtggctaaggcgagagsatcacttgagtccaggagtttgaggctgttagtgagccatgatygtgacatagcaagaccctgtctcaaaaaaaaaaaaaaaaaaaaaccgaaaaastgatcattatcatatggtaattacccgtcattcaaatttactgagtacctattatgaacatgttttttatatatgtatatacaaatacataatatccaggcttcacttagctggtaacttctcagtgttaatcactgacaacaactagtaaaaaatcccagaaaccytgataactgcctaagtaaagaaacttttgtagatgttagcagttgacttcccactgtgagagtctaggtcattatttcagtcttctagactatgcattacaaagcatgggtgaggtgcagtgggtcaggcctataatccaagcactttaggaggctgaagctagaggatcgtttgagcccaggaatttgagaccagcctgggcaacacagtgagtctacaaaacaaatttaaaaattagccaggtgtggtggtgcatgcctctagtcccagctactygggaggctgaggtgggaggatcacttgagcctgggagatcaaggctgcagtgagctgtaatcacctcactacactccagccttggcaacagagtggaacgctgtctcaaaacaaagaagcaaaaaccaaaaaaaacccacagggcccatggagtatttattggtcatcagggtgtgagaaggatattttttacttgttgaaactagaacaraaaatacccttgtattgttttgcccgaaaaccagcttcattggttcactgtggtggggtaggatttatctgttttacagcactgactccaaaaatctcatgataagattgctgtgggaggggttttcaggctgctagaaaatactttgtgcaggatagagatctgaggatcaaacagaactcttgatgctgaatatttctacctctaagtaaaattacttyatatttaaaatgtcaagttacatacttttattttaacaggaaagactaatatctcttgtatttggacttttaaaacaaagaaagcttaattttttagaaatctatggtgaaaaaatggttattacagcaaagaatatcattaaacaggtaattatgcatttttatttgacatattttggtctggaacctttgtgaagtttatttttatgttatcctagtaataatatatatagtgtaatagtaatatagctcatttatgtaaaaactgaaaatttagaaaaatgaaagtaaaacatagccttaccagccaaaagattattgctataggaatatttccacgtgtagactgattttcttatgttgtcattatgtgtatatgattttatacatatatttcagttacaatcataagcagtttctcmtattattataaaagctttcagaaacatcatttttaatgattgtgtaaagtcccattaacattatgttaaatctacttaacttttcctctgtgttgaatatttaggttgtttataatttaatacaataaatagcactgtgacagacatctgtggtataaagttattttgtttgtttttcgtacttaagaatgtttgttcttagactgattcctagaagtattggttagagagtgaaaagtatttttaagttatttgatgtatagaatttaattcctatttaaaaagatttgccaatttatactcccatcagcagtagacaaatgttcatttcctttttatcctaatctctaagaaattataaactagaatccatgtgtttttcagtattccctgatctttgttttgactttttttagtcagataaatcttatccactgaacttcagttttttaatatatgaaaaagataatatgattttaaaggtattyattaggcttaattgattattatcattaggttgaatgtacatatatgagtttttaaagtttaagtttaaaagttaaataagcaaaaaaattataatcatcccctctttcaagcactgattaaaacactatttttaaattggtacaaccactttgaaaaattgttggcaatatatagtaatgccaaatttgcatacatgttgtgacccagcatttctattcctaggtatgcacccaacagaaatatgtatataagttcaccaaaacacagcagaagaatgttcctggcagtactatttgtaattttaaaaactggaaacagcccaaattccatcaccagtagaaaggataaatagaattttgatgtatttgtacagtggaatactatacattaatgagaatgaatagattacacagaataacaaatgaatatcatagacataaygtggagccaaagaaaccagacacagaaaagtatacattgtatgattccacttatgtaaaactcaaatgcaggcaaaattattctatggtttaaaaatcaagataatagtatattttgggaggaagtagtaactggtaggggaataggggaggagctctgggtattagcaaggttgtttcatgagctgagttctgattacacagatgtactccatttgtacaaaaatattgagctgtaaacataatttgtacaattttctgtatatatattttaagcaatttctaaaaactggtatgtttcaattcccagacttcaaatctaagcatttattttttaattttaaactgttgcatgtatcacaaggaaatgtaacttctaatactaatttcttttgggattttaatatggggcttacaccttgttcctaagtattatagttctgcttttctggtgtaggattttgaacagttttgaatattaggtgattttaattattacaattcaaacatactctgaaataattatttaattggctaattgtaatcagcttttcaaacactgtgagagatacataagagataaaaatctggtaaaataattattgtagccagtaagagcctttaaaatttttttttatcttaagttcaggggttcatgtgcaggtttattatgtaagtaaacatgtgacatgagtttttttggtatagattatatcatcacccaggtattaagcctagtacccattagttatttttctggtcatttctctcctcccaccctccactctccaatagtctccaccgtgtggtgttcccctctatgtgtctgtgtgttctcatcatttagctcccacttacaagtgagaacatgcagtatttggttttcagtttctgtgttagtttgctaaggataatgagctccagctccatccatgttcctgcaaaggacataacctcattgttttttttatggctgcatagtattccatggtgtacgtgtaccacattttctttatccagtctatcattgatgggcatttaggttgattccatgtatttgctattgtgaatagtgctacagtggacataagtgtgcatgtgtctttaataatagaacaatttttattcctctgggtatgtaaccagtaatgggattgctggattgaatggtatttctctctttaggtctttgaggaatcgctacactgtcttccacaatggttgaactaatttacactcccatcagcagtgtataagtgttcccttttctctacaaccttgccagcacctgttattgttgactttttagtaatagccattcttacttgtgtgagatggtatctcattgtggttttgatttgcatttctctaatgatcagttatgttggccacatgtatgtccttttttgaaaagtgtctgttcatatagtaagggcctttttaatgtacaaatggaacatggaatacttaggatttgaaagacaattaatcaaattgtttttgttttttcttaaattttgcagtgtgtgattaataaagtttcacaaacagaagaaatagacacagatgttgttgtgaagtaagtataaatatataggttggtggttatcagtcagagaaaagatgatagatgtaaattagaataattcgaagtagatttcgttaaggaattatttactaaggtgtgagcagggtgtaggaaaatcacaagtgacagtgtggaacgaagacagtgcttaacagaattgaggagaaaggtagttggaaaaaaagctgtgaccttgagtagagggaagcagtcaccctgaggcaacccttgagagagacaggagaaataggtacctttactagagagctagaggagtaggtacctttactccttccagtttttgtaagggctcctcaatggccaggcccacatgttagcttcccagagcagagagcaggatggacagggacagaacatagatatggagaggtgaaattggagataattcattacaggggcatagcaagcattatgtttaaatttgtagctatgtaattaaaatcaacttttaattggctttgagaagtttgagttaatgattttgaattgcccatgtttgtattttttttttgttttcaccctagaaattcctattcttggccaggcgcattgactcacacctgtaatcccagcactttgggaggccgaggtgggagaatcgcttgagcccaagagttcgagaccaccctgggcaataaagtgagaccccatctctaccaaaaataaacattaaaaaaataagttgggcatggtggcacatgcctgtagtcctagctactcaggaggctaaggtaggaggatggtttgagcctgggaggtccaggcttcagtgagccatgattgtgccactgcattccagcctgcacaaggaagtaagagcctgtctcaaaaaaaaaaaaaaagaaagaaagaaagaaagaaaagaaaaattcctattctattattttaagaagaatagtgataatattttatgactgaatttcttgttcatatggatatttaaatgtttttagctggcttagatatgactagcaatatgtacgactgtgaaactttcttgggccaaactcacagaatggagtattaatttccacactattatctagggaaaactcaatttcagaattagttgaagcaaactataataatcagagaattgttagtggttggaaaacataagtcattgggacactattagaagctccatggatgtggagagtcagtttttcttcttccctagggaattttctccatagaagtagagaacttcctgtatatcaagtgttgtagtatctttttagaataaactcttaactgaagctgcgtttattaaaaatttagagtaataagtcattttggtactataaaatatctttagggaatgaatttgtattactttttttcaccttgaagttaatgatttctgtcaactatcaaaataatattggctgctgcttacatggtacttttaaaaatgtgtcatgaattgttctaagtattttttattaactcatataatatttacaacaaccacataaggtaggttctgtcagtttcctcatgttagatgagaaaattggagcgtggaggggttaagtcacttgccagagccacatagctagcaattccaataagctgctgctattttaaaccaaggcattgtgttgtggttccagggctcttaactcatgccatattacttctcatatggtatttttaaagttgtagttagaaaagcagattattaaattttggggagagatgtatgtttccatttttattccagagtatatcttcacacttatttctctatggtttattcattcaatgatcataaagcttgttcatatgaaattgatatatgatatagttaacttaccagtcttaaaaatatttaaataagccataactctttggtaatttacctcttcaacattttagttaggtatctagatgaaattgcattttatcactagatagtatttagtctcatttcttccagtttgtagatgttatattgattggcccagagacaatcattatttttgtttgaattatttttttctaggcttgcagatcagatgagaatgttgaattttccccagtggtttgatctgctcaaggatattttctctaagtttacaattttcctacagagagtgaaggtaagcttataaattagtttgtctagaatatccctaaaattaagtcagctttctagatacataatatgtaaataaagactcaaactagaataaaacacagtttctttgtttttgtaatttttctaaagaggcttgtttttaaataaaaatttaggtacctcagagtttgacagttttaagaatttaataagttataattttataacttaaaaagaaatatgctcttactttacattaaatattatacagtaatatttcctctcgtgattttttgttctcctaggttatcyagaggtacaatattgttaaacaccccaaaatcaccccaaactatcaatttttctataaagtcaatgttgatataatggtgttttaaaatatattgtttatattcaaattaccttgctaatttactttttttttttttttttttgaggtggagtcttgctgttacccaggctggagtgcagtggcgcaatcttggctcaccgcaacttctccctcccgggttcaagtgattcttctacctcagcctcccgagtagctaggattataggcgtgtgccaccacgcctggctaatttttgcatgtttagtagagatggggtttcaccatgttggccaggctggtctcgaactcctgacctcaagtgatctgcccgcctctgcctcccaaagtgctgagatataggtgtgagccactgtgcctggctgctaatattctttatttacatttttattcactttttgggcacgaatccaatcaagcatcatgtgttacatttaattattttgtctctttagtcaagccacttaattttaaaccacttagtataacaaaaagaacaggtcacgtatcattttacagaagatgtcagactctaatacatactggtttgaatcaccaacatgtcataactttggtttaagaagaatacaggctgggcacggtggattacacctgtaatcctatcactttgggaggccaaggcaagaggatcacttgagctcaggagtttgagaccagcttgggcaacataatgagacctcatctctacaaaataaatttttaaattagccaagcatagtgatgcacacctgtagtcccagctacttgggtggctgaggtgggatgatcacctaaccccagcaggtcaaggctgcagtgaggcatgattgtgccactgtactccagcctggccaacagagcaagactccatctcaaaaaatgaaaaaataaaaataaaaaaagaatacaatcattaggaattaccatgtgtaacagttaaaagggaccatttgtgaaattagatattttttgagttatcaagtgttaacattgtgttttatgtactagttaacatccccagcatctcctgagtaccatgttaaatagtgcaggggactttggtacttgtgtatgacattaattttcctttattcacattgaagcaatgctaagtcacatgtgtaagctctccaatcaggttcacaaaagttttatagagtgggattcactgtgcttaatttagactgcttctaaaatgttgatcctacctatagatagtgacagacacaaacttgtatctataggtgttcaataacaaaaccatgttttcacttcttatattctgaccatgacctcatcatcacacacttcaattattgcatgtctagttatatagaactcttacattgcatagtgtagaattggccaactttttgccagaaattttttgaagtacagtaagtcttcaatgttatggataggtcttggaaactgtgactttaagtgaaacaacttataccaaagctatttttttcactcatcattatagtgaaacatttccttcaatgtttttttcaataacactgaaggaaacagtgttattcaaaaacctgctgtacgtggtttcacttaaagttatagtctcccagaatctatcattcagattaagtgaggatttactgtagttattccactatgtggaatggctctatgtcagttaaactaagtagagttattattttatgtatgtgctatatgaaaactgattgattatagttgtaatttctcattttcacatttggaccacttaaactagtacttatgtacaacatctttacagatgacatgaaatatggtacttttttctgtgaaaaaagtttgtgattctgtcaagtattacttcactgaaaaataatgttaattacaagctgttcatttttattgaagaatttaaaaataactaaaaattggaaagaacccagatgtctaacaatagagaaatggtaaaataaattatgcttgacacattctttaccatggaatattatatacagccaaggatttttaatggtaggagaaaatacatacattatgatattcagttaaaaatgcaagatacagggccaggcaccatggctcacacctgtaattccagcactttgggaggccgaggcaggcagatcacaaggtcaagagatcgagaccatcctggccaatatggtgaaaccctgtctctactaaaaatacaaaaattagctgggcgtgttggtgcatgtttgtcccagctacttgggaggctgaggcaggagaatcacttgaacccgggaggtggaggttgcagtgagccaagatggtgctactgtactccagcctggtgacggagcaagactccgtcttaaaaaaaaaaaaggcaagatgtagatgtacttatatagtgtgatctcagctatgtcaaaaagaattttttttaacccttttatcttcctagaacaaggagaaactttggggttttttggtggttttctttagctggtcagattagatgtcatttagattttttattcttttctattttccctgaattttctacaaagagaagtattacttttataatcagaaaaagttgttttgttttttaatagaatttaccacattacaggaatagactatttgaatttcttgtttgatttaccagggttaataatttactctcctacattgttgcatttatttctcaaagacaaaggatatccaattctatatgtcactttagtattacgctttttttgtttttttgtttttttttgaggtagagtttcactctgtcgccaggctggagtgcagtggcacaatctcagctcacttcaatctctgcctcccaggatcaagtgattatcttgcctcagccacctgagtagctgggattataggcgcacgccaccatgtctagctaatttttgtgtttttagtacagatggggtttcaccatgttggccaggatgatctcaatctcctgaccttgtgatccacccaccttggcctccaaaagtgcagggatttagtattatactttttaaaagaaattaaagggtacattttcagccagaatatttcaatagtatttttattttgaatggataaataataagctattgggatttataaatttcatatttgagtaattgttaacaacttgaggatctgttgctgttatttgtatttttttagtgtgtattttttcttcctttttggtcatggtaaaaataaacataaaacttaactgattttaagtgcacaattcagtggcattaagttcatttgcactattgtgctactgttaacaaacatccatccacagaactctttttatcttgcaaagctgaaactctgtacctattacataataactctgggcctggcgtggtggctcacgcctgtaatcccagcactttgggaggctgaggtgggtggatcacctgaggtcaggaatttgagaccagccgggccaacatggtgaaaccccatctctactaataatacaaaaatcagctgggcatggtgtctcatgcctgtaatcccagctattccggaggctgaggcaggagaatcgcttgaacccaggaggtggaggttgcagtgagccaagattgtgccactgcactccagcttgggtgacaagagcgaaagtttgtctcaaaataataataataactctggccaaggtggggctgaaagtcccagtcctctaatcctgccttagtctttcaggtgaccagccttcatcctgtggctatgtaggggccctcggctatttgtcatctctttagcatatgaagacatttttaccactctggagattccaagagtttagggagctgcatgccagggaatggggacaaagaccaaatataggcctgacatagtagctcatgcctataatcccaacaccttgagagactgaggcaggagaatcgcttgagaccagagtttgagaccagtctgggcaacctaggaagatcctgtctgcacacacacacagccacgcacacatgcacacaagtcctgggcaaacctagcaagatcctgtctagacacacacacacacacacacacacacacacacacacacacacmccacacacacacacgtttccactttccccaatcccctggcaaccaccattctactttctgtctctatgagtttgactcatagagcactcatgctgtgcaccgattattaggtatttcatataagtggaatcatacaatatttatccttttgtgactggcttatttaatgtagcttaatgtcctcaaggtgccatctgtgttgtagcatgttagaatttccttcctttttaaggctgagtaatatgaataatattccattatatgtgtatctactacattttgcttatccattcatcaatggacatttgtgttgccttcaacttttggctgttgagaataataataatgccatgaacatgcatatgcaaatatctctctgaggcccccttttagttcttatttttgtcaaccccagaattggaatttctggatcatacggtcatcctatttgtaattttctgaggaaccttcacactgttctccatagcagctgtaccattttacatttccaccaatagtgcagggtttcagtttttctgcatccttgccaaaacttgttattttctggattttgtgagactagccatcctaatgggtatgaggtggtatttccctgtaggtttaatttacatttttctaatgatgagtgatgttgagcatcttttttatgtgcttattgggcatttttatgtcttttttggaaaaatattttatttgcctattatttaatggggtggtttggtttttttgttgttgagttgtagaagttctttacatattctggatattaaccttttatcatatacgtgatttacaaatattttctcccattccgcaggttgcctttttactctgttaatggtgtcttttgatgcatagaagtttttctattttgatgtagtccaatttgtctatttttttgttgtcacctatgtttttcatttcatatccaagaaatcaatgccaaatccagtgtcctgaagctttttccctgtattttcttgtaagaattttatatttttagagcttatatttaggcctttaattgactttagtttgtttttataggtggtataagacagcggtctactttcattctttagcatgtggatattcagttttccgagtatcatttgttgaaaagactgacctttctgcattgaatggtcttgccacccttgtcaaaaaacattttactgtatatgtgagagttcatttgtgggctctctctattctatatgtcactctttatgccaataccacactgttatgattaccatagtcttgtaagttttgaaatcaggattataagacttccatacttcattctttacgattgtattttgactttttattaaattcttgtttattgttagcaccctatagattaggctaatttttataggtaagaaagataacagcctttaaatgcagcttaccttcttttcaaggaattcttagcttttaaatttcattttgttgtatggataaataatcctagtctgtcatttcagaatgacaatatcagttgtcattatggttatcaatatggctaccagatatttcattaactccattctcaagattggaaaattatatttggcttagctgtcctggtgtttttgaaacatgaacttgtctatagactgtgtaatagttcagaaagtaaaccatgtatctactgttgaaagtattatgtattttaaaatcttattttttggataccagtcttctggcattcttaagaatggctttggatttggaaaaaataatcagcaaatctttaaaagtgtagatacggtgaaaacagcaaagaagaatccctagaatacctgatatactttatgtggaaaattttaataactgtataagcgaagatgttattaaaaggaatgaagtattcaaatcaaactggtttaaacagtacaaggaatgtattggctctgggaattaaagaaaagtccaagactaggaagggcttcatgcatggttttgtcttggttctccagcttagtttctctgtttccaattcagctttgcctttctctttcctcttggcttcatcagttctaggtctgccacatttgccacaattctataccacctagaagttttctattttttacttagagttttccttcctcagtcaccaaatgaaattcctttatcgattaagccaaatttagaatttttcacctggagtttttcttcttcagtcatcaaatgaaagtccttggctttaattgattgaaccagtttaggtcacatgtccagtcactgtgatcaggaaaatgctgtgcactgattattagtttaaatctggattttcttctcatctctaagctaaacattaggcaaggaggttgggagtacactgagtgggctatttagaactgatacttgaagctggaaagtgggcttatttctacccaaattatatggctgttgtaccatgggaaaagtgatgtagaatagatgttggataggtctgtcatgtctttttattttaaaaagttaagaaagaaaattagcaagacagaagagataaggaaaaagacgcaaaacaagatgggggaactaagtatatccaagattggacagcagtgaggattaaagcagcagtagtggagcagcaaatttgtgacaatacagaagaagctagtgagcaatgaagaaagaaaaaaaatgcagtatccatagtagacactttggtcctaaagctcttgaaggctctatcttcggtatactgtatgggctattgactcatttaaaatgctttcagttccaaataacaggaaacacaactcagagggtctcaaacagttaagaggatttattagctcatacaactaaaaaaatacacagaggtaggtcagccttaaggtctttcataaagaggttgttggtgtcatcaagctttggctttatttctttgcaattctctcttctatgtaccttactaataattaagctcagattgtggtggttccatgtactaattggactagcttagatccttttgttgattttggagacccgaagttagagtctgcttccctagaaccatgtagattccaaaaaaactaaccaagcgttttgagaaagggagaaacagttgtaagactgcaactgtgaatgttaaaataggcaagcagtcctttatttcttaattgtccataaagacattagtttacataaatttactcttcatttgcctagctttcaatatttactgagcacctcctatttgccaggcactattctaggcattaggattacagtgtcatggaatggagctgacattctaatagaaggagacctagaataaacaaagataattgtacataatgataaatgggtttttttgttttttgtttttatttttttacaaaaactggataatgggatagagttgctgggtggagattcagggaaggcctctgaggaagtgaccactggagccagaacctcagtgatgagaaggaaatatgtgcaaagatcaaggtgaaaagcattccggatagaggaarcagcagaggcactgaggtgggaacaatcctggaatgagggaagagtagaaagagaactagaatgtctggagagtagtgaataagtgagagaagatacgagaaaaggagaaagagaggtaggggctaggcatggtaagtaacacagattccttttcttttagacaggcatatcaatgtatatgattctctgatgggcaagttatgtttagtgtaacctttttaagaggtcagagaaatatgcaacatattttagggagatttccattttaaaaattagttaaaatataggaagtttatttctaagctttagtgaacccatttctcctggccagttctttttcacatcacttttcctatgtaataaaagatcggtagaaattctgatatacatgactttgactcatttatgattatagatgtccaaaattacatgcacagaattctcttttgggaacttcaggtaagagacattttacgtcccttaaaagtgtgtcctattttcttgtaggcaacattaaatatcattcacagtgttgttctctcagttcttgacaaaaaccaaaggactagagaattggaagagatttcacaacagaagaatgctgcaaaagataattcactggacacagaggtggcttatttaatccatgaaggcatgtttataagtgatgcattcggtgagggtgagctaacacctatagcagttgacactacctctcaaagaaatgcatctccaaatagtgagccctgcagcagtgattctgtatccgagccagaatgtactactgattsttcatccagcaaagagcacacatcatcatctgctattccaggaggtgtggatattatgtgagtatagtggctactgccaaattgacaagattttgagtcatcttattaatggattcagtaagattgattattcagtttattgaaaaaccatgtaaattttagaatttaacaaaaatatattaattttatgaaacgtatctctataaaaatgtatgagaagtaaggaggtgagcattggaagtaattgaaaattatagagttttaagattgcaaaagaactttaaagaccattttattaaatgccctcatttcagtgataaggtaattgatgcccagagagcttagatgacttgcttacagtgactagtggcagaacatatactggaacccaggtcagtttttgctttggtcatttttctttcttctgtgtcacctttgtgatttatatgttgtgaagatctgtttgatttataacttttggtttttcaaagacatgaatttccaaatggatcacatcttctcttaaaccttattttaaaaacttcttattttgaaataatttcaaatttacagaaaagttaccagaatagaacaaaaaactctcatataaccttcatccagattccccaggtgttaatactttaccacattgcactctgcctccctccctctctttttctctttctgtctccttttgtctttatctcttatgttaatattttttctgaatcctttgacagtaggttacagacatgatgcactattatccctggatacctggtgtatatttcctaaacacaagaacactcctatataaccttagtatactgattaaatacaaggaaacattgatacaataaattattaatattactgtctgatccacagatcccatttaaacaaagtttaccaattgacccagtaatctccgttatcaaaaaaatagaaccaataaaatatttctggtccaagaatagtttggatttagttattgttaagaataacaatatttttattatctttatataaatcaactcagtactttattattacttctttttctgtttttttttttttatactttaagttctgggttacatgtgcagaaagtgcagttttgttacataggtatacatgtgccatggtggtttgctgcacccatcagcccatcacctacattaggtatttctcctaatgttatccctcccctagccctccacccttcacaggccctggtgtgtgatgttcccctccctgtgtccacgtgttctcattgttcagctcccacttatgagtgagaacatgcagtgtttggttttctgatcttgtgatagtttgctgagaatgatggtttccagcttcatccatgtccctgcaaaggacatgaactcatccttttttatggctgcatagtattccacggtgtatatgtgccacattatcttaatccagtctatcattgatgaacctttgggttggttccaagtctttgctattgtgaatagtccccacagtaaacatacgtgtgcatgtgtcttcatcgtagaatcatttataatcctttgggtatatgcccagtaatgggatgtctgggtcaaatggtatttctagttctagatccttgaagaatcgccacactgtcttccacaatggttgaactaattaacactcccaccaacagtgtaaatgcatttctatttctccacatcctctccagcatctgttgtttcctgattttgtagtgatcgccattctaactggagtgagatggtatctcactgtggttttgatttgcatttctctaatgaccagtgatgatgagcattttttcatatgtcttttggccacataaatgtcctcttttgagaagtgtctgttcatatcctttgcccactttttgatggggttgtttgcttttttcttgtaaatttgtttaagttctttgtagattctggatattagccctttgtcagatgagtagattgcaaaaattttctcccattctgtaggttgcctgttcactctgatgatagtttcttttgctgtgcagaagctcttccgtttaattagatcccatttgtcaattttgccttttgttgccattgcttttggtgttttagacatgaagtctttgcccatgcctatgtcctgaatggtattgcccaggttttcttctaggagttttatggtcctaggtcttacgtttaagtctttgatccatcttgagttgatttttgtatatggtgtaaggaaggggtccagtttcagttttctgcatatggctagccagttttcccaacaccatttatcaaatagggaatcttttccccattgcttgtatgtgtcaggtttgtcaaagatcagatggttgtagatgtgtggtattatttctgaggcctctgttctgttccattggtctatatwtctgttttggtaccggtatcatgttgttttgattattgtagccttgtagtatagtttgacgtcaggtagcatgatgcctccagctttgttcttcttgcccaggattgtcttggctatgcgggctcttttttggttccattagtagtttttttcatttctgtgaagaaagtcagtggtagcttgatggggatggcattgaatctataaattacttttggcagtaaggccattttcacaatattgattcttcttatccatgagcatggaatgtttttccatttgtttgtgtcctctcttatttccttgagcagtggtttgtagttctccttgaagaggtccttcacatcccttgtaagttggattcctaggtattttattctctttgtagcaattgtgaatgggagttcgctcatgatttggctctctgtttgtctgttattggtgtatagaaatgcttgtgatttttgcacattgattttgtatcctgagactttgctgaagttgcttatcagcttaaggagattttgggctgagatgatggggttttctaaatatacaatcatgtcatctacaaacagagacaatttgacttcctcttttccacattgaataccctttatttttttctcttgcctgattgccctggccagaacttccaatactatattgaataggagtggtgagaaagggcatctgtgtcttgtgccggttttcaaagtgaatgcttccagtttttgcccagtcagtattatattggctgtgggtttgtcataaatagctcttactattttgagatatgttccatcaatacctagtttattgagagtttttagcatgaaaggctgttgaattttttcaaaggccttttctgcatctattgagataatcatgtggtttttgtcattggttctgcttatgtgatggattacatttattgatttatgaatgtcaaaccagccttgcatcccagggatgaagctgacttgatcttggtggataagcttttcgatgtgctgctggattcggtttgccggtattttgttgaggattttctcatcgatgttcatcagggatattggcctaaaattctctttttttgttgtgtctcttccaggctttggtatcaggataatgctggcctcataaaatgagttagggtggattccctctttttctattgattggaatagtttcagaaggaatggtactagctcttcctcgtacctctggtagaattcagctgtgaatctgtctggtcctgaactttttttggttggtaggctattaattattgcctcaatttcagaacctgttactggtctattcagagattcaacttcttcctggtttagtcttgggagggtgcatatgtcgaggaatttatccatttcttctagattttctagtttatttgtgtagaggtgtttgtagtattctctgatggtagtttgtatttctgtggggttggtggtgatatcccctttatcattttttattgtgtctatttgatttttctttctcttcttattagtcttgctagatcaattttgttgatcttttcaaaaaaccagctcctggattcattgatttttttttttttgaagggttttttatgtctctgtgtccttcagttctgctctgatcttagttatttcttgccttctgctagcttttgaatgtgtttgctcttgcttctctagttcttttaattgtgatgttagggtgttgattttagatctctcctgctttctcttgtgggcatttactgctataaatttccctctacacactgctttaaatgtgtcccagagattctggtacgttgtgtctttgttctcattggtttcaaagaacatctttgtttctgccttcattttgttatttacccagtagtcattcaggagcaggttgttcagtttccatgtagttgagtggttttgattgagattcttaatcctgagttctaatttgattgcagtgtggtctgagagacagtttgttgtgatttctgttcttttacatttgctgaggagtgctttagttcgagttatgtggtcaattttagaataagtgtgatgtggtgctgagaagaatgtatattctgttgatttggggtggagagttctgcagatgtctattaggtccgtttggtccagagctgagttcaagtcctggatatccttgttaattttctgtcgtgttgatctaatattgacagtggggtattaacgtctcccattattattgtgtgggagtgtaagtctctttgtaggtctctaaggacttgctttatgaatctgggtgctcctgtattggttgtatatatatttaggatagttagttcttcttgttgaattgatccctttaccattatataatggtcttctttgtgtcttttgatttttgttggtttaaagtctgtttcgtcagagaccaagattgcaacccctgctttttttttttttttttgctttccatttgcttggtagatcttcctccatccctttattttgagcctatgtgtgtctttgcatgtgagatgggtctcctgaatgtagcacaccgatgggtcttgactctttatccagtttgccagtctgtgtcttttaattggggcatttagcccatttacatttaaggttaatattgttatgtgtgaatttgatcctgtcattatgatgctagctggttatttcgcccactaattgatgcagtttcttcctagcattgatggtctttacaatttggcctgtttttgcagtgtctggtaccagttgttcctttccatgtttagtgcttccttcaggagctcttgtaaggcaggcctggtggtgacaaaaatctctcagcatttgcttgtctgtaaaggcttttatttctccttcacttatgaagcttagtttggctggatatgaaattctgggttgaaaattctttaagaatgttgaatcttggcccccactctcttctggcttctaggatttctgcagagacatccgctgttagtctgatgggcttccctttgtgggtaacctgacctttctctctggctgcccttaacattttttccttcatttcaccsttggtgaatccgacaattatgtgtcttggggttgttcttctcaagaagtatctttgtggtgttctctgtatttcctgaatgtgaatgttggcctgccttgctaggttggggaagttctgctggatagtatcctgaagagtgttttctaacttggttccactcttcccatcactttcaggtacaccaatcaaacgtagatttggtcttttcacatagtcccatatttcttggaggctttattcatttcttttcactcttttttctctaatcttgtcttctcgctttatttcactaatttgatcttcagtcactgataccctttcttccacttgattgaatcggctattgaagcttgtgtatgcttcacaaagttcttgtactgtggttctcagctccatcaggtcatttaagcttttctctagactggttattctagttagccactcatctaatcttctttcaaggtttttagctcccttgcaatgggctagaacatgctcctttagctcagagaagtttgttattaccgaccttctgaagcctacttccgtcagctcgtctaactcattctccgtccagttttgttcccttgctggtgaggatttgtgttcctttggaggagaagaggtattctggcttttggagtcttcagcatttctactctggtttctccccatctttttggttttacctacctttggtctttgatgttggtgacctgtcgatgggattttggtgtggatgttctttttgttgatgttgatgctattcctttgtttgttaattttccttccaacagtcacatccctcaactgcaggtgtgttggagtttgctggaggtccactccagaccctgtttgtctgggtatcaccagcagaggctgcagaacagcaaatattgctgcctgatccttcccttgcaagcttcacagaggggcacccacctgtatgaggtgtctgtcggccccctactgggaggtgtctcccagtcaggctgcacgggggtcaggkatccacttgaggaggcagtctgtccgttatcagagctcgaacactgtgctgggagaaccacagctctcttcagagctctcaggcagggatgtttaagtctggagaagctgtctgctgccttttgttcagctatgccctccccagggaggtggaatccagagaggcagtaggcattgctgagctgcggtgtgctctgcccagtttgagcttccctgctgctttgtttacactctgagcatagaactgcctactcaagcctcagcaatggcagacgcctctccccccaccaagctctcacatcccaggtggatctcagactcctgtgctaccagtgagcaaggctccgtgggtgtgggacccaccgagccaggcacgggaggggatctcctggtctgcctgttgcaaagaccataggaaaagcacagtatttgggcaggagtgtaccacttctccaggtgcagttactcacagcttcccttggctaggaaagggaaatcccccgaccccttgtgcttcccaggtgaggcgatgccccgccctgcttcagcgcaccctccatgggctgcacccactgtccatccagtcccaatgagatgaaccaggtacctcagttggaaatgcagagatcacccgtcttctgcgtcgatctcgctgggagctgtagacaagagctgttcctattcagccatcttgggagcgaccggtcagctcagtactttatgtaaatcaacttatggtcctggagcttataaaggtcacagttacagcataaagtcagctataacactgctcttcagtacaaacaaaccaaaccctgagctatatattaataaagtttcttctgtgttcaggctgatattttcacatttactagttagggtgcagtctaaaactgctataaaaagagatgtaaaaactctgtagcttaaacaatgtaaaattttatttctctcatgtaacatttcagaggtaggagatggtcagctgagaagacagttctaccattctcatgtgtagttttcatctgtgtctaaggtggctgttctggcttttagcatttcattttcatccgtagcagcaggaaggagaggacaaagggctgataccttgcttactttgttttgcttgttaaacattttaacaacagccatgtaatttgggtagaactaagcccaccttccatcttcaagtatcatttgtattcatcttcctctcagcccttttatgatccatttggaacataaggcacatatgggaaaatgtagcaattataaagtgctcagctcaattaactagcacaaagtgaatgtgttggtgtaattgtcacccccctcaagaactataactttaccagctcttcagaagcccctcttgctgctgtaatactacactactccttcccataggaaaccattaaaacaattggtttttccagtttttaaactttatgttaatggaataatatatttgctcttttgtctctgatttcttycgttcagcattacagttgtgatatctatccaggttgttacatgtagcagtgattttattttttgtgtacaaataatccattttatgatacaccacaatgtatgtatgtattttacttttgataagatttgggttattttcattttggattgtcacgaacattcttctagatacctttgttgcacatgttacaagcattgctgttgaatatatacctggaaacaaagtatgtgaatggtcaatttagctaatgcctaacaatttctcaaagtggttgtactcatttatgctcccctcagaagtgtggagcagtttgtgtcactccacatcttccttcactcttaatattgccagtcttttacatgttagccattctgttgggtatgttgcaagtgtagtaattttatttccctgatgattgttaggagagcaccttttcatacattcattggcttctgggatgtccttttctatgaagtgcctattcaaggcctttacccatttttctgttggtttgtcttgatctgtgaaggttgtttatattatgtcagcacaaaccttttgccagttgtccatattgcagatatcttctcccactttctgtattgacttttcactcttattgggttttttggtgaacaaaagttcttaatataattctatgattcattactttcctttatgatttatgcttctttgtgtcctgtttaagaaatctttctctaccttaaagacttgaagatgttttctggttactgtctagaaactttgttactgtctttttcacattaagacctacaatccatctagaattgatttttatgtttagtatgagggttaagatttttttcccatatggatatgtttttgaccttgcaccatttattgaaaaggctgtctttcctactgctctataatgtcactcttgacataaatcaaatattcagataggcgtatctgtttctggactctatttcgttcatttttctgtctttacaccagtaccattaagtaaaattgtcatagttactgtagttacgatagcttttgttttcttaaacaattagtttgtagagatggggtcttactatgttgcccaggctggtcactcctggcctcaagtgatcctcctrtctcaacctcccagagtgctaggcgtgaaccaccatgcccagcaactgtagctttttaatccatattaatatctgggagattaatttctcccaatttttcttctttaggattgcctcaactcttcttggtcttttacaaatccatatacattttagatttcttagttctctgttaccttcatgtagatttgtttatattttattctttctttttaaaaacaagcacaatccagaattcacacttattacttccactcacatcctagtggccagaataattacatgactatgtctagctataagggaagcttgagaaataagtctttagcttgtggactattkgcccagctagagctgtcattgtggcaaaagagagaacagatactgaaagatagttagctttctgccacaccatttgagatccttttaaactggatgcagtctcacagtttttatccttcccctcctacctccattgtggctcactttatacattgaaccttctctggctttccccaattgcatcctcctacagcatgaagcataggttctgtagatggttctttctatgttcagtagacacataaatgtctgggaactacccaacccaaaggggcaatgaattgagtatacttatatgtgtgagtctaactagttctttcatacaacggctctgactattcctgtagcaagtgtttttgtggtatataattgaatcactgatatagaacatgcaaaaatacgtctgacgttctaactttgttagtggtagattttccctattttcttacttcaaaataacctgcaattttgtaagtttattgcaatgcaaataaggcacagaataggaaatacttttctaggcaggaaataggaagagaaaaacaatggaaaatattagagttgcagagcataatgtcctcaagtttcatccatgttgaagcatatatcaaaattttcttcctttttaaggctgaataatattccattcacatgtatgtgatatatacatacaagatgtatatgtatatatcacattttgtttatctgttcatccattagtggacacttgggttgcttccacgtcttggctattttgaatagtgctgttatgaacttgagtgtacatataaatcctagagatcttactttgttattttggatatatacccagaagtagaattgctggattatgtttgaattcgtttgttttttccctattgacgtgaaagttagagatctaactgaagttaaaaaataatttttttttcttttttttttycctcactcctttgcccaggctggagtgcagtggtgcgatctcggctcactgcaagctctgcctaccgggttcacaccattctcctgcctcagcctcccaagtagctgggactacaggcgcctgccaccacgcctggctaatttttttgcgtttttagtagagacggggtttcaccatgtgttagccaggatgatctcggtctcctgacctcatgatctgcccgcctcggccttccaaagtgctgggattacaggcgtgagccaccgcgccccagccccaaaaaatctttttaagagcagaattacaatgaatgaaattattttaaaaaactaactttgggctttttggattaattcactctttttttttttttaaggacttgagttgtttttatttgctattttctgtttatatttttgtgaattggtaggatattgccaagagtttcaaattccttaatcattctgttacatgggggaaattttaagtaatgtttcaggaattaaaaatttacttcagtagtaaagttgactttgaaatttaagcaagaattttgcaggtatyctgttttgaaatactactagactgtttatatagaaatgtcggagcagaggaagcttactcgattagaagtagactaagtctaggttctagttctactctcttaatattctaaccttggataggtcactttaactttctaagattcagtgttctcctccataggtggttatttatctacctacctcagagtgtgagaatgaaacgagataatgtttctgcgagtactttaagaatattaattcttctgttattttgaagcattagtaaacaaatttggtgatattatgattttgaaggatagcaggtaataaccttctttaataccataaccaattagaatggtagtttgcctcaaagtaatatacaccagagcctctttgtagtatctttgaaaagtattttaattcaactgaaagagagaaaaatgaggttaaggtacttcacttggctcatggtaacactaaactgaactgatggcatggaatcattggtctttatatatgcccctgggggaaaatgtttaaaaatagaaagttttacattccccctcaaaattgaaaaaaagcacattatgtcttataaatactcctctttgagtttaggttccttgaaagcagcaacctattatattccctctagtgcctagcgcttaagcatggtaaatgcttagtaaatattagttcagttgaactgaatatttatactcattcataattataagtaaaaagagagcctgtttgtcatgaaataacattccttccctcttcttgcttccactgtatcatcctaggtgcctatgcacaactgtcccctgacatagctactaccttgtacctaatctaaaaatttaattttgctatagtttctgcagactttccaattggagtctgaaccaagtgttgaaaatactacagtggagaatgaaaattcttatttaaggttatgacaaaatacatttgtggatgggcacagtggctcacacttgtaaatcctagcactttgggaggctgaggtgggaggattgcttgaggccagggatatttgagaccaccctgggcattgtagcaagactctgtagtcccagctacttgggaggctgaggtagggggtttgcttgaggctaggagtttgaggtttcagtaagctctgaatgtgccactgcactccagcctgggtgacagagcaagaccctgtctcaaaacaaataataatatagataatagttgtattatctgagcatgtttaagtaatgtttcactataaaaactataagatatttggtacatcatagaatttttcttcaaatgtgaattttacagctttttcatcctttttattgataggtcacctgtggagaatactatgtttacaactttccctgactaaatcttattttgttattttcagggtcagtgaagatatgaaattaactgactcagagctaggaaagctggcaaataatatccaggaattattatatagtgcctcagatatatgccatgatcgagctgtcaaatttctcatgtcaagagcaaaggtagctattttcataaagctttatatattttatacgtaataattttgaagatctggaattatgtctttgcttcctgtgttccccataatgcatattatatttttaacatttaataaagtcagtgttaccactgatgtggtctactagggagatrttgagatatgaagtaatctaaaataaataggagttattaaagcattattttcagataaatgattaaatgacattttgaaatatatgttaataactaatttgaaattaatgttgttttacatatatagtaagtctatatatgtatacctaaatatatgtagttaaacaagtttataataaaactccarcattgtgaaaattttatagtatgacctaaattcatttgaactactatattagttataaagggatcagaatcaaatttggacctcttaagcatttcatgctcaatttctgggtctgaagtattgggaaatattattaaaataaaaaatatatagattataataatygttaaactaacttggtttcataactcaatttggtgttacactaactctcatgatttttgtattaaaatttaggatggttttcttgagaagctaaattccatggaattcataacactttctagattaatggaaacattcattttagacaccgaacagatctgtggaagaaaaagcacgtcattacttggagcacttcagagccaagctattaagtttgtaaataggtttcatgaagagagaaaaaccaagctcaggtatcatcaccatgtccattctgttgtttgattttttcatttttctttgtgaaacacagttatgtttaaaagaggaaacctaattggccagtgaaaatgcctgataaaggtttttttaattaaaggcagattgtggaattaaaatcacatttcttggcttttcaaagtggagttagaatgtttacttctattaaagtacttatcaggaagatcctcagtaagttgacttttgttcccactcaaagttaagtaaattgtttcatcattctttttgattaggctgagatataaaaagggaactattttctaagtattggtcctgcttattaaagtgttcagcactttttaagtcttatgttctcactcagctcttcttccttttcttttaaaccaaggaagatggtattgaaatgttaaagtttaccttcttttctccttactgtggactagcctcctcttagacaatgagcgctggaagcaagcagatgttcctgcagaatttcaggatcttgttgattctctgtcagatgggaagattgctttacctgaaaaaaaatcaggaggtatgtgtattcattcacacattctctttcaattttatattgtttatttattttgtattaatgcttaatatttctttagttgacaatgcctatttcaaagctagaaccaatatttccagcttagtaaatacttgacaggaaaactatggtaatttataataattatttcaaatatttattgcgtgttataaccatatgccagacactggaccatgttctttacatgcattactccagttcattctcacaacgatctgtgatacaggtactattgtttctttgtgtaacagtgaggaggcttgaggcttagaagggttaaggaatttttatacaaatgatgagttgggatttgaaaccagctttatataatttcatagctatgttcttagctactataccgtattgtttacatacatgaattgagtaagcgctagttagcttctactttgtgtcctatattgagacagaattgagacagagatmacagctgtatttctgctttaaagaggctaagtctaatgaacaaaaccaaaaaatacataagcaatcacaagtaatgtagttacatgatagcgaaaatccaaacgtaaagaaagaaaaccatgaaggagacaaaaaaggaagaaccagagaggcagggagaaatctagaacatagaagtaaaatgatgagagagttttcatgtggaagagatggctgggaaatatttttgtaccctagttcaggtggagtcatcatgtgataataatgtaaatttatttataatagtcctataagatttacaattatgaaattcttgagtatttctaatagagaaggtagttgaactatttcagattttatgcatttaatcaaagttttaaattgtatacttcacattcgcacaaaatgcaactagactacaagagaaagacttgagtaaaacaccaacagtaaccattagtttgatacatagatcatttgcaatctcagtaattcagtggagtgatagtcaaattgcagttcagtgcttagtaactggaaaagtgaggaagggtagacaagtatagcctactttttcaacagatttggcatgcasgaaaagtgagtgatgaaatagtagctaaagaagttagagagagagggtgatttacagggcaaggtgcatggaatcgaatctagagtttaagagaaaggctactacttctgcccctgtgacaaggggaagagggttaaggacaagtataaaatagatgagttgatatagggcagagaaaaattgaaggaattaagtaaatttttgtcatatgacagtttttaataggtaatagtgttgggtggtagagttttctacttgatggtatgatattggcacaactaaagcattcaagtagcaagagctgatggaaaaataaaactctgaccactccaaatcactagtttaaaattataagacttatcactcatctagtctttcaagctatatttaattgacttccctctatgtgaggtgctgtgctagatgactaggatatgttttctgtccctgaacagctcatggtcttttgattccactgttaagcaaacagaatgatttctgaattaaaatcataaatgtggaataattgaattactcatgtgttttgtttgaaacatgaactacttattttcacttctttggaggatattgatggtaggaggtttcttttacataccttgcttcatctcagtctttgttttcctctctgaatagcataggtgtatgctattagaagtccattaacattttactagttcttttcaagttaaggatcctggattattacccatttatccatgataaattaattgggttactatccactcagctaggcattggggaaatgaagattaatggatagcagctaatattaattgagtgtttacttacactgttttgttctaagtattttacatgtgttatctcatttacaggtccatgagctagatattattagtattcctattttacaaatttagaaactaaggcacaaagaggttaagcaacttgtctaaggttacatagctaggaagtggtagagctgggattccaatccaggcagactgactttagggccatttctcttttctacgatgctatgccacttctctgtaatatagagaagtgatgaagacacagtccttaacctcaaaaaatatacttctgacwtacatagtaaattgtgattgcaatatatatagctctcaaatagtcaaatatatttacaaatcctaaagggatttgaagcttagggaagcataatgagctgcccatggtaatctaatcaatttggcgtgtccaggataaaatccagtccactgttcttttcacctcaatatgctgaattttgtttaaagaaatatcacatgctgaaaataaagtaacgtctgggttgaagtattaaaaattaaatatataatctttccatcaaatttagaaattaacttgtattctataatgataatagtaaagacaaccaatttaaatgctagttctgcctttccaaaactaataactttttaaaaaactatttgctgatcatttaccttgtgccagccctaagggataggcagtttgtgataattatttctaccattaacaacaaccctgaaagatattgttgttcacatttaatagatacagatagtgatactcaaagaggttaaataattgccccaaagtcatgtatccagtaattggtagtactggtactcaaatccaaatctctccaacttccagtatactttatttactgtgtgccaaatagtttcccaggaagtagatgtttattttcagaaatgagagtttttggccttaaacaggaattatcttcttcagctttttctctattttgtttcktctggtactcttgtctctcgtttatttgcttaactctgtagccacagaagaaaggaaaccagctgaagttcttattgtcgagggacaacagtatgcagttgttgggtgagtgacacatttttctttagtagttgagtcaactatttaaaacacaagtcttctagttctcccttgaagtgaattggaaattttggattaacagttttaacagtgttaaatttggattaactgttttaaatcctgcaaagaacttaraggaaactttatggatttctttatcttctctcttctgtagcatacattattaaggactgcactggcttaacacaaaaagcttgatttttctcatataacaagaaatctagacaacccaagagtaattgtagtggatccatgatattattgctatcccaggctctttctatcttttcttctgttgctttcttagaatgtattatagcataatagtttaagttgtgaactctggaacccacacaatgtggaaaatagtactatacacagaattattgcgaaaattaagtaattcatgtaaagcatttagcacaggtctagcacctaataagttgatagttgttggtagttattctcattggcatcatttgattcactagatcttttaccaataaaagtatctcaaattcaagttaactaagaagcatacaaattccatctttttttgtctagtactatgtcttttattaaattggtaattaaaatatatcttcatatgctttaacagtacttcacagcttaagtgttttcatatatatgtgatctcatttgatctttacaactacattgtaaaataaagatattggggattattctttcctttttccactatgagaattgaagcttagaagattaagtggttcaagtgacccaaatggagccagaattcaaatctaggtctaactgccaatatctagcccagcattctttttcacttttcttcttgtcaagtgttttttgaaatgaccaccacctccaggaagaatgtaattctatgttcctcaatcatggcacttaccgtagtataatagaattgtttatttatgtatatgtcttctaatttgactctgaattcctcaaaggtagagatgaggtcttaccgtttttatttttcttggcaccataataagcactcaaaaagtatgtatagaattaatcctttttctgtatctgtattyaaatacctgaagtccacacattctaaactaaagcctccattcttttctcttctgaagtccttccctgtttctggtagggaaagctttcttcagtcttcctgtaatcccatcccttcaatataattatgatttccctccttaactactggttatctggtcactcttcacttgcttgatggatatggtcccctctggccatcttgcttttggctctttaggcagagagtctgttgccaaaaaactaaattccctggctaaaggggaactattacaacttctgagagacaattacaaaagataagcaatggactcatgctcatttaggcagactctaggagaaataagcatagagaccagtatgcatatatggtctgacaaggtgttataaaggctagacaccatctttcttgaatcattagttcctgatatctttcaggctcttataaatccttattttacgtagatcttatttctgagcatgtcattgaacttagatatcctatgatgaatggctttctccttaatttcaatcttctttaacttcccagtagtgtgtctttttaacgtgtgatttgtccttctatggaggtgataactttatcatcttcggaaaactttttttttttttttttttttttttttgagacggagctttgctcttgttgcccaggctggagtgccatggcatgatctcagctcaccacaacctccggctcccaggttcaaacgattctcctgcctcagcctccccagtagctgggattacagatgtgcagcaccacgcccagctaattttgaatttttaatagagacagggtttctccactgtcaggctggtcttctccattgtcaggctggtctcgaactcccgacctccagtgatctgcctgccttggcctcccaaagtgctgggattacaggtgtgagccaccgcgcccagccagagaaccttttgtgacctaccaataaaattcttaggagacatgttttccttagaagccattatagattttttttttttccatctcactaagaaaatctggactaggttttcttcatcaattcattagttatgatggaggacctactatgttggtaatcagaaacactggataggctttttgtcagtgtttctgaattggctaatgaatgcaatacctgtcttactgaagcgactcccttacttaataagaatgccatacagagagtattatgcctgttgtacagaatttaaggagccactcattctcagtgttgtgcaagctgatcctgcaattgcacagagtaagagcctctttaaattttgcattctagacacctctcttgtcttgtgttagtcaagaacctgctgtactagtaggtaaaatgcatactttaacatagttaccaaggkcattatattctcagagatcctttgtgccattaagtaatttgatttttatatgccaaatccttttgatttttcttgttttgatttcctattgggccatttttcttttcttgtagaaccgtattgctgttaataagaattatccttgaatattgccagtgtgtggataacatcccatctgttactactgacatgcttactcgtctgtcagatttattgaaggtatgtatgacttcactccattatggaaaaatttttcgaggaattaatacattagggtgtgactaatcttaactcaaagacatttcaaggtcaaattaactttaagacattagttttataacatttgattgtggttgaatcacaacatgttattggaaacaggctgcctgcttccttcttactccacagttagtgatcctcattcacccatagagttgttaatgacattggagacaggagatgatttgttcgttaggtgctgaacatgactgaggccacttaggtcaaaaaacctggactggcttcaaatgtgcatggaaggaattcactgaactttacaaaattcatctcactaaggttagagatttttcttgcatcattctttcagaaccattgatataaaatgaaaatgtgatgattttattcagccatttcatattgagatattttaaactaccagtacggaggaaatgctttattatttttttcaaacctctaatctgttaattatgttctgacttgagttgtcatgttttagccaagacagatttttataacttttgaaaataggacttcccaacaagaatgactgaaaccgaatttgttttgtacatgcaaattaaagattaatttctgcgaactgatttttagaatttttcaacttttttcttatcagtaaatattatcatttagaatctccccttctcatttctttttcattaaataaatagatactaattgcttctactagataattcatttggccattgaatgagaggaaaggggaatgtatttttataatagyacattgccaggatataaagaacagtttttagtaaattttggggtttttttctccttcttttgttagtacttcaattcaagaagttgccagttagttcttggagctggtgcactgcaagttgttggactaaaaacgataactacaaaaaatttgggtatggattcttgcgtttaattcacttgctgaagtgttaacagtgatgtcactgtwctcatcatgtttttttatacctcatgttttcatggctctaaccaaagtggcattactctaaaaataaatgctacttactcttttatgtatactcatcactgaaaaaaactaaccatggggaaaaggttacgatgcatttcccctccaagtataagttacttggaagttacaccactctagaaaatattaagatataatgtgtataaagtatttgggggtgaaagctatctgaatgtcataagagaatcagttgtcttgttattgtgatactgataatactcacaacttgagtcctttgtgaaagcagcatgttcattacattattcagtatcaaattattagacaaaatgaaatatgttgccttctgccatagggctcttcgtttatgaaataaactggwtctttataagtgatgttttttatttgatttgatttgtaattaaaatcaactaatacctttttttttwttatttctccattatatatctactccctggatcttcagctctttcttcacgatgtttgcagttaattgtgcactacattcctgtgatccgggctcattttgaagctcgactaccacctaagcaatatagcatgcttaggcattttgatcatatcactaaggtactttttcatatattttctattggcgtttcataagtttagatccttaattgttaagtattttaaaaatgtgtcccagggacttaaaaatacaattatcatttctcattgcaggactaccatgatcacatagctgaaatatcagctaagcttgtagcgataatggatagcttatttgacaagctgttatctaaggtaatgatttatagaaattattagactttgttcaaagacattatgattttctattttataaggagtactttataaattaagatgtgaaaagataatctaaactttcataggatatttaccaattagtagaattttaaattttttttcaggaaaatgtgaccatgtgctgtgaccaagaccccccatagtggtctaacctgcagttatctaacaaattattcagggtttagaaaacaactcaacaaaattttcggatttccaaaacagttgatattctaaggggctggcaggagtaggagagatgattctaaggatggtagaaatcctatgcagaagtatttttatgttaattcatttcaacattcatttcttgtttgtttttcattcccaatatgtcattaaatgaagcagtgttccccaaagaattcgcagttatactgggagagtatcttcagaaaaatatcatttagtcagccccaatcacgcttgatctatctttcactgtttactttccctaagtttttcaattcacgtcttagtgggaaagccaaaatttcgtaacttgaaagtctgaaagtttactcagtgtatactgtctgtccaagatcatatttggaataaccttaatagcaaagaactttgatttgctttttatcctacttgcatccttcagattccgaaatggcaggaacagcaggtacataagaatcaaaagggcaagataaagtggtgtccattcactcacacacaagactacccaaacacatattctattagccttcagaataatgatatcacaagtcatctaaaaatccccactgttcaatcatgagagaatgagagtaaaatagataaatagcatcttattaataatattattatgaaagcggcttttacttcccagattcctggaaagggtctctgacttctgggaatccccagactacactacacctctggtgtagttggtaatacaggtgttttatgcttcacttttaagaagcttaaggaatttgtatttatgtacaaacatacctatactatgttatgcctatttaaattagtttctagttgtgaagggagaaaaattactgtttagagatgctttattttcttcackggtgccaagtacaagctacattcaaaagcaattctattctaccagtttcctttttgatatacagcattcttctgtgtaccaaaagtcggtaacatattgtgtctgctctcaagaagcttaccatctaacaaggttagaagactgtaaacagctaacagtggagaatagaatatatgttaaatagtggaactaggctgggaatagtggaactatgcttgagtccaggagttccagcctgcagtgagctgtgatcaccccactgcactccagtctaggtgacagagcaagacccggtctctaaaacaaacaaacaaaaatagtggaacaattaataggctgtggaatacaatgaagaaaaaccaaagatgtgctagtactcttaaaactctgactttagtctgtcactttggtcatccacagagtttttgaataagaattgtcacagtgactagactttttcctatgacaacttactttttttttctgtaaagaaaaaagagaattgtttaattaacttcccatgtatgcatsacctatattcgttattaacaatttgccttttttgctaaaatattttataataaatttgaggcattatggtattttatccctaaatacctaagtatgcatttttaaaaactaagaacatttttacataaccacactattatcacacctaacaaaattgataattcctcaaaatcatctaatatttattctcctatttgaaacttattaattgtcccaaaaatgtctttttataataatttgtttggacaaaggcttctacacggttcacagattgcatttggttattacgtctcttaagtcttataaactagaacacgcccctcctcatttaaaaaaatatatatcattgacccgttgaagaatatggccaggcttttataacataatgttctctctagtatcttctccattgatgacttttcctattactctggcatattacattcttcctgtgttaacaagtctctctttgccactccctattctgtttgctttcatgtgttgctcaggagtttgaccctgtttttaattaatatcaaaatagcagacagtgtttggtttgggtttgcctttcagtttttaacctttcatgttctaatctgaaaatataattttaggaaaggatgacacaataacatatgggttgattctaagaagctaataagtggccaggcacggtggctcaagcctgtaatcccagcacttttgggaggctgaggcaggtggatcacctgaggtcaggagttcaagaccagcttggccaatatggtgaaaccctgtctctaccaaaaatacaaaaaaattagccaggcgtggtggtgggcacctgtaatcccagctactcgggaggctgaggcaggagagttgcttgaactcaggaagcagaggttgcagtgagccgagatggcaccattgcactccagcctaggcaacaagagtgaaactctgtctcaaaaaaaaaaaaaaaaccaaaaacggccaggcgaggtcgcttacgtctataatcccagcactttgggaggccgaggtgggtggatcgtgaggtcaggagttcaagaccagcctggccaagatggttaaaccctgtctctactaaaaatacaaaaattagccgggcatggtagtgggtgcttgtaatcccagctacccggaggctatggcagagaattgcttgaacccacgaggcggaggttgcagtgagccaagatcacgccactgcactccagcctaggtgacagagtgagactccatctcaaaaaaaaaaaaaaaaaaaaaaaaaaggcagctaataagtaagggtaccattgcctgggtaggatgaaacaatatctaattgtactaacagctagactaatgttccaaccaccattcatttattcattcattctgtaagttatgtattaatataaactgttttgttcagtatcagggatacacaagggtgaataagcctttgatcttgtcctccaatagcaaaatatttgtcagggaagtacatcaataactatgacaggatgtaggatatatgtaaagtgttacaaataaggagctaatttagtgctggagcttttaaggctttggaagagatggtgtcagctggtgaaggagatctgggaaagttttatgaatgaggcatgcatgtaaattttgcttttaaggatagataagatgagggcaaatgaagttgaggagaacagatctctgagataacagcataagcaaacatgttggtagaaattttaaggcaattcattgtcakggttttggagtcaggtagacctaaattcaaatcccatgtctgtcacatactagctattgaaggaccttgggcaaattattaatctccttaagcctcagtttctgcctctaaagaggataatagtggagcctacttcatacagttgtattaatgagataatatatgtggattgctttccttttatcatgtatctgactatagcaagttctagtaaatattgactgctaatgcttttgctgttgctgttactaataataaaggtaatagttccatttggctaatgcatcagagtgggcacacatgagtgggagatatggtggaaagataatagagcgctgtgactaccagtagaaaactaagcaattcatatcaggtttattgaggtataatttacagtcagtaaaattcaccttttctaagtgtatgtatactatctgtatctaaatacagatagtataactgcaagttatagaacatcattggtaagcattctcttgggcacttttgtagtcagttcactccccatactcagcctctgaaagctactgatctgatatttgtccatgtagttttgccttttccagaatatcctctaagtagaattatacagaatgtagtctactgtgccacacttcatttaacataatgtttttggagttcatggatgttacagcatgtgtcagtggtttgttccgttttattatagagtagtattcattgtatggattcactgctatttgtttatccattcaccaattgatagacatttgaattttctccagtttttggctgttatgaagaaagctgttataagcttacatgtacagtctttgtgtaggtatgtgtttacatttctttagtataaataccttggaataagattggcaattgtggattatggaaatataaaattttatggtaactttataagaaactgcaaaatttttctaaaattttctaaaaygcatcattttgcctttttacttgccatgtagaagagttccaggtgctcttcaccatcactttattttttaatgttcgtcctcttgtaggtgtgtatggagtgatactcattgtggttttaagttacataattacagatatgttaagcatcttttcatgtgcttgtttgccattcatatctttggtaaagtgtctgctcagatttcttgctyatttaaaaatattaggttgtttgtcttataagwgttccttatatatcttagatacaaattctgtatcagtatgtggtttctaagtattttctcccagtttgtggcttgtcttctcctttcatgaacagtgtcttagagcaatttttgattttgatgaaattcagtttatttatttattttctgttcatgctgcttgtgtcctatcctgagaaatcttttcttttcttttttttttttttttgagatggagtttctctcttgttgcccaggctggagtgcaatggcgcgatctcagctcaccgcaacctccgcctcccgggttcatgctattcttctgcctcagcctcttgagtaactgggattaygggcatgcaccaccacgcccagctaattttatatttttaatagagacgaggtttctccatgttggtcaggctggtctcaaactcccgacctcaggtgatctgcccacctcggcctcccaaagtgctgggattacaggcatgagccactgcgtccggccaagaaatctttgtataacccaagttacaaagatattctccaattttttttctagaatgttattgttttaggttttatatttaaggctatgattcatttctagttgatatttatatataatgcaaagtataagtcagtgttcatttttcatagttccagcaccttttgttaaaaagactatcatttctccactggcacctttgttaaaaatcaactgtttttgtttggttttgagattatattctgttccagtaccacactgtcttagctactccagcattattgtaaatcttgaaataagataatgtgagctcactaattttgttctttttcaaaattgttttggctattctaggtccttagcttttccctataaaattttatatcagcttatcaaatactaccaaaaaggctgctcagattttgattgaaattgcgttgaatgtatagatcagttggggtgaaattgacattattgggtctcctgatccacaaacaaggtatatccagttttgtaccagagccagaytgcacctgctagccagaaactatgttgtgtatctcttcccaatactacattcagtaacagcacactggtaactttgccagtggtgtgaatatttacaccatggaaattaacaaatactacaaaccagtgcttttcccccagtgagcccattaaatgtttaccacacaccactggacctatctctttactccttacatctttaatttctttgatcaaaattttgtatttttcagtaaacagataatgcacacattttataagtatttcttcatttttgatgctattgtacatggtatctttttttaagatttacgtttccaattattcaatgctaatatattgaaacaccttggatttttctatattaactttgtgtcctgcatccttgctaaactcacatattagttacaatgccaattttgtagattctttgggatttttctgcatacacactcatgttgtctgcaaatagaatcttgcatctttttcaatctgtataccttttatttcttttccttgctttatggcactggctaggactttcagcacaacgttgaataaaattggtgaaaacagatatgcttggtttctccagtcttgggacaaaatgttcagtctttaaccattaagtatgatgttagctgtaggttttttttaagaggcctttatcaggttaaggaagattctttctgttcaagtttgctaagaggtttatatgatgaacagatgttgaattttgtcaaatactttttgtgcatctgttgagatgatcatatggtctgcatttcttagtctgaagaaattaatttctaaatttctaaatattttaggattgcctttaggattgccaaggtgaattaccttcattgattttttaaggttgagccaaccttgcattcataggataaacctacttaaggatttttttgtgtggtggaggggtattatgaaggatattggtctatagggttatttgttttgttttgaagtgcctatttgattttggtatcagagtaatactggactcataaaatgagttggacagtattcttcctcctatatttcctggaagaagaatttgtggggagttggtattattttttccccaagttttaggttagaatttacccgtaaagccatttggtctttgttcttactttacaggcaggtttttaataagttcattaaaaaaaaaatacatataggactatgtgggtaatctacttgagtacactttggaagtttgtttctttgaatggatttatctatttcatctgttattaacttggaagcattaacttgtatatgatattcttttattcttttaatgtcagtgaggatctgtattatctgctgtttctttcatgatattggtaatgatgttaatttataaagtcttcctcacctccccctttctggctagaagtttatcacatgttttgatcttttagtaaaagtaaatatttcctgctctttttctgctttttattttcctgctccagtctgtgttatttattttctattttcttttaacttgctttggatttaatttgctgttttctaatttctcaaggtagaagcccagatttttgatttgagacctttcttttccttttttgaatataagcatttgataatctgtgttttcctttatgtactgcttttgctgtgtcctgcaaattttgatactttgtgcttttatttttatttatttcaaaatattttctaattgctcttgtgattcttctttggccttgggttatttggaaatctgttacttaatttctaaatattctaggatttttccagcaatctttgttttgatctcaagtctaattctgttttggtcagcaaacagactttatgtgactccagttattttatgtctaagatttcttttgtggcccagaatgtggccaaagaatatcttggctaatgttccacatgcacatgaaaacaatgtgtattttgctgttgctgggtagagtgtcctgtgtatatcaactaagtggtgttggttggtagtgttatttaggtcttttctgtccttactgattttctgtctacttcttatatcaattactgagagatgagcactgaagttttttactgtaattgtaaatttgtctgtttttgtgttcagatctttgcaagtttttgttatatgtatcttgaagttctattgctggatacatgcacatttaggattactgtgttttcttaatatttattttgtgatctcccttttttttttttttttttttttttttgagaccaagtcttgctctgttgcctgggctggagtgcagtggtgcaatcttggctcactgcaacctatgcctcccaggttcaagtgattctcctgcctcagcctcctgagtaagtgggattacaggtgcctgccaccacgcccagctaatttttgtatttttagtagatgtgcggtttcaccatgttggccaggctggtctcaattcctgacctcaagtgatccgcccacctcggccttccaaagtgctgggattacaggcgtgagccaccacgtccggcctgtgatatcctttttatggctggttatgttcctttttttgaagtgcatattatctaatacaaatgtaaccattccaatttttttgaatagtgtttttatagtgtttctcttactatccttgtgtttttaacatatctatgccttatttaaagttagtttcttatacccagaatgaagctggatcttgcttttttcccttagtctgacaattactgtctttcattgacctattaaaccatttaaattgtttttatatagttagatttaaatctgtcatcttgctagctgtcttctgtttgttccttctgttctttgactgattttccycttttttcagattaaatgttttttatagttttattttgtttaatctttaaagttggtgtactagctatatttctgtttgtttctagtggctgctctagggattataacatacatctttcagtttacctttaaataatatgacattacttccctgattgtgtaagaactttatgacaggatacctgttttctctctctcctgctgtgtgctattattgtcatacattttacttctacgtattttataaaacctgtgataccttgccactgtttttgctttagattatcagttatcttttaaagtgataaaaatgaggaaaacaatgccttttatatttatcctcatttttatgaaaaaatgaggataaatttttggagttcttcattactttgcttggatccatccgataccatactgcctgaaaacattccactcatatttcttgtgaatgtatctgccagcaatgaatcatctcagtttttgtttgaaaaagcctgtattttctcttcacttttcaaagatatttttgctagatgtagaattcagttcagttgtcttctggctcgcatagttttcaacaagaagtctgctgtaattcattgttttttgctctatttgccttcaaaatattgtctttgattttcagcagtttcactatgatgtgtctaagttctgtgtgtttttgatcatgcttgagtttcttctgcacttcttggacctgttgtgtgtttccytttttatagtttcaatttctctcttgagatttcggtttcattagatcctttaacatgttaatcagttattttatttttgttatgttatgttgtgttatgttatgttatgttatgttgttatgttattttttgagacagtctcactctttcgcccaggctggagcacagttgcatgatctcagctcactgtgacctccacctcctgagtttaagcaattctcaggtctcagcctctggagtagctgggattataggcatgcaccaccacacccagctaattttcatatttttagtagagatggggttttgccatgttggccaggctggtctgaactcctgacttcaggtgatccacccgcctcagcctcccaaagtggtgggaatacaggcttgagccactgtgcccggcctaatcagttatttttatatctccctctaatcgtttcaacatctggattctctctcagtctggttctgttggttgctttatttcttgacagtgggatattgttttcttttttgtatattttgttttttttttaattaaatgctgaaccttgtatgtagaagaacagtagagactgtgaggtaaatagtgtttatgcatggaaatggacatgcctcttctgtcaggctatgtttgttatggtttgaatcaagttattcaataaccaagctaggtgtctgttttgttgttgctgctgttacccttagtatgccagaggcttccaactccttcagtagtaggctgctactaccttgtgtttaatgtagggcctgaggtgttgttagagggtttttctcagtgttggtttcaccctcatcttttagtcatctctgtacatctccactacagaataggagtctttctccagactctcattgctaggctcttaagggtaataggggaaatgcttgttcttcttgtctggtctccatcttaggtagagcctgtatccctggccttgaatgtggagcccatacttctgctctcaacttctgctggtgcaagatcctgggcttcaggtgtttttgtccctttcttcagcagcaggcatgttttttcattttgttttattttgagacggagttttgctcttgtctcccaggctggagtgcaatggtgtgatctcagctcactgcaacttctgcctcccgggttcaagcaattctgctgcctcagccttccaagtagctaggattacaggcatgcaccaccatgcccagctaattttgtatttttagtagagacagggttttaccatgttggccaggctggtctcaaactcctgacctcaggtgatccaccctccttggtctcccaaagtgctggaattacaggcatgagccaccatgcccggcccaggagcaggcatgttttgttcctggcttcacaccgtgaccccagtggtgagagtttggtgccccttctcagtgacttaggccttttactttgtatgagaatagggtttgggggaaatggatgatggcatttgtttctatttccttgtggcaactaatcacctcctgaatacctgtgctactgggagtggatctatatgatcttctccctttgatcctcctgtttcttctgagtacctcctggaggccgtgaagtaaaacttgtgcatgagtgcaractctccttatggctagggttttcagttatcctaaatatatcctagcccacgtttggcctttaagaatttgttaaaattttacttattttcatcttacttgcttctcttgtggttacctcttctttttatgctctgccaaaagtgagacagttcctgtgtatcacctctcctcagagggccttttcagtctttggaattagttcccctgatctctgttctctgatgtatggtcttacagattatctgttttttgtattgttaaggtagtagcaatgttctattgcagctttctaaattttaaataaaagtagaaccgaaaagttttttaatgaattaatcatacgattagaatggtactttagaagtattaatcagatagtgtataaaacggatttgaggtcggacgtggtggcacacgcctgtaatcccagcactttgggaggccgaggctggtggatcacgaggtcaggagatcaagaccatcctggccaacatggtgaaaccctgtctctactaaaaacaaaaaattacctgggcggggtggcaagtacctgtagtcccagctactcgggaggctgaggcaggagaatcacttgaacctgggaggcagaggttgcartgagctgagattgcaccactgcactccagcttgtcatcagagtgagactctgtctcaaaaaatcaaaaaaaacaaacaaaaaaaaccagatttgagatgatatggcctgtcctctacctggaatattttcacctgtttattttccctttgaagactgaacacctcaggtgggcagctcgggaagccattagacatcattatgtaaatatccttcacttgagttcctatagcgttccttgtccactttttggaacaccaaccagcttttagacagttatctccccaaagggagatatagtatttagcccaaatttgtcttataaataaaacggtatataacttcagctgtgtgaattctaaaatataagctaaaagatggcttttaaagtcatactaccatattgtttcatatgtaagaatagtaaaatgaatttacctaagtttaaatttttagcacagaacattgctgaaaaaaatcctccttttaatgttagggtaaaatattactatattgacccacctacaaaataaaaaacatatttattctgccagatttttctgttgatttcagatacgatcatactgacacattcttttttttttttttttttttttttgagacagagtttcactcttgtcgcccaggctggagtgcagtggtgcgatcttggctcactgcaacctgcacctcccaggtccaagcaattctcctgtctcagcctcctgagtagctgggattgcaggtgcctgccaccatgccccagctaatttttaaattgtttaaaacgtaatctgtttatttggagtggctatattgtatattgagccagattagtagctaacaattttttgagtacttactttgtatcaagcactgtcttgctttcttatgagtcctcttttttaatcctcacagcagccctttgggatagataaattaaataacttgcccaacatcacctagcttagaatgggaggagctgggatctgaacccagcagtctgttctaagattggaagcaggctttgttcttagtcactgagctattttagttccttcaaagtgaattaagatgttgaatgaaaagttctcaagatttgtatgagtagcgcagatcacagttgaaaagtgtaagcttaagtactatgccagaattggatatgtggagggacagtaaatatatgtctcagggaatgktggagacatyatgcaattcagaggacatgaacataattctcattattttttcctaccagtatgaagtgaaggctcctgttccttctgcctgtttcaggaatatttgtaagcaaatgacaaaaatgcacgaagctatatttgatctccttccagaagaacaaacacaggtgagaagtaattcctaaaactattcatgtatatrtaacatacaatatctgtacagaattggggtgtttttacatgcttttggcagttaagctgttcatgttccaatatgattatcatttttttacattgttataytgactggtagaacatggataaaaatttctaatttctaagtgctccttgcagtgacagaccagagctagagctttactatattataaacaattctaaaaagtaggttttccatttgtccatgatcagtagtcccagattctgcttacatcatttattacgctgttcttggaaaattagagttggcctttatcaatgagtagcaaaatatgttacggtgattgtaattcaaattggatatggaaagaattagtgatagagttaataagattaacacatataattaactcaatctgctttattgttatgtcagcataagagatctgtagtaaagacaaactaggaaaaagagcaaaatggagggtgggggagtctttgacacctctcagctatgaagtatccacccttctatcgctactgtattcccttacaaaagtattatcacagagttctcttcactcctcagtaacagctctacccgctacagccctgttgcgctctcctggaactttgaagttttcagtattcccttttttaccagttttgtttttttttttaatctcagcttatttcctctgaactaagtgtgcctggtttgtagaataaatggtataatattaaagtctagttgctgtatgactaatgaatttaactttcactgagatttctgctattcagacaagtttgtttatttcagtttgtctctcttacttggttgagtgcgtggaaatggtatttgggagcagagggtggctttcttagtgtctcttgcctactgttggtcctgctggtctcctttcctatgctacctcaaacttccatcctatactagctgttaacattttcttcgtacttccctaggttttcataaatcataccaaactcatgaataaatatcatgtaactcctttgggactcactgaggactgaaggggagccgtaaaatacgacgtacccactagggtcgtctcctttttccttctaatttcttcttagccaagccatcctttccattccacatgtaagatcctccacctctgacattctaaccttctggatttgccatctgagttctaattctagagcaggacttacccaggtcagggagctgggcatacaggtacttcatgtgttttatctgtggcgtaatttaaagggtactcttgtcaatgctgggcaaatgttattttatgtcactattgccacttgaatactagtaattccacaaaacttccatagattattatatatatttttcccacagraaatgttatttcacaaaatcatttcataatttcattgtatataattttaggttaggtatttcccaaagaaatattgggtcattgcatgcaagaacaataaaatgctttgaagtgatttcactagattagaagtacgaaggtatctttgcctctatcattatgacattttttcccctaccaacttcctacttactatgttacaaaattccccactactttttattatttttacctgtcacagttgatcccacttacgggaatttttccaaaaaggagtactgctaaggagggtaaaaaggtttttccaactaaggagraaaaatgtagtgaaatagcaatagaatactttcagaggaggattttaaaagtatatgtcaaagcaaaggttttggtttttaaaaatactttctctaaataatattgataactcagatatcttctatttcagtagaactttaagaaacttagttttatttctttttcagatkttatttttaagaattaatgcaagttataaactccacttgaaaaagcagttatctcacttaaatgtgataaatgatggaggacctcaaaatgggtatgttttttaacgttttcaccatatactcccatatcgaattgttttaatgatcagttttgattatttgtgccatccttttctgctgtaatcacactgaagaccaacgttgtaaaatcagcaagcttttgtgttttttttttcccctgtggaaatatctgtttctatctaactatctaaaaggggtttatacatggacaattgcttacctgacgttatgtatctgttttgaggcagtgtgaattagtagcacttccttagttacccaatagctttccctattccaaacaggattcagaagtcctactgtgtgaccatgtgaatgtcacttaacctgtgtgccacatttataaaataacaaggatgaaatctgtcttaattctttcacagggttatgaaaaataatatatgtgtgtatatgtatatattttattgtaagctattgaaagattgtatatattactgtaaaatagcatagtacatagaaagcatagggtaggacttagaatctgaaaacttgggttaagttctagttctgtcacttactagctgttgtaactttgggcaaatcacttactccccctmagcttaggttttttagatttgaaaatagggatgatgataaaagtttccttaataggattttttgaagagttatgtagataaagatatggggaagagattttataaaatttaaagcactgatcatttagttacgtattaatatcaattctttagtgttctagggtttttaggaataaaattttatttcctgttaaaggaatttcaggctcaaatttcaaacttataagaacaaatggaaaatgaaaaaaatgtatgttggggtcagaagttggccctgccatttaagaagaagtacagtgaatcaattttgcaaagagctatgtgaaagcttcattctgttgaatctgttaggctgaatttaagagttttatgcaagaatgatagtcttattatctgattcttctttttctttttaaagaattatttgttttcaaaaatttcaaagccatggaacacttaaaggacaataatgaacactgaatagcttttacctagatttatcaactgttaaaattttgccacatactctctgccacttttgctccttctccctcccacccccatacctcccttttgacaaacaaccaaaaaagtaggctgcagtcataaaatttaacccttaaatactttggcatgtgtctctaaaaacaaggacatttttatacaaccgtaatacctgaaccccacctaagaaaatcaacattaatagcgttataccaacatagagtcagatattttcagcaagaacatcacatgtggtgacgctgtgtatatctctcacttgatgtcagatgatacaaatggtacatacataagagacctgctcctgaaaagataatagcatattagaaacttaggagactcttggtagagatgtatactgggtaccttaaagaggctgttcaaaaaaagctaataatatttttaaggcctaaccctgctcatacccttttacttttattcccataactaaatctgggttggttagttgggtttttgtagaccagtagttctgaagcacccaagctaactcgttagctgttacttttctttcttaatatagctatttggaagtcagtctgaccttagagaatcctcactgtcacatgctaacagaaactcattctttataagtcaattcatgtctttgaaatatccctgaagattaacctctaccctgtagccaaggacataaactacctgcttaaaartttttgtttctgaaattgctctaaaaatgtagcttttgactttttttgaggtgaaattcacataacataaaattaactattttaaagtgaacaattcagtggcacttagtgtcttcacagtgatgcgtaaccgccacctctatctagttccaaacattttcactactccaaaagaaaatcctgtacccattaggcagctgcttcctatttctccctctccccagccctgtactttgattttattttgagatggagtatcactctgtcacacaggctggagcgcagtggcgtgatmtcagctcaytgcaacctccacctcccaggttcaagcaattctcctgcctcagcctcccaagtagctgggattacaggcacgtgccaccacgcctggctaatttttgtatttttagtagagacggttttaycatgttggccaggctggtcttaaactcctgacctcaggtgatctgcctgcctcggcctcccaaagtgctgggattataggtatgagccactgcacccggcccagctctgtactttttaatgtgattttttttcctctaagatattttaaaaatagacacatacagagaataataaattatttatatttctactacccagaattgatcaacatttgtcattttctcttgaaaaaaatatttattgtatttttaaaatggtattcaaaaaattgcattccagatgaagctaagtacacctttacaccccatctgcagtccgattccctttttctcccagcctttaggtaacatttccagtgaatttagtctacattcttttagtcttatttattgtacctagatttatgaaaaatatgtagtgctgttttgtaaatttacttatatggtatattgcatatatgcagcttgctttctactaggcatttttactgatttatctatgttgatatatgtttagtagtctgtttttgactgctgtacagtattccatcaaacaaccttttttttttttttggagacagggtctcatggtcacacaggctggagggcagtggtgtgatcatggctcactgcagcctcaacctccgtggctcaagcaatcctcccactgcagactccccaataactgcgactacaggtgtgtggcaccacacccagctaatttttttaattttttgtagagacgaggtctcactatgttgcccaggctggtcttaaactcctgagctcaggtgatcctcctgcctcagcctccccaagtgctgggattacaggtgtgagccactgctcctggccatgaatcagccatagataaattagacatttcccctagtgataaattgctaagtcattacttttttccattataaccatgccatactgaagatctttatacatgtctaatggtgtgaccatttcttcagggcatatacctataagtgaattggagctaatacacttttcatattgttaggtattgacagtggctgtaccaactcccacattagtggagtagtttgtgagaatttgtttcccacatcttttcaacatttgctgttagatttcctaattgttgctagtctgatgggggatagtagtaccttgttttgatttgcattttcctgacgtttaccattttttcagtttattggttattcaggtgttttcatctgtgacttcttatgttctttcctatttttctcttgggtttttaaagaaatatccagtatcgcttatatacatgaatactagtctgtatttaacgccttagatgacacttagaaacctagcctgcttttcccttgagtttactattttagtcagcactcccatactctagtgctaaccaatcaaaaacattttagtttagcctgttattttctctgtatattaattcatgctgtttcaagataaatctgattttcttgggctgaatttatcatgaaactgactctaacagccattggtttattcattttccaaatatttattattgaagtacagcattaaatggcctacttattcatagcaggaatcctgctaagtaaagtatttggacacttgggcactaagaaatctgaattttagataataggactctgactcggtgagcactgttactttaattatctgaatagaaagtttgagatttaaaaaataattttctctccattatttaggttggtcacagcagatgtagctttttacactggaaatcttcaagccttaaaaggccttaaagatttggacctaaatatggccgaaatttgggagcagaagaggtgatgtcatcctggaaaactgggtagttcatctgaccatgggatgtgtttgttatgaagaaaatctggatgcctgtgattcgagaattgaacctgaaacccaaagtgaactggggtgggggaagggaaaaaggaaagtatcaagtgttgggaaactggattcagtgggatctacaaggaatgtcatttttgtgcatcctacagtgaggagtaactgatcaggtgtctataacatttttcattctctctggaaacagactcaggtttctttggaccaaatccaaaagaacacatagctgtaacacagctgtagttgactagaatgctctgtatactttatattaaaaaatgctttgcatttcttccagtgcaatgaaattcatatggtgtcccaccttatttaatgatggtacaatttaaaatcttagtcaacttctgtagaaagttttctctatgaaagtaaagctgtttgaaaaattattatttttttacagatctttctataaaaaataaacatcttttgattgcttggatttaggaattcaatttttgtttcagtgaccaatgtcaagttgcaggctttgtgtgttgcatatttaatatttctactaccaccgtatgtcaactgggtaaagccttccagagctctctaaatacctgaaagacttaagcctttttttaagtaattaatacttaaaaaaaaaagatcctggcatctatttatgcaactaaatacttttcagaaatggtatataaaaggctacagtttaatatctgtatttttataaaagtatgatgaagggtttggggtgtttttatttgtagcagaggtaagaatatgtattcatataatctgcctacttttgagttctcatattaacatttagataacatatgaagtatggcccccttggatccttgtttttaagttactttcgatgtgtatacgaacaaagaccagggagaaacagaacttttaaaactataggctgctgtgttggggccagaaataaggtgacaagtaaagacttttataatacctaccttcaaaattagaatcagcagcactgtacaaataaagtgcctgtgcttcacctcacaccaagaatcttgcctaaccctgtcagagtgcctaatatcctgtggtgattatgtataatgaaacagtcttattttgtgctctttggtttcttaaaaggaaagcttgttttctttcctttatcattacagaggtatgtctttggttcttaaactatctgtctaaaataaagctgtaaaaaattaacagactttaaaaggcaacttttttttaagtggtatattgtgaactttaaacaagcagcctactcaaaacaagtatggatgaatttaaagaaaaggcataaattgaactaccagcagacctgaatggaaagattattaatgatcattttttcagtgataataaacaagcttcaggaaatgaagcttcagggaaagggaactttttatgaagctataccccctacctcactatagaagagtacaaggatgtgaagaaatgccttccctttgcccacccccgtcagctgggaaaataaatgccactttgtttcaataaatggagagtttgtggaaagcatggcaggcatcccagttttagaactagatgaaaggtaggtactaaagaaaataccttcagtttaattcctatggaaataatggtatgattaagattcttagaaatgccaaaaactggactcattaagtacacactggctaggtaactagccagtgtgtacttaaagggcaaatcttccaactaatatagtaactgtctaacaacaataaaccagtttatagttagcattataaagtaccagtgtacacaagtattgcttcactgctttatttttgaaatcacaagcaattcaaagtgatcatcattgaggcttctgttaaaagttcttccaaagttgcccagttttaagattaaacaatattgcactttaagatgaactaacttttgggattctcttcaaagaaggaaagtattgctccatctgtgcttttcttagactaaaagcatactgcagaaaactctattttaaaaatcaacactgcagggtacagtaacatagtaaagtacctgcctattttagaatcctagagaacatttcattgtaagaaactagcccattatttaagtgtccacagtatttttcatttcagtggtccaagatgcgaaggtttccagacacaatcttgttctctaatactgctccaggtgggatatcaattctgtcaccatgatttgcaatgatgataaccgttccctaagtgacagggaaaacaaaagagtgtacttgcaactgaaatgcaatttgattatcttacagtgatcaagtttatgtacaacttttttttttttacagtgaagtaactttttttataaacaatattaaacatgaaaaacaaataacagttaaggaaaattgtaatgtgtccttctgtaacaatcctggcagtagttctagattctctgtctccttgttagaggtagaactaagagcgggaagtggacccggtgccacagcatggccagccccttttggaggcctacttgcaaggccaccagcattatctaaccttcatagagaaattaaaaggtgcttggtttacatttacatatagggcttttgttgttgtttttataacagtttactgataagatttttcatgtcttaagtctttaggcagtctcagcaataaaattcaatatatgtatttgttttttcaagatcttcatttaagtaagtagctttaatgggaggagtatatgaaatctagttaggagattttttaaaaaattacatgatttggaaaaagctattgtatctttggtgagctttaatacttttatacccccgtttccctcctatttcttacgtgaggctggaatgacactgaagagtacctgagtactacaataatgtaaatgaatattcttacagtgataacattcctttaataggttatattcagtacaaattgtcattttttttctgcttttactcaatcatctttagtaagctaatgctaatagtgatcctattttaaagattctcatttcagtaaaataattacactagtaattaaggtggcactaagactaacaagtattccttaaagtaaatgtaaatttatgactagaaaatgagacctatattgtaagctgtaagaaatataattttcattgtaacaacatacctttaatgaaacattttttccaaatgtcacatctcctgaaactgtgaggtgatccaattcaagcatatctggtatactttcaaatcttcttagataatcttgaaccttacagaaaaggagaaacataaaaatttgtctcaaatgggttcaaagaaagacaggaaaaatattaacaagaaagtttaactgaactgtagaaaccttttttggcaaagctcaggtcctctgtgggaagcacctacttattaagcactcattatatgctaaatgccgtgcaggaaagaccaggagctacaaacattgtttttacaccaagcaatttacaagatagttgagcagatctaagggttttttttctttttttttttaaagataatcaacatgccaagagccagatgaatagttcacacaatctgaatttaactgaaaaaaagagatcatgctttgaagcaggctagactggagctggactttagtggataggtcggattctgaaaaattagagcacattttaggaagagcaacagcacaaattattatgttatcaccatctttgtctttttatttccttagatttacaagcactagagattgtcctatgtgaccccgtttcctattttgctgggaaaatgggagcaattagaaaacttccacttgtttccatccaccaccaccactactttgcccccattgcccattactctgccttcctagtactggaattggactgtttctattcctacttaaagccagcctctccatttgttcatcagatcccttcttacggcctatcaagtgttgtttcagcaactctccctcttcagtcttttttccctcctgactgcattcccattaatgtataaacatcctcccattaaaaaaaaacaaaaactcaaatcctatattcctttctacctatagccccatttctctgtttctctttaaggcaaaactcttgagttttcgatattcatatctccaattcctcgtttttcattctcttttaaatccatgcctgtgaggctcccaaacctccatactgataaatctaattctcatcttacttgaatcagcagcagcatttgacacatgatcaatcccacttgaaatattttcttcatttgactctgaggacacatgcattcatagtttctaattccccatctgcattctacacatccacagcaggtggcaccaaaccacacctgctgtggactaaaacagacttggatggcagagcaggaccccataggccaaccacaaaggctcacagtgtcacatttcattgattaaattttttggatttcacttatcaggctaggttggagttttacagcaggtccacagatagtgctgttttgttcaatgttactttgttataacgctgatgaggggaaaaaaaggattgccagccagggctactgtctgtgtggagtttgcacgttctccccacatctgtgtgggttttctccaactattctggtttcttcccacatcccaaagatgtgcatgttaggtgaactggtgtgtctacatggtcccagtatgagtgtggatatgtgtgagtgtgccctgagatgggatggcggcctgtgcagggttggctcctgccttgtgccctgagctgccgggataagctctggtcaccagtgaacctgaactggaataagtgagtcaagaattatcttgtttttattaatcaatgtatgtacagctcacatttatttcagagtttaatattagaagtgttttgtttttaaaatttggtgatatttttgtgaccagaaataaactgtaggaactgaactcttgtttatatcaattagcctatggcaaaatgtgttacacattgttctgcttactgtggcagtttccaagaacatactgatgacactgaggatgtactgtacttgctattccacctgtctagaacactttttgcactagataccgatttgtcagactcaatcaactcaatgaggctgcctgtggccactcaatgtaaaattacaccatcaacaccaccccgccacctccccaggcattccctattctccacccttgctttgtttctccatagcattttccaccacttggtatatcatacatttacttacttatcatcctttccccactagaatgtcaattccgtgaagacaaagatttagtctgttttgtttactgctaaatccctagaacctagaacactgcccagtacatgataggcattcaataagtatttgttaagccagaattaaccttttcccactgatgaaagcagtactggtcttggaagagacagaagataaaatgccccaaaatttaaagattattttctactctccatatggcaatcatgtttcaaatgtgaagtaaaatatttatcttctatggtcaattccctttaaaaggtatcaaagacagaggaatacaacaggtcagtggtagagactgtaattagtctccaattcacatgtatatcatatctttataattacacatttaagaaatatgaactcacatatctttatagttacgtaccttcgtaaaagaactgcctaatttaaccaagggcactgtaggaaattcccgcttttcactcattgtcagagatcctgcattaagactatagaggtttgacatcaccagcaagagatctgatgtggttttgacaggcagaaaacggctccttggcacattaatacctagagaattctcaaaacttttgatggcagcccctactgcagtttctaattgaatgacattcaggcctccatccaaagtctgtaagaaattaggggtggggaatagaaaacagaggttttaggcacctacaacttagttccatgtaggttagttaatatttgggaagtgatttcagagatccattgatggaaaaaaaaaaatttttttttttttttgagaaggagtcttgatctgtcacccaggctggagtgcagtggcgcaatctcggctcactgtagcctctgccctcctgggttcaagcaattcttatgcctcagcttcccgagtagctggaattataggcatgtgccacctacccagctagttttttgtatttttagtagagatggggtttcactatgttggccaggttggtcctggcctcaagtgatctgccggcctcggcctcccaaaatgctgggattacaggtataagccactgagcctggccagaaaaataattttgagaactgacatttatcaagcacctatcatatgccaaactcttaaacatgtaatcttttttcagtcttaaaactcttctgttcagtaatatcatttcatgataaaccataggttcagaaaactcatgcaaagtaccgatggccaaatgacctatgagtgtcagagcaacaactaagactgaagtaggttctctacttttgaagcccagtgtttttgccactaccacaacccagggtcaaatatagggcaccataacttggcacactagaggggtgacagcagattctggaagacagggctaggaactagagtctgaaaaggcaaaagggagtgaccaatggaatagatgggacagagggagtgggcgatggggtctgtgtgtagcctactatgaccttaggaaccaggaagctcaatgggccacaaccttggcttacctttgcattcacaatgatttccatgtcaatggcattttgctcctgcagtcttttaactgctgcaagagaaatccataggttgtttgtattaaatattttgaactttgatacagacttgaactcgtctacatgtgcttttggcacttgagcaatttccaccagtctcagtttgccttcatattgagtgagtgtcccgccctagaaaggcagaaaatagtgagtgcctccacatcagtctcaagtgcatttttttgtaaatacaaagatagtgattatacaaaaaatatataaatacattatgtagaaacagagtaaattttcataaaagggacaatgaaataacatttaaatgccaaactagaagagtattaaaggtttgg

SEQ ID NO: 97713 - DNA, 20870 bp, Homo sapiens
tcagatgaccatagagtttagaaggatagccctgtctatgatagaagctggagatgagtaaagatggtgtggacaagggtagtcagaaggctttttggaaggctttgaagggtgggtagacttgtgaaggacataaggcatgccaaggtggcctaagaaagagtatcagccaggcaaggtggctcacacctataatcgtagcactttggaagacagatcacgagcccaggagttcaagatcagcctgggcaacatggcgaaaccctgtttctacaaaaaatacaaaaattaaccaggcatgatggtgcatgcctgttgtctcagttactcaggaggctgagttgggaggatcacctgagcccaggaaggtcaaggctgcagtgagccatgatcatgccactgcactccagcctgggcagtagagtgagactctgtctcaaagaaaaagaaagagtaggctgggcgtggtggctcacgcctgtaatcccagcactttgggcggctgaggtgggtggatcatgaggtcaggagatcgagaccatcctggctaacacggtgaaacttcatctctactaaaaatacaaaaaattagctgggcgtggtggtgggcacctgtagtcccagctactcaggaagctgaggcaagagaatggcatgaacgcagggggggtggggcagagcttgcagtgagccaagattgcgccactgcactccagcctgggtgacagagtgagactccgtctcaaaaaaaaaaaaaaaacagtatcaaggtgagaccagccactgcactcagtagtgaaggatgactattgtgatttgtgaaaaatgaggctggagccagatcatggtgtccttgaatatcaagctgtctggactcaatgcaaaagccaatggagaagcactttacattttgaggaggaagtaacataatgcaagtgccatcttaggaagaggagcctggtggctgtgtgttgcctggatcaggaagaccagctggaggccagtttcagactctagaaggactggctttcggtggtgaccatgggaatggtagttgttcttacttattcaggtgtaggtcagagatgtgcattttggtgttataggtaaaatagagattatggatgtggctgcttatagccctgtttcaaaaggctgttttccactttagccagaggcaataagacagaaaaggtcgtcaatatgctctttttctttctccaaagaacaagatggtttgtatttgagtcacagcgtcccacccccaccagcccacccccaccccaccaaataaaaaaggaaaagcaaaagattgatttggcatttggtgcaacggccaggtgatcttgatagaatatgcctgtgtggggaatgtgtagcagttgcaaagtaaagagaaccctgtactttctgtcacaggaaatgttcaggctggagactatgtgctaatccatgcaggactgagtggtgtgggcacagctgctatccaactcacccggatggctggagctattcctctggtcacagctggctcccagaagaagcttcaaatggcagaaaagcttggagcagctgctggattcaattacaaaaaagaggatttctctgaagcaacgctgaaattcaccaaaggtaaacaactgcttctacagttcagcaggaatttaagagatgattaaataaaagccccaccagtctcaaagttgccagtgctgtgtatcagtcttacctctgctaagtgcacaacagctgccctggccaaattctagtactatggtatttgaccactggagacaggcagtcatatttaaatctaagatggtttccatgtgcattcttgcaagagataagattcatccacactttagaccatgcagacttggtctggaattatccagcaccttttcttcccaaccagccattccacacttagttaacaggaggcttggaggcagagaccagtttggagccagccatggtagggttgggtggtagcaccctaaatgagtaagtagatgtgcacacctctgtattccaaagccagacgtgtctatttttggctcatccctttccgtttctctttcttttttttttttgagatggagtctcactctgtcactgaggatggcgtgcagtggcttgatctcggctcgctgcaacctccgcctcccaggttcaagtgattctccagccttagcctcctgagtagctgagatcacaggcgcaccaccacgcccagctaatttttgtatttttagtagagacgggctttcactatgttggccaggctggtctcgaactcctgacctcaggtgatccacctgcctcagcctcccaaagtactgggattacaggcatgagccaccatgcctggcctccattttttatgtgagtagaaaaggagagatgaaaccaaagctagaaagcctatgattccaataacctagtgcggacacttcctaacttctatgtgaacaactagcctaggttgggcctcctgtattctgttctcaatcgtgcctgggtgtcagtgggactgtacttattttggcatgacaggagacgctaggtcatggtgccccatttccctcttgctgtagctaggcctcataaatggtgaacttcatacatgctatcatagagttctgctatctaaactccatttacaacagttcttcaagcagtgtttctaattccaacctatagatttaccacttgcatctgtatttatatccataatccccaaatataccatggtatcttatttagcaccaagctgactagcatcacaaatctgtttcctatggaaggtgctggagttaatcttattctagactgcataggcggatcctactgggagaagaacgtcaactgcctggctcttgatggtcgatgggttctctatggtctgatgggaggaggtgacatcaatgggcccctgttttcaaagctactttttaagcgaggaagtctgatcaccagtttgctgaggtctagggacaataaggtgagtgatgaatgaaaagaaaacatgtgatttaacccagaaaagtgtggttcatttacattaccccgagaaaggaagctctaccttagattacggaggttagtttctatgaagaaacctccccctctgaagataaagagggaacccgatttcagagaactgattcagattggttgatagaagcttcagtatcatgaaaagaagtgtagctgatacttcacaggttatctgaacattctaacagaatgaagaaagcactgactatattaggaagtatttcgagtagttccaagactttgttttcaaaggcagaattcatctcagtgtgctagaaagtctcttaggtgagtaaaaaaataagtaagccttggccttcaacagattataggttccatgccgggcacagtggcacttgcttgtagtcccagctacttggaaggctgaggcagaggattgcttgagtccaggagtttcaaggctgcagtgagctatgattgcacctgtgcatagccactgtaccccagcctgagcaacatagcaaaacctcatctcaaaaaaaaaaagattatatgctcctgaaatattccatctggcagtctagcaggtaccacctttgggaatgtttccaccatagggttttgcaccagctgagggacaggagagcttaagcatccttttttcactaagcctatatgagtcctatctgtggctgcctcctgggtaaagacactttatttaaaaacaattcttaggctgtcagtgacactaacattttactccaggcttcagtctttatctggtacagaacagaagttacacatttggaggtacaagggagccagagatcacctgtaacccccctttagctcctatgtggtctcttcagctggctctagaaaccaaattgataccagcagattgacaggagaaaagcatgtactttttttttttttttttttttttatggagacagggtcttactctgtcacccaggctggagtgcaatggcacaatcagcctcctgggtagctaagactgaaggcataccaccatgcctggcttgtattttttatagagacaggttttcaccatgttgcccaggctgatctcaaactcccaggctcaagtgattcggccaaagtaagatgcttttgtaatttttagacaaagaacaataaatttgagaagaaataagacaaaatctggctagggatagtaaatttctagggaagtcactaggagatatatgggggtggggggtgtaaaactagtggaagataagggttacttccttaagtgtatttattcagttccattgcagccccgtttccagtctctggtgataagggctttttgccctagtatggggagggtacccctctcagaggaatctttatgacttgctacatgcaagaagagacaggtcagctagccttttctgaaactacaatttctccaatgctttcacctcaaaattaacaatatacctatcggacatattctgagatggcacatgactccttcaagggtatttcacacacatgctaggaagtgaggggttaagtgtccctgtgtgctttttcagatacgtggcttcagagagagcaagaaggctgaggaggatgaggagggcagggtgaggctctctccccaggctgatgatctcctttcccttgtcttagtacaagcaaatgctggtgaatgctttcacggagcaaattctgcctcacttctccacggagggcccccaacgtctgctgccggttctggacagaatctacccagtgaccgaaatccaggaggcccataagtacatggaggccaacaagaacataggcaagatcgtcctggaactgccccagtgaaggaggatggggcaggacaggacgcggccaccccaggcctttccagagcaaacctggagaagattcacaatagacaggccaagaaacccggtgcttcctccagagccgtttaaagctgatatgaggaaataaagagtgaactggaagggtggcacgcggactggggccgccgcggcggggttgaggtgggagtccggacgggcgtcgcagcggggattactgaggcccgatcagctgacgctcaacctgagggcccctccagggacggagattctgggtatagttacagcgtcagccgtgacacaagccgccagaaccccacatattccgccttgcgcacagctagaggcccaggcccaccacctccggcacctgcccgcgcgccccgcaaccagtgggcaccacagcaggccccagccctgcccgctactcacctgggccccaccccacctctcgccgccctcctcaggccccaccacctcccgctacacatctgagccccgccccacctccaccactttcctcagccccaaccacctcctgctacacttctgggccccgccgcacctccaccaccctcctcaggccccgatcccttccgctactcacctgggtcccgccccagctcagtcctcctcaggccccgccttcgcccgctactcacctgggccccaccccacctctcgccaccctcctcaggccccaccacctcccgctacacatctgggccccgccccaccgccaccaccctcctcaggccccgccccttccattactcacttgggtcccgccccagctcaccgccttgctcaggcccggctccctcccggatactcacttgggccccaccccagctctccgcaccctcctcaggccccgccccctcccgctactcacctgggtcccgccctacctgtcataaccctgctcaagccccgcctcctccgctccccagttactcacctgagacccgccccagctctccgccctcctcaggccccgccctctccacccgggttcctctgctcagggcctccccgaccggaacatctcgccttttggaggctacgccccgccctttacggtacagagcccggaagtgtcttggactctcgcctttccatcttccggcctcgagtctcgctcaggctcggttttaccccggagtctattcgaagggggctgctacgtcagcgcgtctcagcgtaagacggcgctattccgctgtaacagcttccggcgggtcctggatgttgatgtcctgcatctaacgcggtgtaacccccgaagccgagcgagctccggaggaatttcagtatctgctacggtaacttcatcagcccgccaagatggcgatgcaagcggccaagagggcgaacgtgagtatcgggtgttctgcggagggtgggagaacttcgggtttgactttcttagcggcgtggatcggagcattcttgctcctcctccgtccccagagcggagaactccagaattcctatcctgtcagcgaagacactatccggccccatcctcagagatatgctccttgagccacatttctgtccccaccccttttgagagttcctcagtctctaccctagtgtcagtgatagtgttacccctatagcctctttgcttgacccgcacctaaggacctggcgttaggattatctccttgacttaaagtcgatatctcagaagagtcctcaactaacttaatggttcaccaacaactaggacctgggattcccctcagatcatggtgcttttcggatccttcattaacacattaattaaaacaatattttttgagcacctactatgtattctgcttgccatgtgggacataattcatcaattatatttattgaatagctactatgtgccagacactagtcttacgtattgggaatacagcagtgaataaaacaagtccttctgcttacattctagtgtttgagagtacagtgttacggaaacttttaaaaaaaaaaaactcaaaaaagagattagtcaacagtaaaacgcttagaggtgtaagatgaagttaggccgagtgaggtggctcatgcctgtaatccccgcacttttggaggctgaggtgggaggattgcttgagcccaggaattcaaggctgccttgagccatgattgtgccactgcgcagcacttcagcccaggagacagagcaagaccctgactcaaaaaaaaaaaaaaaaacagaaagaaagaaagaaagaaaagacaagcaattgaccattgtatatgtaaatggagacttttggtgaccttgatgataggaatcatttcagtggatgaaaacttgattgcagtggggtgaaaagatggtggaagttgagaaaatggaaacagcaaagacactctgtccatgagttctcatttaaataggaagtagggaaattggatgatagttgacttttttttttgagatggactctcactctgtcacccaggctggagtgcagtggcacagtcttggctcactgcaacctctgtctcctgagttcaagcaattctcctgcctcagcctcttgagtagctgggattacaggtgcccaccaccatgcccggctaatttttgtatttttagtagagacagggtttctccgtgttggccaggctggtctcaaactcctgacctcaagtgatccacctgccttggcctcccaaaacgctgggattacaggcatgagccaccgcacccggccagatagttgactttttaaaagatgtgtgatataggtgtatctttatgccaatgggagcaatccagcagagtgtgcgaaacatgatatggaagaaagataggttgagtttagaagtgaaggttttgagtagatgaaggttggcgtagtaatagagggaaagtagttggatatagatgaaaagtatttcaattggtcatgtctattttctccaagaaacaagaatcagggtcatctcctgggatgggcagggaagagggtacagcccaactcaggtgttagcaggagtgatggtggtaaggtttgcaaaggcctacacccaccaccatgcctggctaattttttaaaatttttgtagagatgggggtctcactatgttgtccaggctggtctcaaactcctgggctcaagtgatcctcccactttgcctcccaaagtgctgggattatagggacsagccactgcacccagcctctgttgctttttcaaagatctgcccattttcagaaacatcaaattatacctcttattcttggctttttattattacgtatcattaagaattttttaaaatgcccctaattataggggcatttaaattataattttttagaatgcccctaattataataacaatacgtatttctcattttagattcgacttccacctgaagtaaatcggatattgtatataagaaatttgccatacaaaatcacagctgaagaaatgtatgatatatttgggaaatatggacctattcgtcaaatcagagtgtgagtcttactgagtcatttaaagaaaatgatagcataatctgtaatttcagaattatagctgacgatgaggccaccctgtgctgtgtgcagtgcgacaacccttaccaagagccttgagactagcagattgagatcagagagatgagatctttttgaagrgrggagaaaacctactgagaccctaatgatccagctcaatgagagccaagaagaggatttgagtttcctcaaagcattcattgaagtagtaatgaatgctttgaggaaactggttgagaagggaaagaactaacatttattgcatacctgttatttgtaaagctagcttgttacactrtgttttttgtatgcagcagctctataattttctcaacaatcatcactgtctctttaaataaccccagaatttctgaataaactaagtaaaagagtataaaagtaacagaaaaaaatgatattttcaactacagctctttcaattgaagatgtaaaagtatagaggaaaacatstaattacaagcattcacgttttaatttaatataaagattggggttcataccttcaagtgatatttactggacatctactgaataccattamccataataagtgcttttatttggatcaacaaaactatagccctgagagtaaagtacctttctatcttacagtgcttagtggtaaaatcttctgactctaaattgaacctctacattacacagtaccatagcctctgacacccgaactcatatgaaagggctagtgacttaagagtccatctgaaaggatttctaaagtttttattttaaaaaaattattattttaccacagtaatgactacrtataaagtttttatttctagtcggaattccgtcttgtatgacttgagagctccttcctggctttaggactatgaggtcttgaggaccctccttttgaatgacactgtccctccagagagtaaaccaagagctgraaatacatgatcattggtactcagatggggatgaaagtgaaagtgttatagaccagctgtcctttttaggaggtctcagtcctttgagcatctgataaaagctttagactccttccacagaagaatacactcatgttgcatatatttcaggggatacatggactctaggtyaagaaaccctgctctagatacagaatggtatacaaggccaggagttcaagacctgcctggccaacatggcgaatccctgmcttggggatcaggagacaagattctacttcaggccttgttactagccatgtgtgtgactagttgcctagcttttttggttttctcttcatgtatgagataatctgggtggtggccttttagcttttaatgtggaaacagcatagattggttgtaaggcctgggttcaaatactggcttgcctactcttacgaaactggagaaaatatttaaccttatctgggtttcaattatctatgaaatacagtcttcctaacctactgtcttaaaagaattttaatttggatgaaattacacagtgtctgtgaaggtactttatcagttttccttcccagtgtacattagccactcttctgctcccatagcatttccatgtgtctctcctaggttaacacatggttttgctgttgtctctatattcatctgtcaccctgggcaggttgtgagttcctccagggctcgtaccatatattatttttgtttttgtgttgatagcacttgtgcgatacatggtaagcacccsatgtatactaaatgaataatatagaaaatagtagaataggccagatgtggtggctcacacctgtaatcccggcactttgggaggccgagacaggcagatcaccagaggttaggagttcgagaccaccctggccaaatggtgaaaccccctctctaaaaaaaaaatacaaaaattagctgggcatggtggcacgcgcctgtaatgcaattactcaggaggctcaagtgggagaatcgcttgaacctgggaggctgaggctgcagtgagtgagccgagatcatgccactgcactccagtctgggcgacagagtgagatcctgtttcaacaaaagaaaagaaaatagaagaataatataaaaagtggttgtgattggtttactagggcattataaaatttattgatagtactcaattaagggatgcttaaaatcagtgaagttagagaatgtttcagaaagccaaaatgaaaggacagggaataaagcaggggcatcttcagaagagtgcagagcagctcagaacctttgtgcttctattttccttgtatctggaatggttttcaccagctcatctcatgcctggctcctcctcattcttcaggtctcagcttcagtgtcaccttttcagaggggttttccctgaccaccctagctgaagtagctccctgtttccctatctgttacagctttctacttcttgtatgaaacatttctttttttaagatggagtttcgctcttgttgcccaggctggagtgcaatggcacgatctcggctcactgcaaactccgcctcccaggttcaagtggttctccagcctcagcctcctgagttgctgagattacaggcacccaccagcatgcctggctaatttttgtatttttagtagagatggggtttcaccacgttggccaggctggtcttgaactcctgacctcaggtgatcctcccacctcggcttcccaaagtgctgggattacaagcatgagccaccgtgccaagccgaaacatttcttaagatttataattatttcagggctgggcgcagtggctcacrcctgtaatgccagcactttggaaggctgaagtgggcagatcacaaggtcaggagtttgagaacagcctgaccaacatggtgaaacctcgtctctactaaaaatacaaaacttagccaggcgtggtggtgcatgcctataatcccagctactcaggaggctgaggcaggagagccgcttgaacccgggaggtggaggttgcagtgagccaagatcatgccactgtactccagcctgggcgacagagtgcractccgtctcaaaaagaaaaaaaaaagatttataatgatttcatatttatttaatgtctttctactgcctgaatataagcttgaaggaagggatgatgcttatctttttcactattgtatttctagtgcctgtcrcagaaagaacatagtctatgtgttgaataggttaatagaagtttagggtacaggagcttaggtctaaattatagattgagaaacagctgtttttctgttccattactgtgatcatgctttattgtatacctggcacctggcactagggtgaccaaccttcccagtttgcccagtactgagagattttctgggacactggactttcagtgctaaaacctggacagtcccagtcaaatcaggatgatttggtttgaccctacctggcatgtagcaggcacttggtactttgtactttttaaaactctttgatacttgttacctcttttgattattaaacccacgtggaaggtagggcacgtgatagagcctgatggcactggatacatgaagcatccgaagctcacagaggctaagttacacgcttaggtgttcttattcctactctaagattttaatgccagtcaagaaaattgtagcactttgggaggctgaggtgggtggatcacttgaggccaggagttcgagacctgcctggccaacatggcaaaaccccatctctactaaaaatacaaaaattagtcgggcatggtggcgcacacctgcacaagaattggttgactctgtctcaaaaaaataagaaaataatgttagctcagtgtccaatacgtggtaggtacagatacatgcttttaaaagttcaaattataatatggctctcaaggtgtgaggttgataattagggctgggacacttaagatggagagtctttaaagtggggttagtgtctatccctattctagttcctaagaagatataagaggaagaaagagagttgctttgtttagttttgttttgagcttcctgaacaaagtgtgtgtgagagaaytgatagragaaagtagatctccacttttcaaaggcgtattagcgtctgccttatgcrtggcactaaaggaataaatgaagtacgcataagatcacctttgctcttaaggaactgaaaatcttattaagtttttaraagtcaaaagtctgaaagttgttaagacttgccagagcctaaagaacattctaaaacccctcgtcaggcccacacaacctgacaaagtgagcgcattcattgacagtggcaccctccaatcacccccagtaccctatwccttttcaattttacaggaagcacaagcttgaacagggcccagactatagtcctatcctagatcaagtctaggcaggtacctcctcttcccatggctccactgcttttattcaaccctatgtaaggactgtggcagatggagagtcagcccacagtcttaaacctcattccacagttgcactgggtggttggaacacagatggaggcaagggggccatcttgtcacccagagcctgaactgagwgggacctctacccattgtctccactaacagtcacatggccacctgctgcctgcaatttagcgttgcgttgctcctcaaacttctctacctctcccagaggaagttggtgaggtgaaggaaggaagtggccaggaataactacactaacagcaacctcgtatccataagtaaggttagcttccacttccagccaccttccagcattctgccctggctcactgataaccctatccacaagcacacttccactcccatctttgcagaagcctagcccttctccctagccacacagctgtatcgtgcattagcacttgagttgtattaaaaatgaatgtagaccgggtgtggtggctcatgcctgtaattccaacaccttgggaggctgaggcaggcggatcacttgaagtcaggagtttgagaccagcctggggaacatgatgaaaccctgtctctactaaaaatacaaaaattagctgggcatggtggcacatgcctccagtcccagctacttgggaggctgagacacaagaatcacttgaacttgagaggcagaggttgcaatgagctgagattgtgccactgcactccagcctaggcaacagagtgagagtctatctcaaaaaaacaaaaacaaaaacaaaaacaaaacaaaacaaagacaacgtagagccagtcagggtggcaagagcacctgtagtccccacaactcacgaggctgttctgtgtagtagctgtgttcttagtattcctgatgtgacagtcagcttgacctatggatattttagttaagataaaaacgaagaacaaaattacctaattcaagaaattacaggcttatccggtatatctatccatgtttatttcctctgatggtttcaggttgatttcaaaatacttaactaaaaacrtatttcaatttactgtttttaaaagacagttaccagtttaaaagacagttctgtaagtcaactatcaatgctcaggtaaatgtatatcttaattaagtttaacttacctctccagggggaacacacctgaaactagaggaacagcttatgtggtctatgaggacatctttgatgccaagaatgcatgtgatcacctatcgggattcaatgtttgtaacagataccttgtggttttgtactataatgccaacagggtaagtatagcaaagttctcattgtgtagtgatctcatttgagaattagtgtagaactggccgggcrcggtggctcatgcctgtaatcccagcattttgggaggccgaggygggyggatcacgaggtcaggagatcgagaccatcctggctaacacggtgaaaccccgtctgtactaaaaatacaaaaaattagccgggcgtggtggcgggcgcctgtagtcccagctactcgggaggctgaggcaggagaatggcgtgaaccccagggggtggagcctgcagtgagccaagatcacgccactgcactccagcctgggcaacagagagactccgtctcaagagaattagtgtagaactgtactgtgatgatatatgtctactatgactttcttttttggctaatgctattgatgaaattcatttggctgtagattggtaatttaattttggtgcttaccacatttccaggcatttcagaagatggacacaaagaagaaggaggaacagttgaagcttctyaaggagaaatatggcatcaacacagatccaccaaaataaatgttttctacattttcatttggactaaatcccacgaatgacaactaccacctttttttcctttttaattaatactaaatattgtgatttcttatttgaggttcaaaatgacctgcttgaaactttgatacatattggaatacattatgttaataaacttgtagctttttgtgaaacacctcagtcttttctcttgaactttcccttcctgtttgataccaggaaaaaacagttgaagcttatcaagaattgtaggtgctcctagggattctgagtttcttgagaacaggatctctttacattcttaatgcctccagggcccggtgcagtgcttagccatcaaaggaacttgctgtttattgcatgtccattaataatgaaatcttcataacaactcagtgaagataggtatttgcattttgcaggtgaggaaaccaaagttcatgatgttggttgaatgaataaaatgctaacatacaaagctggtgtgataacaaccagttattaaccaagcctttacatttgaataatgcttgctttatagttaacaaaacacctgtgtcaatatgggtacccttgtctttagaacagaggtctattatagaaatggtcatttagatgatagtacattgttagaaacttagatttgcctctttaaattgttttttaattattatgggtacataataattgtcacattggtagaaatttgagagcaagctgcttgggtagtggcgttggttgttacatgtctaagattgtatttatgtagacttttcctttagttattaagtatctgtaggtatattggaccttagctcataatatatctttgccataaatacttaatgctcattcttattatcatgagttcccatgacatggaaacagtatggttattaccccattcatcatcatggcagcttgggagaatatagccgtaatttgctttttattgcttaggcatggaccaaatggaaaaacatggactaattgttttgtgtgtgattggaacctaaaatcaatttgaaggtacatacactgaatcacttcaatgtacaaagagcatcaattctgcttttaattatatctgagtgttttttgaaagcagtgtaagagagtagagtcatttctaagggtgggaagataagaaaggagctacagctgtaattttcttttgaatgcttttatgaatgcattattagtttttgtaatgcatggtgtgcctttaggtaatgtaaaaagaattttctaaaagactttcttgtaagagaaaaactgaaattagactttaaaacttagagtgtgatttgtctaagtggcaggctagcttgcctctggtgtagttgttttaataacaaggagaaattccttctattagcagtcatgaccagtccatcatttggattgatatatctgttagctgaatttcatgacctaaagttaagacttaaaacttccctctaattgtttggaaattccatatcctgtcgcaattaagttacaagaacttgcactcagtggacaaacactgactcccactctgcacacagtactgtacgaagatgctgaggatataattatgatcggtcctctgtgcaaggcatccaaagctcaatttttcaaatgcttttaagagtgcaacagatgactgtgtttatatgtgcacacacatgtgccagagctgctttactttcatctgggttaaatttttgagtttctaagaaaaaaattcgtaggaatagagaattcattgactgaaagtctgaaaacaactgatgtgaccttgatcttattattgctcttctgtttaacagctttagtggctctcataggccaatgtccagactcattagcatactgcatcatgattttctgcatcatcttttaagagctccagtaaaatggttcatttcccagtttacctgcagagcctcacctgtcctctccaggtgctagccagtatgtgtttgcactttgggggagttcttttagtgggtgtctcctttgacccacctcagttataaatactctagaccaatatcttttatatgccccatagtgggcacctgaaatagtccttgatgccatcttttgttatcttattggtgtcacagcagaaaatatgcgtatgtcttttatgcaggctgacttctgagaaattattgtaggcatttgagtcatcaaagaaagccaggaaccaagacattctgaaggaaataccctctggctggtctagtctcacaatagaggtgagcacagggactttggtgactaaaatgcaaggcagttcctttctctcgttttctccatcctaaagcactgcttcttcattagctcctccaccctcagcaaaggaatacagccaggatttcttggagacaaaaaaggtagatcatgtagccaagatgacatggcctcatagcatatatatgacatcatgtgacatgtatcagtgggtctatgaggaacactaacagtacctgttatcagcccctccgtcctcaatcttgaaacaattcgaagtcgtcactgatagaaaaccgtattggctgagtgcagtgatttaaacccataatcccaacactttgggaggctgagagaagatagcttgaggccaggagtttgagaccagcctgggcaacatagtgagattcccccatctctattttttaaaaataataaataaatgattaaaaaaaaaaaagaataaccccaactatggccaggagtttttctcatcctataccaactgaaagaaaaatgtttgaggctgggcgtgatggctcacacctgtaatgctagcattttgggaggccgaggcaggcggatcataaggtcaggagattgagaccatcctggctaacatggtgaaactccgtctctactaaaaatacaaaaaattagccaggtgtggtggtgggcacctgtagtcccagctactcgggaggctgaggcagaagaatggtgtgaacccgggaggcagagcttgcagtgagccgagatcatgccactgcacttcagcctgggcaacagagtgagactccgtctcaaaaaaagaaagaaaaaaaagaaaaatgtttgagtatattgcctcagtctcctatggcctatatataacctacaccaataagtgtgctgattttaaaacctaactggtgtttctggttagttacaataaatgttgatgaaataagcactatatgtggaaacaagttcagaatcatacattcttctcaaaagtaattcctcaatgtaagtcagaacaaatctaggtgaaactaagcagtgtatgtgaaaacaagctcagaatcacacactcttttcacaaggaacttcccaatgtgagttagtgtacgacttcaagcccttaacacaccttcatttgtttagacacaaaaagtgttctgtatccatctgggtgagtggagctcatccctctggctgtagtccaaacaaagattgcaagagcacataaggtgctcaagtcccacatctgattgctaggctacaagatttggagcctatatttctttagttatgcagaggaggattctgagcctgagatgagcggcaggtaatatctactgtgcagggttgcttagaggatcaatggtaataatttaaaagtatatagccaggcacagtggctcacacctgtaatcccatcactttgagaggccaaggcaggtagatcagttgaggtcaggagttttgagaccagcctggccaatatgacaaaaccctgtctctactaaaaatacaaaaattagccaggcgtgctggtgagcatgacaatcgtttgaacccaggaggcggaggttgcagtgagccaagattgtgccactgcattccagcctgagtgacagagcgagactccatctcaaataaataaataaataaataaaataaaaaagtatgtagaacaaggcccagcatgtaaaatgctcacattgtagctattatatttatcactcacctagccacttggaaccctcctttctttccactctttcccaagggcacctggcttgtgtggtccttagagcacttcctacctaaaataaggatggacaggagtttgtcaagcacagagcctttattttacattttctcaaagaggacattgtttaagtgagcagctaacagaatttataagagagaaagtgacagcaaaggtaactggctcaagtccctctgtgtacggtacgccatgtacatttcatgtctgagcaccttgtgtgtgtggtttaagtgaaggtaaggcagtgtagattgtgcgaacaagagatctgtgttctgtcatcaggaaaggctactacatgcatcacacaaaatgcacaacctgaaatgcttcaatctgcaaccgaagtttcctcaagcaagaattcgcatgaacactgacgaacacatacagagcaacttgggcagagagaatggatgatgccatgaggcagtgaggttagcacactgatcaagagccccaaaagcaggagccgtcccagtggcagagcaggctaggagggtgagcagcagccatctccagccaccttgagttccttcctgccttcactctaagttgagcagctccacgtcaaagatgagggtggcattgggagggatgacaccggggtggcccgtggctccatatgccacatcaggggtgcaggtcagcttcgccctctgccccaagctcatctagcagggatgggggcagatggggagaggagaaagaggacccagcttgatttaaaagaaaaaagttagatgactatggcattttcccaaaccatcctcaatgttaactctgaagatctcagatgaattttacatgggatacattgaaatcgtgctaacagctttaacaaacgcagattctgcctcagcagagatgtgactgtggggcagtaaccctcacagagtggtctcaaattcatgcatctgacaaacattactggttattcaatttgtgtatgactgaaacacttccatttgttcatagttcaccctcttccaaagaataggcctctttaggaaaagagggtgtatgaatagcacacgtaaatactcaagtaggtgacaggggcagttatttaaagtggtttagagactagagtcaccagcaaggtggcaagggggacctattgtggccaaccgtggtggctcacacctgtaatcccagcacttttgggaagccaaggtgggcagatcacttgagtccagaagttcaagaccagcctggctaatatggcaaaaccctgtctctactaaaaaatacaaaaagtccgggcgtggtggctcacacctgtaatctcagcactttgggaggccgaggcaggtggatcacctgaggtcaggagttcgagagcagcctggcaaacatggtgagaccccgtctgtactaaaaatacaaaaattagccaggcgtgatggtgatggtgcacacctgtaatctcagctactcgggaggctggggcaggaaaattgcttgaacctgggaggaggaggttgcagtgagctgagattgtgccactgcactctagcctgggcaacagagtgagactacgtctcaaaataaataaataaataaaaaacaaaaaacaggccgggcacggtggctcgcaccactttgggaggctgaggcgggcagatcacgaggtcaggagaccgagaccatcttggctaacaacggtgaaaccccgtctctactaaaaatacaaaaaaattagccggccgtggtggcgggcgcctgtagtcccagctactagggaggctgaggcagaagaatggcgtgaacccaggacgcggagcttgcagtgagccaagattgcgccactgcagtccagccttggtgacagagtgatactctttctaaaaaaaaacaccaaaaacaagacctatcgtaagggagcatcataggacttcacagacagaccaagaaagaacagcttgaaccagggctcatcacagcagttgttgagaacccactcagcattagtgggacaattggtgaaatttaaatctacttttgaattttgaataatcaaaaatttgaataagtaagtaatttgtatcagtgtgaatgtcctggttttgataattgtactatggttatgcaagaaggggaagctggatagaatatagaagaactctgtactatttctttaatatttttgtaattctg

SEQ ID NO: 97714 - DNA, 14349 bp, Homo sapiens
aggaccatttcctggggtttagggcacacccgtgtgggggtggcatccctgttgatgctggagtcactgtctgggctggccttgtggtttagccctcccccagcagccagcagaccccctgggcccgggctgtccctatacacggatggctccaaggcctggggggggcgccacaggagcacggggggggcccatgcctccctcactcactcccaggtgtcccctcccggctctgggaacctgactcagcacggtcacgtctgtccctgtgtcaccatgccagctctcaaaaccactcctcctttcctctcccctcacaggggcctggacgctgcatcctgggcccagatccaccagaagctccgggacttctcccgcagcacccaggtaggaggcaagggctggcccaggcccatcctcacgccatgccccagctcatggcttacatccccatgccaggcagagctggaacgggagcgggcacagctgctggtccgggccacgatggctgaagagcaactttctgagctacaggagtacgtggaccagcacctgggcaggtgggcagagggagctgggtgtgaccccagggccctggtctggttggaatgaaggatgatggctgcctcaggcgctaaaagcagacctgtccacagctgggcaagtcacttaagcatggttcctctgagcaggtacaagcacgaaatcctgaggctgaggaagctggcaggtgcaggggacccctggaaagtgggggctgtgcctccagccaagccccagcatccaaggaccggcagccactaggccgtctcccaaggagcagagcagagcagagctcctcagccagcacagaaccctcccacccagccccccataaaacatgagtcaggatagaacccacagagtctttatcgtgtctaatactcagctggcctgagaaataaggccccccgggatgggggcagaactaggtccgggggcagcctggatgggtatccgcgaggaggcggcctccccagcctgcccaccctcaggaacatcataagcccatactcggtccaggccctcgccaaccgcggtcacaggctgccaggtggggagtgggaagcgcccagacaccacgcgggccccagcaggcagctctgtccgcagcttgtcctccagcagcgggagctgagggagagaacagcagagtagagggggcgggggcggggccggtagaaaacagccgcgctcacccccctagccccaagcctagcacccaccaggcaggcccaggcctcagagcagcaaacaccctggggtgtggctggggcttcccagcggggctggcaaccccgcacctaccacgctaggggccaggaacacagacacgttgcggcagtccctcaggctcacctgccggaagagaagtcgccccggccggggagaggcctggtgggcaccgggtcatcgcagcttccgagtcccggcccccagccctcgcaggtgtcagccgcaccttgggctgtcagcgggtggccagggatccccaggttaccttccagagatccttgcggcgatagcagacgctgccggcacagccggccctccaggcgtgcagccgcgccagcgccaccagccaggggttcagctcgtagcccacggccgggcggaggccgcacctgtgggccgccagcacctgtgggcaccgagagtgtgggaaccaggatgtgggcaggggcgcccgccagcaggtgggcggtgtggggcggcgaagacccagacgcaggcacttacgatcctgccgtcgccagagcccagatccaccgtttttccggggcgtcctcgcagcagcgacaacacgtgctccacctgccgcgcgctcgcgccgacgtagggcacctggaccgggtggcggcgagagtccactggccgctcccgccccgcccgcagcccggcccgaactaccacacggcggggcggagctcaccccggccacgcccagaccttgagaccctgagcggcagccgagctcccctgcccggcctggccccgccccgcacctgcagccgcagcggcacgcgccggaagccgggctggagcagcagcgcccacaccgcgtaggctgccaagcccgagccggccgccgcctgcagcagctccagcgcgcccagccgccgctcgcgcagctccgtcagcgcctcgaccgggtcgtcctgctccatggctgcgggacgcgcggctcgtccgcccaaggtccttcccggctcgggtccgcggccctcgcagcctggcctggggctggcggtgtgccctctgcctcctgccgggagccgccgcgcgacaccggaagtggccggcagagcctgcgcggtcggtccgtggcgctgtgcgctccgcccagcccggctgccctcccgcgggttccggcgagctgcagcctcgggggctctgccccgccgcgtccggctccaagcctgcgagggtcggctccgttggtccgctctgcggaccgccgtttgcggcctgtgctggctgctggcgacccgcggaaggggacaggcaggccctgccctgggggagcgcacgtgccggcgggagtcgggatacacccggcgatctcacgggctagagccccagggaaacggggctgcgcgtctttgtcgtggaatgaagggaagtctgccttggagaggggcggtcctggccccagaaccagccgggggctcgcgtggggcggctggagcccagggagccggtgggaaagcggctccccgggatgagacagcgtccaggcgccagcacccccatgactctgcctcggggagactgctgggggcgctccgctgactcggacacccagcgccagccagagcccgggaggacatccttccatttccctcctacagcctgagcgatgagccccagtgggcggtgaagggatggggggtggggtctgagggagaagggcatggaggaggggctgacacggaggagagcttgagcaggcccaagaagacagatgctggctctcaggcgagtgtggtgggaggaaagccggatgtcacaggcgggggcctctggcacctgccagctacagggaaggcagacagccccgggagtggggagatcaccttccttctccagaaaacaacacacaaaaagactgagttcctggaggtgaccttgtgaagctgggggtgggaagcgcaagtggaagagccgagctctgggtcaggcagctgggccacgacctccacacccagggtagggctgaacacccgtgaatgtcgggggttgtctatgcgtgccctggcctagctcctccttagccatccgtggctggggtctagagcccctgcagggacagaggctgcttccagacatgggtatgccgcagaccacagcccccagctcccaagtgcagagtctcacaggcctgcccacgttggccccagccccacccagctcagcgtgtcctgtctcctgggggcctggaacggccctcccaggaaaggaagggtgtatgtacactgagctctagggggagctgacagcgcccattcctgtcctgctgcctgcattattccctgcacctagagcagttacctaggaggcttactggatgaatgcacctaattggactctagcgtgcactctccactcttcttttttttttttttttttttttttttttttttttgagacttgagtctcgctctttcgcccaggttggagtgcagtggcgcagtcttggctcactgcaacctctgccttccaggttcaagtgattcctctgcctcagccttttgagtagctgggattacagatgcatgccaccatgtctggctaattttttgtgttttattagagacggtttcaccatgttggccaggatggtctccatctcctgacctcatgatctgcttgcctgggcctcccaaagtgttgggattacaggcgtgagccactgcgcccaacctccccactcctctcccgtccacaccaggcactctgctgcttggcctttgggcactctgcagccacctgtacctgtgtgaactggcacttgcctggcggtgtctgtgatccacaggccccaggctcctgtagctcctgcccacctgctcacccacactgtctccctatctcccatgccactttggccacctgtccccagggcaggcatgaagcccctggtctaatgctccaagacccatttgggcaccgtggtgctcctgtggccctgtgtctcatgagaagacagctggttgcaaagccagggctttctctgggagggtctgtaggtgcaaggctcaggcacttcctgagacaggtaggtagaagccagggttcggccagggcccagcccagggtgtttgtgaacaggtggacttgggtgtggctgaaaaggagaggttgtaggaagctggccagagaatcagggcaagtgccaaaggtaagggggttgctcggcccacgggaaagcctctccaagacaggagtggaggaggcggtgcaggagggcacacgggctacctccttttctagtgtttgcagaagtgtttgggctgggggcagatggatgtaaggctatgggccccagggagtggtcagggctgaagatgaaaaagtggaggttgtccaagggttattggaggctgccccagaggagcggtcctgtgcctgagccctcagcgtgccacagttgggagaggagagaagcagcaaggaacctgaggaggggcagaaggtgggagaacccccacagtgcatgacacccagtggctgcgctcctcacccatcctcatcagccctgcggcaggcaggtgatctgtgtgaaagggtaagtctcttgcacgtgcagtggaagtcccagggcggcgctggaggtgacccccctccccaggtgtccacagagggcatggcactcatcaggcatctgcatccgctaacctagagaaaggaccgtgtttgtgggccctgcacagctgtgtccctcacacagcctcagtttcccccttgaaagctgggggcttcatctgcctgggcagggcctctggcctccacccccaccccggcccaggcgagaatggaaagccatttctggggctcagcccaggggtccctggcccttgagccatggctgtctctttcccaggatccgaggggttggggtgagaggaggcagctcacacagggccaggtgtcctggaacacccccacccaggggcttttagcctcggagccttgggctgtggctgtcccaaacctcactggccctttatgcggctgaaaggccgaggaggaaggcggagacagtgacaatggggccagtggcgggaaacggtccttagagaccccattgtgcaccccgcccgccggaaacaggcaacaagcaggaccctgcagaggggaccccacacccttcgggctcctcgccacgtctggatgctcagcacgtcgaaggggcctgaggacagaggggcccattcttccccaagggcgggacggggccaaggatgactctgcgggctcacagcagccatgggggaagtcggcaccctgccagcctgcagccccttccctcacaggcctggctcagagccggagcgctgtgcgcccgcctgcccccaccgtacccgagggaccctatgcccctctgcccctttcctctcctgctgagccccagaagcacctggcacgggaggcaagtgggagccagccagggaagcaggcaagggtgcgggcaaggacggggctggtgggtgcagcagagcagaagcttgcatgagtgcaggtccccacgtgccccccacccagcagcggcccctccccggaatgtgggtgtagctcctcctgacatctgctctccctctcagttgccaaatggtcttgaacaagataccattcccctgagcctcagtctcccgccaggaggcaggaattggagccatcctcacagctgcgaggcaggcccaaggctgggctggacacaggagaccaggtccacagcagcttgcgtgaacagagttcttattgatagtcccatcacctccaaagcagtggscccmmcctccctcctaccagcccctccccagcacccagcccctcagtgcagcgccacctcgcaggggtggaggtgggcagcacgggcagcctcgtaggcacggcggaactcctggaatcgtggggcacagcccagccgggcctccccaaagcggctccagcccatgaagaggaaggtgcctgggcccgggtggacgccacagcgcagtggggtacgaatggaggtcagcccctggtccccggatcgccccgcctggaacagcggcggtgtctggcggaggacacgggcggccaccacagtgatgacagactcctgcagctccacgtcatgggtgaccccatggatgatcccgtgaattactgtggggaggcatgtggctgcggtaggcattcaggggaaggcaggctccaggctccccccatggcggggacactcaccgaagtcgctggtgcatgcggccaggagcagctcagcgtcrctgcagggcctgcaggcacctggcatgcagagggggtggtgaggagaggccctgccctctcccggcatcaccccaggccccgtcccttgtccgcacaagcggcaggaggcagcaggcaaatgagcagagcccacgctcagggcctgatggcacctgggggtcccagagagctacacagcagatgtgcacgccctcggcgacacctgtactcaggaaacacacttgcaggcgcgtacctccaaggcaggaatgcacacagacrtgggcctgggggccatgcctagcgatcagctgtcctgggccgccctcctgcactcccatctgacatatgcaccccagcatctgggacccctctagtttcccggatctgaggtctgaaragcagcagcccagctagggtgataggaagtgggggcagaggaagggtggtctggggtccctggcccagggccagggggcagaatagygagagcccatccctttcagggtcaggcgccaagctccaggagagccaagcaagagctgggcctggtgccctgcagggaggcgagcggcgtctccatggtgaccgggctgcacactggacttttgttggttgggctgggggaggggagagaggtcaccgctgggccagggagccccggacagctttggccggaggcttcgattctgtccccaccatctcttcccccaaccgttcagggaccagaggcccaggattgctgggcccggcctccccttccctccactctgcccctgccagctctttccagagatgaatcgggaagggagggcggggaggccatccctccccagcagtcccaggctgtgtggcctgacaagcccatccaacccttgtagctcactttttccttctgcagtggggccgacaaggcacattcccgccaagcccaggcagggtaagacttcgggactcccaccctgtcccamccagaccgccactcaccgtctacgccgagaccgtgggcctgcgggggcagctcggggcgcccgtcctcgcgcagctcaaagcggaaggcggccacgcggcggctgatgtcctggtgcggcgtggcctgcaggaagagggcccggcgctcgcggggaccccagcgcacgcagcggccccctgccgggcccgggccctcggccagcagcagctccagggcgccccctgcgcgctccgcgaagacctgggcgcccgcgaagggccgcaccggccgcagacaggcgatgccgggccgcgctctgggatcggggccgcccagggtcaggcgcagcgccccagccgggtacagccactcaaccgcgccctccgcacaggccagggccagctgccccacgctgccgggctcctgggtgaggccgctggggacaggacgggacggggcgctgagacgggggcgggtccccgcccggcgcagcccccgctccctcccgaggccgcctcgcggatggggaaaccggcccagcgctctgcgcgctccgaggggcgcctggggggtcctagccgcagcgcaccccgtcctaagtgcggggacagccccccggaccgtacctgcccctccagctgcagcgctcctcggagtagccggcgcgggcagccggggccaggaggccgcagcacagcgcgcagagcagcgccgcggccgggaaccccatggcacggcgggcggcgtccggggagtcggggctctcaccaccgctgccccggcggggcgcgggtccgggcggcggcgggagcagccgggggcgccggccgcccggccccggcgaagcccccaagcccgcggccgctccgcctgccgcgcagccccagcgccggggccgccttggagcgggtcgggaagggggcggggcctgcggcgtgtcggccagtcgcggcgcggcccggaactttccgccaatagcaggcgcggggcggagcgggggcggggccggagctcgggcgccgccggaggactatcccacggtccaagcgcctcgagggttggggggggccttggcgcggaagggaggctccttgcccgccccgcgctgtgcgtctctccttcgccgcgccctcaccctggcctcgccccccgcgctgtcccgatcggagtcctggagcctctgatggagccgaggttttgatgtccactggaacctcggggtggcggtagggaaggtggcccacctggtggttccgcctcgcgggcggccgggcctgctccttcctaacactgggacctgggcctgttggccacatccctcccaaccaggtccggtcctgctgaccagaggccggtggagccccagaggagaggggtcatgactccagaggcggggaaggcctggcctgggggctgcgccttggagcggggccaggcctcgggttttggtaaggccgtctgcaggagggggtcctgctgaagagcgcgcagcccgcaggcttaggcccctttcctcagacctagcggcaccccatagttgccggatgaccgaccccgggccagacggggctcctggaggggcgtgaatggagcagccacgggcacccctgcaggcctgcagcacgtggagacacaggagctgggaggacacccctgggccacaggagcagcccccaccaagatgaaacaagcagaaacaggcgattcgcaaacacactgtagcctcaggctggagcagtgtgggattcccagcatccgggactgctgagttggcctgatgggaggaagtgggcagtggctggccaggtggacaggaagagaatgggggagagcagacagcctgggtcaagggcctgaggaaggagctcttggcagcccagtgaaaccccagggcatgggtggtgggtggggacgacaggtcagatcacagaaggcctaaggcacaagcaaaggggtcccactacatactgaaccccttacggacgacagaagctttagccggggactgcaaggaccagcatagactgtgcagcctgaagatgtgaacattccgtcccctgcccccaaacctcctgccacccggcgctcgaaactcatggtggacagatgagttcaccagtggcagtcggacagatgaggccagatggctcagtggcagtgggaggctggatcccactgaccaggccctccctcaaccccagggccctcccaggccaaacaggaacaaggcgcctactgggctcggccagccccttgctctgggcgaggtgcaggtcagaagtagccatcacaatccccaaaaggtggaagactcccaaaggcctgtctgcagctgagtggacaagcaagtgcagtgggtccatttttttttttttttttgagacggaatctcgttctgtcgcccaggctggagtgcagtggctcgatctcggctcactgcaacctctgcctcctgggttcatgccattctcctgcctcagcctcccgagcagctgagactacaggcgcccgccaccacacccggctaaatttttgtattttttctttttttagtagagagggtgtttcaccgtgttagccaggatggtctcgatctcctgacctcgtgatctgcccgccttggcctcccaaagtgctgggattacagatgtgagccaccgcgcccggcctcttttttttttttttttttttttttttttttgagatggagtttcgctctttgcccagtctggagtgcaatggcgcgatcttggctcactgcaacctccacctcctgggttcaagcgattctcctgcgtcagcctcccgagcagctgggattacaggcatgtgccatcatgccggctaattttgtatttttagtagagacgaggtttctccatgctggtcaggctggtcttgaactcccgacctcaggtgatccgcccacctcagcctcccaaagtgttgggattacaggcatgagccacggcaccccctggcggtgggtccattattaagccataaaaaggaatgaagttctggtcccttgacacccgctacagcctggatgagcctggaggcttatgcgctgagcaaaataagccagagacaaaaggacaaacactgttggattccacttctgtgagtcaccttagagtagtcacggtcatgaggacagaaagtggagcaggggctggggaggggaatgagggattggagcttaatggggacagaattcaggagcttgattacacaacacaaatgtactcaacagtacggaactgcacactttaaaatgggtaaaatggtagatgttatgatgtatatcttacaattaaaaataaaaattgtcaaggcgcagcggctcccacctgtaatttcagcagtttgggaggccaaggcagggagatcacaaggtcgggagttcgagaccagcctggccaacatggtgaaaccccatctctactaaaaatacaaaaattagctggacgtggtggcgcacgcctgcagtcctagctacttgggaggctgagacaggagaaccgcttgaacccgggaggtggaggttgcagtgagctgagatcaggccactgcactccagcctgggtgacagagtgagagtctgtctcataaaaattaattaattaattacataaaaattaaggccgggtgtggcagctcctgcctgtaatctcagcactttgggaggctgaggcaggatgatcgcttgacatcaggagttcaagaccagcctggccaacatgttgaaaccccaactccactaaaactacaaaaattagctgggtgcagcagctcatgcatgtagtcttagcactttgggaggctgtggcaggaggattgcttaagcccaggagggtgaggctgcagtgagctgtgattgcaccactgcactccaaccagggcgacagaagagaccctgtctcaataaaaattaaaaaataaataaataaaatataaaaatcgtaaaggttaaagggtagactcggcctggggctgagcacatgaggtgctcgcagaggtggggagaggcacacgggtcggccgctgcagccacccagccgtccagggctgctgccgcttggcggtccccgggtcagcacggtgggctccaggcgccctctggtggcggcgtgagggtcagccccagacaccctcctgacagcctgggccccggacttctccccaggcctcctccagagaggggccagtgtctgtggttggagggaggggttcctggggtgacctggtctggaatggcacatgcctggccccgagttgacgcctcaaccccgggcgtccctgcctcctccccagcctcatctccggggatccggtgccaatgcagccacccacaggagaagccctggacacacaccccttttcctcacagcccccggccccacccaggaaagcacctggcatcagtgagtgctgtgctgcctacaggaggggcctggaaggccgagtctgtcctcagttgctatgggtacaggacccgacttgccagggtgctggtgctcagtaaataccagcagactaagtggggggtggctgggcggaggagtgcctggaaggcatccccaagcttaggtgatgccgtggctgtctgtgctgtttgggggccccctcaagtgccccaagccccagacccttgagtgccctgaaaccccagaaggggcctctctccatttccacccaagtcagaacgcgacagcagcaagacatactcaagtcagacaaaaggaagaacttccctgaggctttgtttcagaaaccttgggcctagcgcgtgaggccacccctggagagtgcagagtctgggacaatcatctctcccgcctgcgggtcagcctggccgtggccaaacacagacgccatatcacaaggcccctcagcccaaggcagggcggccagcctcacagcttgtcccgaagcctgagacttggtttctgttcctgtcttgcccagagggcccttggagctgcagcctgagggggtgctggggtgggggcggtcgagaccctggtcactgccacatggttcccaccttcggccactgcgttctccccccagacacaggttccggcccgtggaggacaccagtgctgcatttgccatgagctgggccccagcagtgcgtggcacaggcagcccacgtcccgcaggggagcggctgcggacaggtggctgcgccacggagtgccgaacaacccgctggggacaccacagtgccgggcacagaatagcagctgtcacggccagggcaggagctggctggctggggccctgggggagcaacatcaaggacgaggggagttgatgggggggcaggaagggagccccaaccctggggagaagaggggcaaaggccctgaggcagacagaacttcgagtaaaccaggaaccacagagggtgagccctgggggctccttgtttgcttgaagctccatctgcctcagagcctttgacctgctgcaaaggggaggcgggtaaggccggccccacccagcccatctgccctgagggagttggggagtttggacgcaccggtgaacaggatcccccaggaaatggggaggaagcctagagagaagggccagatcgtaggccaagacccccgcctgtgtctctgttcactggcagcggagcgaggagagaggtgtgggctgacctgaagccagcgcctcctgtgtccccagctgagccctgcacgggattggccaaatgtgctgctctgcggccgccctgctgccccctccctgggtggagctggggtctgggacagtgaagatggctcccacagctgaggggcactgggtgccaagagcctgccagaccctgggccacccagaaacatgctctgatagtgcagctgtgagcactggcctgcgtcccctctacccagccgacctatgaggctcagggtgcttgggggcccatcaaggacatagtcctagctgccgactcatccaggcagcctgcacaacccctggctcccctccaccggccacctgcccccctgcacaggcaggatccggcctcgcccacccacaggcctgcacctccgggcccacggcagcaagattcctatcttggggatgctttcctccctttgccgagagacccacccccccacaccttgcctctcttcaaggagccgaaaatgcagctgccgactgatttgctgtggagctaaaaataactgccgggctccagccagggcccaggaaaatatcccattgctaggagacaaccgttgccgggagaccgccattgctaggcgacgcgtgttgctatggtgatggctgggccctgagtcatccttagccttgatagggggcgagccaggcagggagcagagctggggggcatcagagaaatcccaccgcccatggcactcagggcacccctaatggctgtgaggttctcatgcctatgggtgcccattctggctgtggaggggtcgggacggccaaacatacccacagcctgctgcttcacatggatgatcctgggtgctctcgggctgtgctccaggcagggggcaggggcagtgtgtggggggatggtggcgtggccatctggcccccggagcaatcactttgctctccagtgtggggatatcaccacaggtgcagagctgaagtgaatgtgggtccccttgcagtcctccaaagtctcagggcaagatgtaccagcagcctctggtcctcatccccatggctccagagtgccctcccagccacctagatgggagactcctcagtgctgaggcatcaaggcaaggggtggtcccggtgaagtatgctcctggtaggggttctgcaggagaggggctctccaggtgaggggtgctccaggtgaggggtgctccaggtgaggg

SEQ ID NO: 97715 - DNA, 23283 bp, Homo sapiens
gaggttgaggcaggagaatcgcttgaactcaggaggcagaggttgcagtgagctgagattgcgccactgcactccagcctgggcaacaagagtgagactctgcctcaaaaataaaaaatataaaaataaaagaaagaggtttaattaactcccagttccacagggctggggaggcctcaggaaacttacgatcatggcggaaggtgaaggacgcaggcacgtctcacgtggcaggaggcgagagagtggagggggagctgccacttataaaccagcagcccccgtgagaactcaccatcacgagaacagcatgtggaaaccctcctccatgatccaatcacctccctccctcgacacagggattacagttcgagatgagatttgtgtgaggacacagaaccaaaccatatcaccccacccccccaccaggcagcccctgggcccccaaacctaaacccaggttctatggcgagaaccaacaatagcactgctctcggagggtggccctgcggggtggggtggggcggaaccaccgtggaccccagttgctgctccctagccctgtgtgtgatgggggcatctggcctggtgtgtccttcgggccttggaaaccacacgggctgagtctgagtgcacgtcctgcagcccggccagacagacccgcaatgaacccacctcctctcctgctgcccagccaggcagacccgcagtgaacccacctcccctcctgctgcccagccagacagacctgcagtgaccccacctctcccctcctgcagccctgcagacccgcagtgaccccacctctcccctcctgccacccagccagacagacccgcagtgaccccacctctcctttcccagttcctggaagcagaggccttgatggaacacaggaaagctcagtaaacgttttgaaatcagacgttcaggaaaaattagttaattttggaaaactcagctctcctccccaggaactcctgacctgaggggggtttattccccctttacggggttgtggcacctgccggcccccgtgggctccgcagcaccacctgccggccctcagccaacctgggctgcatcccgtccaccggactcacaggccccacctccaccccgcccgccccttgcgggccagcccagcccccacacagcctccctgagccacatacccggttaggaggtggaaagcatctctttgtcgagggtcccacaagaacctgaaatgagggctgtggtggctgaagggcagcctcccaaaagatacaaccaggccaggcccagtggctcacgctgtaatcccagcactggggggccgaggtggaaggatcacttgagcccaggagttcgagaccagcctggccaacatggtgaaaccctgtctttttttttttttgagacagagtctcactctgttgcccaggctgcagtgcagtggtgcgatctcagctcattgcaagctccacctcccaggttcacgccattctcctgcctcagcctcctgagtagctgggactacaggcacccgccaccacgcccagctaattttttctattttcagtagagacggggtttcaccgcgttagccaggatggtctcgatctcctgaccttgtgatccgccggcctcggcctcccaaagtgctgggattacaggtgtgagccaacgcgcccagccccgtctttaataaaaatataaaaattagctaggcctggtgatggactcctgtagtaccagctgctcaggaggctgaggcaggagaatcgcttgaatcctgcaggcagaggctgcagtgagccaagatcctgccactgtactccagtctgggcaacaagagcgaaactccgtctcaaaaaaaaataataataaaggccgggtgcagtggctcacgcctgtaatccccgcactttggaaggctgaggtgggcaaatcatgaggtcaggagatcaagaccatcctggctaacatggtgaaaccccatttctactgaaaatacaaaaattagccaggcgtggtggcaggcgcctgtaatcccaactacttgggaggctgaggcagaattgcttgaacccggaaggcagaggttgcagtgagccaagcttgtgccactgcattccagcctgggtgacagagtgagactctgtctcaaaaaataataataatactcatgcctataatcccagcactttgggaggccgaggccggcagatcacgaggtcagaagattgtgcccatcttggctaacacatggtgaaaccccgtctctagtaaaaatacaaaaaaattagccacgtgtggtggtgggcgcctgtagtaccagctactcgggaagctgagagaggagaatggcgtgaacccaggaggtggggcttgcagtgagctgagatggtgccactgcactccagcctgggcaacagagtgagactccatctcaaaagaataataataataataataacagtaaaaatagccaggcatggtggcgcacacctgtagtcccagctacttgggaggctgaggccggaggatctcttgagcccgggaggctgaggctatagtgagctgtgatcacaccactgcactccagcctgggaagagagcaagacactgtatcaagaaaaaaaaaatgtgctggagcgacacagtcacagaccaaggacaactggagcccctggaagctggagaaagcaggaagggtcctccctgcagcctccagagggagcacggtgaatgacaccatgacctcagatgtgtggcctccacagctagtaggggacgcatctctgttgctttcaccccggcgtgttgtcatttgttacgggagcctcaggagacaggcacaggatgatcccttccgagggtgaagctctgacaccaacccaggagaggggaccaggtggctctaccagtatcatgaccccggaccagcaagaggatgctagcatgcaacctcccacccaaccaccgggggcggctgtaggcaaaggggggtcctgtgggtgcccgcagagcagacgcctccaccaggcatcccttccagcccagggaaagggggtgcccatacacagtcacagcatcacagcaacctggggtccggccggcctcgccctatgtccccagccggccctcgtgtccccccgtgccctccctgggttccctggccctggctcagggactagcacgtgggaagtgcatggtaaatactcgctaatgacgatgattaaacaatctgcaaaacagaaagcagggaccccagaggcacgaggttggcactagagctcaggggctccagggaaatgtctgtgagttaatgaagaaccccgccccagctccacccggagcagcaagaggaagctcacctaaagacccttcccttatcccaacagccctcctcactctcacattttctgtaaacccactccactgcatttcagtggcactaagtttctttcgtattttttttctttttttttttttttgagacggggtctcgccctgtcgcccaggctggagtgcagtggtgccgtctcggctcactgcaagctccgcctcccgggttcacaccattctcctgcctcagcctccccagtagctgggactacaggcgcccgccactacacccggataatttttttttttttatatttttagtagagacagggtttcactgtgttagccaggatggtcttgatctcctgacctcatgatctgccggcctcggcctcccgaagtgctgggattacaggcgtgagccatcgcacccggcctcgtgttttgtttttctttcttcttttagatggagtctcgctcagtcgcccaggctggagtacaatggtgcgatctcagctcactgcaacctctgcctcctgggttcaagtgattctcctgtctcaaactcccgagtagctaggactacaggcacgtgccaccacgcctgataagttttttttttttgagacagtgtcttagtctgttgctcaggctagagtgcaatggtgctatctcagctcaccacaacctccacctcccaggctcaagcgattctcctgcctcaccctccttagtacctgggattccaggcacaaaccaccatgctgggctaatttttatatttttagtagagatggggtttcaccatgttggccagggtggtcttgaactcctgacctcaaatgatccacctgcctcagccccacaatgtgctgggattacaggcgtgagccaccgcgcccagcctaatttttgtatttttagtagacggggtttcaccatgttggctgggctggtcacaaactcctgacctcgggtgatccacccacctgggcctcccaaagcgctggtgagccaccgcacccgaccccctgttctatttttaatagaagatatttcagcccctaatctccaagctcggccaggtattgccaggtggcgggatggctgggacctggaagctcacctggcccaggtgctggggaaagctcctccgtgcagcagcagaagaaagtcctgtctggccgagaggagcagctgcaggtgatggagaaggccacacaggctggtggcccaaaccccacaggcaggtgcaggagtgcccaggccgcatccaggtggggacatgtggtcagaatcagggcctagaaccctggggagggtgcggcgcaggctgggacctaggatgttgccactgtgagatctccatgggctgagcctgcttgggccggaaagatgccagcctcgatccaggagtttcctgaaaagtccccataaaactggccattagacatgtaactggccatatgatgccagatatacatgtaactggccaggcgcggtggctcatgcccgtaatcccagcgctttgggaggctgaggtgggtggatcactaggtaaggagttcaagaccagcctggccaacatggtgaaacccagtctctaattaaaactacaaacattagccggatgcaatggcaggtgactgtaatcccagctactcgggaagctgaggcaggagaattgcttgaacccaggcggcagaggttgcagtgagccgagatcgcgccactgcactccagcctgggcaacagagtgagactctgtctcaaaaaagaaaaaaaaaaaagtgagtcggggtcgggcgcggtggctcacgcctgtaatcccagcactttgggaagctgaggcgggcagatcacgaggtcaggagttcgagaccatcctggctaacacggtgaaaccccgtctctactaaaaatacaaaaaattagccgggcgtggtggtgggcgcctgtagtcccagctactcgggaggctgaggcaggagaatcgcttgaacccaggaggtagagcttgcagtgagccgagatcgcgccattgcactccagcctggacgacagagcgagactctgtctcaaaaaaagaaaaaaacgaaaagcgagtcggcccacagggtcctgtttcagggtctcccaggggcatggacttttccagactggtctccaagataacagaaaaaggggctggaggccctgggagcggctccccaggaaggggagacctcgtgcctatccatgctttcttccctgcctgaattccccaacacgagctgagcgcctcctgtgtgccaggcgcgttccgggttcttgggttgcatccgggagcacctggtccgcaggtacgcagaggatgaggaaatggacggagccagatcccctccgcttccttgtgaaggcggagagactccggggccggagctgcggcgctggcccgaccaacccctgcgccccctgcaccccaacccggggcctggggcgcgcgggaggtggacgaagcggtaggtcccgggttcccgcgaggtgggcggggagccgcagcgccggggctcgtcagcagagggcgccggccccgggacgaggtgcgcatgcgtcctgggggcgctttccggcagcgtggcggaaccagccacttcgtttcgcgccgtttagcgacacctgcgcgcggcggcagtgcggccgtcatggcgtcgcccttcagcggggcgctgcagctgacggacctggatgacttcatcgggccgtctcaggtgggccggcctgggcgggcggggtcgaggctgcgctcggtgccctgtcgcgcggagggaaattgctctgcgccccacttcctcccctgaggaatgagatccgaatcccgggagcccggtctgggccgtcagggactctatcgacccgggcgcggggcctcagacactgaggcccgcttcttaccaacaaggaaactgaggccagggagggcggcgccccccaacccgctcctgtgccccatggtgtccgggcgggctgcgtgggagggtccmgtggtcgcgggctcgcgccggcctgcccaacccagaggaggcagcagaggcggctcccacacatccctaaccctaacccgacccctgggtcgcagctggagggcggcggggcccgggccggggcctcttccccttcccctgcgcaggacgccttgtcaggcctcaggacccccaagccacagcctttgcatctgcataaacgggtgcggtggggaccccacctcatttgagggcagtaggggcggcccgctagacgccccgcagtggctcctcagtagagctgtccttaacgtcgccctggtgggccggacagctacccttgaacccgggaggctgcaggcgcccttttctgggtgcacctgcctgtccatgtccaacagccccgcggggccagagctgagcagggcgagaggcgggctgctgggagcgcttccggcagggatgagctgggaggcggctttctgggctgccagggttctcaaggagaagagagagaaatccacttgtttcccgggcactgagcaggaggtggtctccaaacagatccaagcacacgtcctctcgatgggcagtgcaactctggtctctgtggtggtcacgccccctgttcacgtgaagggtgaaggtcagtgttggtggtgtctccgcaggtgggtagtttgcaggcgctgttagcactggccttcctgcacactgggaacttcagtgccgcaggatgttgggaacccgatccctgggtgagagcagtggggcaggaagaagacggtgggaccagcctcagtccctgagtgcatggctcctggcagagccttcaggctgtgcggctgggcagccatccttgaggcctggcctcccagggaacctccgcccactcacaggggctgayttggggtctcttcctgctctaggagtgcatcaagcctgtcaaagtggaaaaaagggcgggaagtggcrtggccaagattcgcattgaagatgacgggagctacttccaaattaaccaagtaaggcacaggaggctgctccacyatctctcctgcccggctgatccgaaacacttttctctgcttcctcccgtcacagagcggtgaccccgagacactccaggtctcaccagtcttttcccactggtcgaattcacctgccatctgggaggctgggggtcagggtgcctggggcaggtgaatgagcagcacccaggccaaacagcttgatctgctcagcagaggggctatttgcagagatggtggatcctgtctgcgtctgcctgttccccctagttctaaccatgtaagattttctaattcagacccctcgttcttttgtttgtttgtttgtttgtttgtttgatacagagtctccctcgatggcccaggctggagtgcagtggcatgatctcggctcactgcaagctctgcctcccaggttcacaccattctcctgcctcagcctcccgagtagctgggactacaggcggccaccaccacgcccagctaatgttttttgtatttttagtagagacggggtttcaccgtgttagccaggatggtctcaatctcctgacctcgtgatccacccgccttggcctcccaaagtgctgggattacaggcgtgagccaccgcgcccagcccagacccctcattcttaaagaatagtacttcctctctaagtgataagatcctgatgaaactgttaaaattcaggctgggcgcggtggctcacgcttgtaatcccagcactttgggaggccagggtagggggggcggatcacctgaggtcaggagttcgagaccagcctggccaacccccatctgtactaaaaatacaaaaattagttgggtgtcgtggcgcatgcctgtaatcccagctactcaagagggtgaggcaggagaatcacttgaacctgggagatagggactgcagtgaaccaagattgctccactgcactccagcctgagagacagagactccatctcaaaaaaataaagaaactgggcctggcgcggtggctcaggcctgtaatcccagcactttgggaggccgaggcgggtggatcacgaggtcaggagatcgagaccatcctggctaacacggtgaaaccccgtctctactaaaaatacaaaaaaaaaaattagctgggcgtggtggccggcgcctgtagtcccagctaccgggaagctgaggcaggagaatggcgtgagcctgggaggcggagtttgcagtgagccgagatcgcaccactgcactctagcctgggtgacagagcgagactccatctcaaaaaaaaaaaaaaaaagaaactattaaaattcacctgtctgccatttggactctaaaaaacgtctgcctgatctcatgaaccactgcaccaagagacgatttccagcccagcactgggggcccagcccacaaacgaagggaacccctggaaggtgctggggtgctggtaggcgtggctgtcggtgcagtggcagttggtttggaggagcctgtcagcctctgcccagcaccctgtggcaggcaaggctttgtgccttggggcagaaccaacgtaggaatacaaggcgagctcagattgtgatacacaggcctagcagagagctgggctgcgaggggttcccacacagttcccacccagtcgccttactcctctggctgtattccgggccactgcagcacccctggccctgctcaaaccattcctgcctttgcaggagaagttgggggagctcgagctgggtgcgttttgcatgtaagaaaagttgctgaggcatgtcccggaggcccccgactggaacaccttgttcctgcatctgttkggcgagtctgacggttgtttctgccccgcccaccggaggccaggctcccaggcttcctccctctgctctcctcttcctgtgccttcgtsctttcctcctttgtcctcagctttcccgcctcctcctttcagagcccaccttcggcattttcctgccctacagccctgtgagtgtgcaccggggccagcaccccgtccagggccccatgggtgagtggggtggctgctgctttgctgagataccagtggcaagccttagtcctgtgattcggatgcactaaccaagtggtaccaagaagcagacttgacggcattatgaaactgtagagcgtgcgtgtgcatttttgtaatacatacctaatttttaaaaattcagcggcacacaagcccagccagcagccatgttggttgtcggttatgagctggactccactatcctctgtctccatgtcctcgtgcagagggggcccctgtgcaccgggttcttctcccttgtaggacggcgggacccggaggctggagaaggccaaggtctcgctaaacgactgcctggcgtgcagyggctgcatcacctccgcagagaccgtgcttatcacccagcagagccacgaggagctgaagaaggttctagatgctaacaaggtaagcagtggtcggcctggtgactctgctttaacctgaaatccatcccagcagccgacaacgcgttttgccaagggcagctcgtgtggtgcygacgtccgtcgtgcgggtggcgcctgcctttttgaggcttggaatcttggtgatttgtcagtgggctccagtggtgaacgtgtcaggccccaaacttcaggttctaaatatacatcaaaatgacacccctactgggcgcgggggctcacgcctgtcataccagcactttgggaggctgagccgggtggatcacctgaggtcaggagttcgagaccaccgtggccaacatggtgaaaccccgtctctactaaaaatacaagaattagccaggtgtggtggcacatgcctgtaatccaagctactagagaggctgaggcaggagaatcgcttgaacccaggagacagaggttgcagtgagccgagattgcgccattacacaccagcctggtgatagagtgagactccatcaaaaaaaaacgatacccttggccaggcacggtggttcacgcctgtaatcccatctacccaggaggctgaacctgggaggcggaggttgcatgcagtgagctccgatcgcaccactgcactccagcctgggcaacagagtgagactctgtgttaaaaaaaaaaaaaagactcttgatggagctggcctgccctctccacagctgacagcatctcaccgtgcggctctggccaccaggaatcagcataaggccagcagagtaagcagcgtcttccccttgctttgcagatggcggcacccagtcagcagaggctggttgtagtttcggtctcaccacagtctagagcatcgctggctgcacggtttcagctgaatcctacagatactgccaggaaattaacctcattctttaaaaaaataggtaggctttgaacctggggtaacactgccgctccaaatcaagggggcgtctgagtaagcccaggcccctcgcgcctctgagtcactgacacgctacccagccctgaacttcagcgctacagaaactttattccctctgtgacctcagcctgaagttttgatttgacatttgagagcagggccttctcacagaacacgtctgcattctgactgtgcactttctctaagctggggctgaccaactccttgtactttttagctgataatattaaggcactctctccggggctctgttgggttcagccaaggtcagcttctgctgactttggttatgtgcctggagctgggcttggggaggatctgggtgtcttgagagcccccagctaactaggctccagtgcctggtgtctcactgggaatgaaggggctggacctcatggttactgtgtgcctttcacaggtaaccaccatgtccagtcccttcattcccagtgaggcaggcctgtgcgccttgtaaccagcagactgcctgtcatccagctgtgtcccrggtccctcacactggaaacctggtgacactggcaggtgccccatggctcctgtctgacccatatccagttggtgcctgagcagtgctctggcactgggagcctgacctggtgtcccagggaaaacctggcctggggcagcccatggttctccagatggaaggtgtggatttcgtccccaccagaataggaagcaagttcaaagatttttacttagagatgatgatgacgggcaagtggggcacagcgagtcctccgaccacgggttacgcgagggaggaatgacaagtcaggcagagagagagggacccacacgcgggtgcctctgctgggtccagggcacgatcaggcaggtttactgagcagttctaatggctgggcttggagctggctggcgtgttccaggagtcctgctgtgtgtgaggggtggccactatggyaggtctgcacagtcagggtccgaggggccagtccagcaggcygmgtccagctgtgccctagggagggtcaccgggagcagcgcacgtggcaattccctggaccagccacgctgaagagctgggagggtggaggactgagctgctgggtggctgcctctggggtgggaaaccaaggcctgggttcacaggggatgccgaggcaacgtggctttaggaggtccccacagtggggctggggctttggcrcaacgtggctttaggaggtccccacggtggggccggggctttggcacggcaagcaggtgcgacacacgtgccctggcagcaccatggtggtccacacgccggcgtgtgctcgygtgggcgtcccgcatggggttaaycaggcacccaccttcaccttccaggggtgcacttcgtcttcgacaccgccttctcaaggcacttcagcctcctggagagccagcgagagtttgtgcggcgattccgaggacaggccgactgcagacaggcrctgcccctgctggcctctgcctgcccaggtgtgctcatggtgcgggtggtgggagagtcaagttcaagtgcagttgaaacgtgaggtgatatggacacaaatgacaaggcgggggcatggggggtggagacgcaagcaggttttgcgggacgggttggaaatgttggcacaaatggccttttctggagaagaggctgccctcccgtgggagccacgcgcagtcacctcaggtccctaggcggtgtcgcctgcacgccragctccgcgtggtggtggggagaacaggaatgagcactctttaatgtcatcatgatctcctgtatgagcgggcccgcccccagaatgtcgtgctgctgcctgtgggtgcgggggccgccgtgygcccccgccagccccgtgtgccccctgtcacctcaggctggatctgctatgccgagaagactcacggcagcttcatcctcccccacatcagcaccgcccggtccccgcagcaggtcatgggctccctggtcaaggacttcttcgcccagcagcaggtaacggcgttgggccagccccagactcaggctggggagcggccagaagtgactttgctggcctcttgccatgaggctgcaggaaacagagtcctcgctgtgctgtgcggccttccccagcacacctccacccttgttccctcctggttcaggcccttcctcttctgcagcagagggcttcgttctgatccagaggtgctcactgctcacccagaggcagccaggcctgaggctgagggagcaggaggccctgggcagtccrggcctggagcccacccctccggccaccaggtccacgaggatgcccagcacgacccccacctgaggcccagcgggatagaagcctgaagacactcagccagcagggggcgggagagggcgagggcggccccggtggtgcctgggcctcgagcgcccatgtcccctgcggcacctcttgcctgactgcacgcggattttcacccggggctggagctggttggttcccccgtgacatccgtttccccggctgctgtgcagtgagacggcccgagccgtgggaaggccacttctcctccgctggacttggctgttagggagcgcaggcacactgggaatgggtcagtgtcattttctgtcacagccagggcccgtcctgtccagggacacatccgcagagccggcaggaggcttgctgggaaatggagtgaggctcactgtccctcggggtccggcctggctgcaggatggctgagttccaggtcccgtctcagccaccttactgctgggattggggagacaagtgtttgtttctccttgtagcacttgacccctgacaagatctaccacgtcacagtgatgccctgctatgacaaaaagctggaagcctccagacccgactttttcaaccaggagcaccagacacgggatgtggactgtgtcctcacaacaggtgcggtcacgccgtgcggccctgagccctcaagcctcctggtctgattcctgagccctgggcacaggtggcgactgcccaggatcctgcctgtgggggccctggctggagtgtgggggctcgcrtgcgtgcacgtaccttsgtctctccccttggagccaggtgggcccatttgcagctggcctgtcttggggacctgcagccaggtggcgctcagtaatacctccttgttggctctgaaatgagtctttggaggtgggcagagattctcgaatgcagcctcttcagctcccrtgagtcaccccattcctgagtcgagcagccccacagtctcccaaatgtgaggcagaaaagcaaactgtggccgggcatggtggctcacgcctgtaatcccagcactttgggaggcagaggtgggtggatcacgaggtcaggagttcaagaccagcctggccgagatgatgaaaccccatgtctactaaaaatacgaaaattagccgggagtagtggtggtgctcctgtaatcccagctactcgggaggctgaggcaggagagtcacttgatcccggggggcagaggtcgtagtgagccgagatcgtaccattgcactccagcctgggcggcagagtgagactccgtctcaaaaaaaaaagaaaagcagactgcctaagaggatggacagatggacactgggtgagcagagtggcctggccgctggcacacctccctgggcaggaccaggcagcctccagaggggcttcaggagtgaccgggcctggcctccccaccacgggctagggtggacatttggggccttctggggccaaagtgcagactgctggggatgcaggtggcttggatgttctctgactttgttgctgggatctccgctaaagagtrtctgcgctgtggcttctttgcaggagaagttttcaggttgctggaggaagagggcgtctccctccccgacctggaaccagcccctctggacagcctgtacgtatgtctgccaccaagaactgttattttagcttctaacgctgcctctgaggatagcatccccctgctctgggcttgcctccccgcagcccatcttggcgtccacagaagtggctggatagccaggcgcagtagctcacgcctgtcaccccagcactttgggagrccaaggtgggcagatcacctgaggtcaggagttcgagaccagctcggccaacatggtgaaacctcatctctactaaaaatacaaaatttagccagacatggtggtaatccatgccaggccctgtaatcccagctacttgggaggttgaggcatgagaattgcttgaacccaggaggcggagcttgcagtgagccaagatcacgccactgcactccagcctgggcgacagagcaagactccgtctcaaaaaaaaaaacaagaagtggctgggcccctgtgatggctggtgacacaggagctgttcctctgtgtctgtgacttgtctcccacctggaaatgcaaacsctcatgtgtgagggacagaggccctgctcrggaggttggcaggcagcagccccagctgtgctgaggcccctccctccttgccaggtgcagcggtgcctctgcagaggagcccaccagccatcggggagggggctcggggggctacctggagcaygtgttccggcacgcggcccgagagctctttggaatccatgtggctgaggttacctacaaacccctgaggtcagtgggatgggccagatctctgggcagagcggccacacagcccccagccttcctcgggctgctgcctcccctggggtcctcccacagaggtgggctgggtggagggcagcctgcagggtttggaggggaccctggggccaggcagggccctcctggcgggctcagggtgtgaaggcacctaagcactccaggcctcagtcggcccattgtgggggatggtgaccctgagcccgagaggccagcatgggcaaaggtgatgggtgcctggcgcaggcacgcgaccacatcccaggagggagggccagggcctcacagacatccctggggagggaggcctgtttcacagacagcccgaggctggaggtgaggtcccctgctggactcaaggaagtgagccttccaccctctctctccgttcttgtccttccctctgcccaggagagagggagagagccctgggaggtacccggtcatcccctgaagcccagcaggcctccccttccaggcaggcaggagcctggtgggtgtgccatgtagacaaaccccgcctgtgccccccaggaacaaagacttccaggaggtgacactggagaaggagggccaggtgctgctgcacttcgcaatggcgtacggcttccgcaacatccagaacctggtgcagaggctcaaacgagggcgctgcccctaccactacgtggaggtcatggcctgyccctcaggtagctcctgcaagggacaggacacgaggaccccttctgggagcagagctgtgggccaccatccaccaggctgggagtgggaggaagtggggcacagagggggcccsgtcacctccctgctccctggtgrtcaggaagcttggctggggcgcaggctgtgacccctgtcccgtctgctytcccataggctgcctgaacggcgggggccagctccaggccccagacaggcccagcagagarctcctccagcacgtggagagactgtacggcatggtccgggctgaggcgcccgaggacgcgcctggggttcaggagctgtacacacrctggctrcagggcacggactcggagtgtgcaggtcgcttgctgcatacgcagtaccacgccgtggagaaggccagcactggcctgggcatccggtggtaggggctgcaggaccaggactcccaggaggccgtgtccatgtgtgacagcagaaccacatgccccaagaccccagggctycccccaaaattctgagtgagctgcagggtgtgctgggacccgagtaggagctaggactagccaggacccgcagccgcctcgtcacctccagttgggtgcctctgggttcccactggctctgcccaggtggggtggggtggcccaggcagcagaaggttccctgaggtcccagagcctgttccgttggccctgggccgaggcccacaggtgctgcccttgctgctgctggtcgggcacccaagtgcgtgaggggcttcagcctgtcccggggttgcctgaggcagagcaagacgggttctcacccctgacttctggaggcttcccttgaagctctgtgcaaaaggtgggagacagagctggacctgcaggggtggtcccgccacaaccctgcgtgtggaccctggcaggggggggtgccaggcccctggaaagcaggggttaccgttacgaggctgtggtccggggcaagccaagtacgaagcagcagccatcgcgggctgcatcatcccccagccaggtccccaccaggcctgtctcccagcgtttgtctaataaacgcacccctcctaaaacacgcctacgaaaacagctcctctcctggcacatctgccaacactgacaacggcctttcaaagctttattcatagttcggaggccccgtgtgccccacttcccagacacccaggtctcggcgcccacacaggccccactgagtggtcctgtgtgtccacccgggaagcaccaggttgcccaccctccgaggctgggcagatggctggccagggcctcgaagaaggttccagaggtggccctcatgtgggtccagctggccgaggtcacgaggagggacgcaggccccagccctgtgagggtctgggtggctcagtcgtgtggggctgcactcaggagcccccactgcagcgcaaggagggcccgcgcctgtggctgccgcggctcgcccgcctgttcgaagcgcgcccgctccttgcatagcgcctccaggacgtcggcggggaccgccttgcccgtgaacttgcgcaccggctcctctctgcagggaggggtgcagtgaggcgcagggcccgctgcccacgcgggagcatggcgccgaggggtgggcgggcaggcaggcacttaatgagcagcctcccccaagccagagatgctcactcagcccaacacgcagtccccagatgccttcctaagggtccacgtaacggtggaggccccgggacaacagccatactcacgccacccgcaggaaggggttgtagaggcgctcctcgcccagagtcgacggcacagtgggcacgtcatcctcatccctcttctggagtgaccacaggccccggtcaccattaggccttgtctgagagccccccccaccccgaagcctgttccctccccccccaccctcttgccgcggcgggaaaggggccgtgccttagcccaggacagcttggctctcacgtggtcgttgcagggctccactttctgggcaaactccaggttgctaagcgtgtgctcgtggccgcagaacaccttctggaggaagagcgctcggtgagcgcgcacgcggccaggaagcggggaaagtgcttgcgccgggggcctggcctcccctgcccggtctgccctcaggtgggcattcactctgcacccctagcacagtgagggtgcggagcgtgggggctgtgcccacgggagaagaggggagggcccaggcccgctcaccgtctcggggggcagggtacccagctcggccaggctctggtacatctgctgggcgctgccctccaggcacgagccgcagccggccaccgacagcgcgtcgcctggcgggggagggcgggtcagagcagatggggcggggccggcgggaggcggggtgggcgcgctccgcgctgcgggtacccgagaacagggcgggtgggtccgggcaatcgtcctcccacaggaagtagctcatgtggccggcggtgtggccgggcgtcaggaggcaacgcacgtggatggccccgaactgcggcggaggagcaggcggacctgtgagggcgggtggacccggggcgccctccccgcccctcccgggagcgcgcgctcacccgcagctcctcgccgtgcgccagcctgcgcgtcagcgagaagatgcgctcgtccgcgcccagcaccgccagcccgggacgaagccgcgccagctccgggtttccccgcgcgtggtccctgcgggcgggcgggcgggggccgggttaggtcgggttgggacaaggcggcgtcctcgtgcctccccgcgccccgccggcgctcaccagtgatggtgggtggtcagcacagcggtcagagacaccccctcccggcccacgatctccagcagctgaaagggacgggagtgacggtaacacagacggtcccggtggcccactccctccatatcgggatccgccgcgctcactgccccaggccggccagagccccggggagcgccggggagcggggacccagcgggcggtgactgcgcccagcgcgtgcagggaccgccaggcagcagcgaaagggcggaggccagaggtgccgtaacttcagggagccccaagataaacaaggaaccccagccgccaatgacttccggagagcagagcacgtgggggctcgctcctaccaggggggtcggggaggctctcgggggacacggccgggtccctgcggcccgcggcctgccctcaccctcttgggcacagccacgtccacggccaccgcctcgcgcgtgagctcctcgatgaccaggtacatgtagttgtcctcgagcacggggatgaccttgaccttcatggtcacggagctcggccaccggtgcctgctccaaaacaggccccccagcccacggtgccccttcagggcggggcccgctctccacaccctaggaagggctgtgcgaagcgggctcggtcaacacgctgggggccaaaagagaagcccggctccccaggaactccccggcactcgcgtggaattccacgcaccgggctccagcaggagcggaacccggccggtccccaaccagccccggctccgcccccagtccgagccccagtccccaaaggccacgccttcctcccaggccccgcccctcggccccccgccctgccgccgcaagacccctgacccgggacagccgcgttcccccgccgcccgcctcaccggcacggctgtgctgaggacccgaaggacagactgacggaggcggggcctcggccgccggtcacggggtccggactgagcgcggcgctgggctcgggagccgccaaccgcccccctccgcggacgcgccccgcccccgcccccgcccggcccggatcctgcgcgcgatgagaccacaaggcccgccggcggtgcgcgtgcccggtggggcgccacgcgcacgctccgaccccgccgcgcccggcgctggcacctcctccaggaagccctcccgacgccccggctgagccagtcgtttccgagttctccggcccctgatggggacgtctgcgcccctcttctcaggccagaggtgcagagatatacttcccccgtcccggggctcagccagcactgctaggtacacagaaggtgtccagcgagtgtagctcagggcatcctgcgggcgggctgccgctccgttccgcgtgctcgtccgctgcgcccaggctgggcgctttcacgcacctggttccatctgcacagggtatgtgcagggggcgctgggccgcattccccagatggggaaacggaggcatggagagaggaagagctatcctccctcctcagcaaccaccggtctggccggcccctgtgggcggtgccctgggagtcacctgggaccaacagaggccttggcaacgcacttagcagtgccagtggcagcagcagccatggggaagccgggcgtggaggcagcaccgggctcggagctggccagggttccctagcctatggagcacgcagccaccacaggccccaggcctggacctccctctcggcgggtggagaatgtgagtcctctgggacttgccgctcctgccatggggttgaagtctgcccgttcccccaaaggccaggagggtgcaggttcctgcaccctgggcctaatttcagccaggagagggacttttacagctcagccaggcagggaggcgggactggtgactgcatgggagtggggccacagcccagcctgggacccacctggggaatgggtggcggtacctccccaggttgtgctacgagccaaggactggctgccaggagctcctgggggcaccgcagtgtgggccaccagcttggaagcagaggtcccaccagatctagcgctcaataaggagcagcagctgcaggtgggtgtggggccccagcgtgctcgtgaggagggagggtgccagcagggcccacagacgccacctctcacctggccacccacagatctccaaggagctggtcgacattcagatcacaacccaccacctacatgagcagcatgaggctgaaatcttccagctgaagagtgaggtgagcagccgtgtgaaccagcctcagtgcatgggggacggggggtgcaggcccaggacacgtgccctgcatgggcatgcacacgcacatggcatctgtgggtctcagcctgcctctgagtgctgcgcgcccctgagcgtgcaccgggtgaatgttcacctaccccaggtggcccgcgggcaggtgcacctgctcatgccagttgtcccacagatccttcggctggagagccgggtactggagctggagctgcgaggagatggcaccagccagggctgtgcagtcccagtggagtctgaccccaggcatccccgggcagcagcccaagagctcagacacaaagcccaggtgcctggacactctgatgaccacagattccaggttaccatgagcatatggagagcctggctgggaaaggccagagggaagcctcagcaggggcctcagtgaaactggggctcacccaccccttagctttccctgccctcccttccattcaggtgcagcccaagaacaccatgaaccccgagaatgagcagcacaggctggggagcggcgtgagtgtgcagccacctagctcaggggagagggcagcaccagagaccccaagcctagggtctcatccagccagccctgtgtgccccacagctgcagggggaagtgaagtgggcgctggagcatcaggaggcccggcagcaggcactggtgacgcgtgtgtgagtggccatctcacctggggccccatcctggagcagagagaacccctgatcgtgggcctgctgagcctcacccccgtgtcttcagggcaaccctgggccggcagctgcagggagcccgagaggaggccagggcagccgggcagcgactggccacacaggctgtggtgaggctctgccctgactgcttggagacctggagggtgggggccccagaagctcagccggggtccactctcagggcacaggtggagggctgcttccaccccaggtgctgtgcagctgccaaggccagctccgtcaggcagaggctgaaaatgcccggctgcagctgcagctcaagaaactgaaggatgagtacgtcctacggctgcaacactgcgcctggcaggcagtggtgagccctgcaggagcaccctgaggcctagggagcccaagcctggcctgggtgtgctggatagcttcagggagaccccagggccccggcactgctcagcctgctggggtggggggatggttggaaaagatggggggtgggccccatgcggacccagcccgccgcctccaggagcacgcagatggtgcaggccaagcgccagccaccacggccctccggacattcctggaggcgactctggaggacatccgggcagcgcaccgcagccgtgagcagcagctggcccgggctgcccgcagctaccacaagaggctggtggatctgagccgcaggcatgaagagctactggttgcctacaggtgggccccgctgggatgggaggtgtcaggcatctgtgggtctctaagcctctgtgcctcaaaggcttggtgtgcagcaggagtggccccagacagacactagcctaccctgacagggcacctgggaacccccaagctatttttgacatagccagcttggacctggaaccattgcccgtgcccctggtcactgacttcagccatcgggaggaccaggtgaggctagagacccccagaagctccaggcccgggtgccccccacccacccactgccccacactggccccaggcctcatcctgggctcaacagagacctcagccccgggcctctgaggggcttgccttgttcagccaactgaaacgtccccaccacaaacctctgtagcacggcgggcctggggcactgctctcatccccaaaaaagagacccggtggagcctcccaggggggaacatcagagccacagtgagtgccctcatgggtgtgggggaggcctgtgggggatgagcagagagcacaacgcctgcaccctggggcccccagttgctccaccaagcccccgccagacagggtctggtcacagcaatgcactcagtggcaca

SEQ ID NO: 97716 - DNA, 13905 bp, Homo sapiens
gtacccagctcggccaggctctggtacatctgctgggcgctgccctccaggcacgagccgcagccggccaccgacagcgcgtcgcctggcgggggagggcgggtcagagcagatggggcggggccggcgggaggcggggtgggcgcgctccgcgctgcgggtacccgagaacagggcgggtgggtccgggcaatcgtcctcccacaggaagtagctcatgtggccggcggtgtggccgggcgtcaggaggcaacgcacgtggatggccccgaactgcggcggaggagcaggcggacctgtgagggcgggtggacccggggcgccctccccgcccctcccgggagcgcgcgctcacccgcagctcctcgccgtgcgccagcctgcgcgtcagcgagaagatgcgctcgtccgcgcccagcaccgccagcccgggacgaagccgcgccagctccgggtttccccgcgcgtggtccctgcgggcgggcgggcgggggccgggttaggtcgggttgggacaaggcggcgtcctcgtgcctccccgcgccccgccggcgctcaccagtgatggtgggtggtcagcacagcggtcagagacaccccctcccggcccacgatctccagcagctgaaagggacgggagtgacggtaacacagacggtcccggtggcccactccctccatatcgggatccgccgcgctcactgccccaggccggccagagccccggggagcgccggggagcggggacccagcgggcggtgactgcgcccagcgcgtgcagggaccgccaggcagcagcgaaagggcggaggccagaggtgccgtaacttcagggagccccaagataaacaaggaaccccagccgccaatgacttccggagagcagagcacgtgggggctcgctcctaccaggggggtcggggaggctctcgggggacacggccgggtccctgcggcccgcggcctgccctcaccctcttgggcacagccacgtccacggccaccgcctcgcgcgtgagctcctcgatgaccaggtacatgtagttgtcctcgagcacggggatgaccttgaccttcatggtcacggagctcggccaccggtgcctgctccaaaacaggccccccagcccacggtgccccttcagggcggggcccgctctccacaccctaggaagggctgtgcgaagcgggctcggtcaacacgctgggggccaaaagagaagcccggctccccaggaactccccggcactcgcgtggaattccacgcaccgggctccagcaggagcggaacccggccggtccccaaccagccccggctccgcccccagtccgagccccagtccccaaaggccacgccttcctcccaggccccgcccctcggccccccgccctgccgccgcaagacccctgacccgggacagccgcgttcccccgccgcccgcctcaccggcacggctgtgctgaggacccgaaggacagactgacggaggcggggcctcggccgccggtcacggggtccggactgagcgcggcgctgggctcgggagccgccaaccgcccccctccgcggacgcgccccgcccccgcccccgcccggcccggatcctgcgcgcgatgagaccacaaggcccgccggcggtgcgcgtgcccggtggggcgccacgcgcacgctccgaccccgccgcgcccggcgctggcacctcctccaggaagccctcccgacgccccggctgagccagtcgtttccgagttctccggcccctgatggggacgtctgcgcccctcttctcaggccagaggtgcagagatatacttcccccgtcccggggctcagccagcactgctaggtacacagaaggtgtccagcgagtgtagctcagggcatcctgcgggcgggctgccgctccgttccgcgtgctcgtccgctgcgcccaggctgggcgctttcacgcacctggttccatctgcacagggtatgtgcagggggcgctgggccgcattccccagatggggaaacggaggcatggagagaggaagagctatcctccctcctcagcaaccaccggtctggccggcccctgtgggcggtgccctgggagtcacctgggaccaacagaggccttggcaacgcacttagcagtgccagtggcagcagcagccatggggaagccgggcgtggaggcagcaccgggctcggagctggccagggttccctagcctatggagcacgcagccaccacaggccccaggcctggacctccctctcggcgggtggagaatgtgagtcctctgggacttgccgctcctgccatggggttgaagtctgcccgttcccccaaaggccaggagggtgcaggttcctgcaccctgggcctaatttcagccaggagagggacttttacagctcagccaggcagggaggcgggactggtgactgcatgggagtggggccacagcccagcctgggacccacctggggaatgggtggcggtacctccccaggttgtgctacgagccaaggactggctgccaggagctcctgggggcaccgcagtgtgggccaccagcttggaagcagaggtcccaccagatctagcgctcaataaggagcagcagctgcaggtgggtgtggggccccagcgtgctcgtgaggagggagggtgccagcagggcccacagacgccacctctcacctggccacccacagatctccaaggagctggtcgacattcagatcacaacccaccacctacatgagcagcatgaggctgaaatcttccagctgaagagtgaggtgagcagccgtgtgaaccagcctcagtgcatgggggacggggggtgcaggcccaggacacgtgccctgcatgggcatgcacacgcacatggcatctgtgggtctcagcctgcctctgagtgctgcgcgcccctgagcgtgcaccgggtgaatgttcacctaccccaggtggcccgcgggcaggtgcacctgctcatgccagttgtcccacagatccttcggctggagagccgggtactggagctggagctgcgaggagatggcaccagccagggctgtgcagtcccagtggagtctgaccccaggcatccccgggcagcagcccaagagctcagacacaaagcccaggtgcctggacactctgatgaccacagattccaggttaccatgagcatatggagagcctggctgggaaaggccagagggaagcctcagcaggggcctcagtgaaactggggctcacccaccccttagctttccctgccctcccttccattcaggtgcagcccaagaacaccatgaaccccgagaatgagcagcacaggctggggagcggcgtgagtgtgcagccacctagctcaggggagagggcagcaccagagaccccaagcctagggtctcatccagccagccctgtgtgccccacagctgcagggggaagtgaagtgggcgctggagcatcaggaggcccggcagcaggcactggtgacgcgtgtgtgagtggccatctcacctggggccccatcctggagcagagagaacccctgatcgtgggcctgctgagcctcacccccgtgtcttcagggcaaccctgggccggcagctgcagggagcccgagaggaggccagggcagccgggcagcgactggccacacaggctgtggtgaggctctgccctgactgcttggagacctggagggtgggggccccagaagctcagccggggtccactctcagggcacaggtggagggctgcttccaccccaggtgctgtgcagctgccaaggccagctccgtcaggcagaggctgaaaatgcccggctgcagctgcagctcaagaaactgaaggatgagtacgtcctacggctgcaacactgcgcctggcaggcagtggtgagccctgcaggagcaccctgaggcctagggagcccaagcctggcctgggtgtgctggatagcttcagggagaccccagggccccggcactgctcagcctgctggggtggggggatggttggaaaagatggggggtgggccccatgcggacccagcccgccgcctccaggagcacgcagatggtgcaggccaagcgccagccaccacggccctccggacattcctggaggcgactctggaggacatccgggcagcgcaccgcagccgtgagcagcagctggcccgggctgcccgcagctaccacaagaggctggtggatctgagccgcaggcatgaagagctactggttgcctacaggtgggccccgctgggatgggaggtgtcaggcatctgtgggtctctaagcctctgtgcctcaaaggcttggtgtgcagcaggagtggccccagacagacactagcctaccctgacagggcacctgggaacccccaagctatttttgacatagccagcttggacctggaaccattgcccgtgcccctggtcactgacttcagccatcgggaggaccaggtgaggctagagacccccagaagctccaggcccgggtgccccccacccacccactgccccacactggccccaggcctcatcctgggctcaacagagacctcagccccgggcctctgaggggcttgccttgttcagccaactgaaacgtccccaccacaaacctctgtagcacggcgggcctggggcactgctctcatccccaaaaaagagacccggtggagcctcccaggggggaacatcagagccacagtgagtgccctcatgggtgtgggggaggcctgtgggggatgagcagagagcacaacgcctgcaccctggggcccccagttgctccaccaagcccccgccagacagggtctggtcacagcaatgcactcagtggcacatccccaccctggggtccctccgtgggtcccggcgacactgataatcacaggaaagagaagaggggctgctgcaggtggagctggccttgaacacggaggatcagggagagcacacctgagggaggtttccgctgagacctggaggacgcgaggggtgggagcagggcgcctggtgaccgggccagcccttgcctctgggcctccatgttcccagctgtacaatgggcagggctccccaaggaccatttcctggggtttagggcacacccgtgtgggggtggcatccctgttgatgctggagtcactgtctgggctggccttgtggtttagccctcccccagcagccagcagaccccctgggcccgggctgtccctatacacggatggctccaaggcctggggggggcgccacaggagcacggggggggcccatgcctccctcactcactcccaggtgtcccctcccggctctgggaacctgactcagcacggtcacgtctgtccctgtgtcaccatgccagctctcaaaaccactcctcctttcctctcccctcacaggggcctggacgctgcatcctgggcccagatccaccagaagctccgggacttctcccgcagcacccaggtaggaggcaagggctggcccaggcccatcctcacgccatgccccagctcatggcttacatccccatgccaggcagagctggaacgggagcgggcacagctgctggtccgggccacgatggctgaagagcaactttctgagctacaggagtacgtggaccagcacctgggcaggtgggcagagggagctgggtgtgaccccagggccctggtctggttggaatgaaggatgatggctgcctcaggcgctaaaagcagacctgtccacagctgggcaagtcacttaagcatggttcctctgagcaggtacaagcacgaaatcctgaggctgaggaagctggcaggtgcaggggacccctggaaagtgggggctgtgcctccagccaagccccagcatccaaggaccggcagccactaggccgtctcccaaggagcagagcagagcagagctcctcagccagcacagaaccctcccacccagccccccataaaacatgagtcaggatagaacccacagagtctttatcgtgtctaatactcagctggcctgagaaataaggccccccgggatgggggcagaactaggtccgggggcagcctggatgggtatccgcgaggaggcggsctccccagcctgcccaccctcaggaacatcataagcccatactcggtccaggccctcgccaaccgcggtcacaggctgccaggtggggagtgggaagcgcccagacaccacgcgggccccagcaggcagctctgtccgcagcttgtcctccagcagcgggagctgagggagagaacagcagagtagagggggcgggggcggggccggtagaaaacagccgcgctcacccccctagccccaagcctagcacccaccaggcaggcccaggcctcagagcagcaaacaccctggggtgtggctggggcttcccagcggggctggcaaccccgsacctaccacgctaggggccaggaacacagacacgttgcggcagtccctcaggctcacctgccggaagagaagtcgccccrgccggggagaggcctggtgggcaccgggtcatcgcagcttccgagtcccggcccccagccctcgcaggtgtcagccgcaccttgggctgtcagcgggtggccagggatccccaggttaccttccagagatccttgcggcgatagcagacgctgccggcacagccggccctccaggcgtgcagccgcgccagcgccaccagccaggggttcagctcgtagcccacggccgggcggaggccgcacctgtgggccgccagcacctgtgggcaccgagagtgtgggaaccaggatgtgggcaggggcgcccgccrgcaggtgggcggtgtggggcggcgaagacccagacgcaggcacttacgatcctgccgtcgccagagcccagatccaccgtttttccggggcgtcctcgcagcagcgacaacacgtgctccacctgccgcgcgctcgcgccgacgtagggcacctggaccgggtggcggcgagagtccactggccgctcccgccccgcccgcagcccggcccgaactaccacacggcggggcggagctcaccccggccacgcccagaccttgagaccctgagcggcagccgagctcccctgcccggcctggccccgccccgcacctgcagccgcagcggcacgcgccggaagccgggctggagcagcagcgcccacaccgcgtaggctgccaagcccgagccggccgccgcctgcagcagctccagcgcgcccagccgccgctcgcgcagctccgtcagcgcctcgaccgggtcgtcctgctccatggctgcgggacgcgcggctcgtccgcccaaggtccttcccggctcgggtccgcggccctcgcagcctggcctggggctggcggtgtgccctctgcctcctgccgggagccgccgcgcgacaccggaagtggccggcagagcctgcgcggtcggtccgtggcgctgtgcgctccgcccagcccggctgccctcccgcgggttccggcgagctgcagcctcgggggctctgccccgccgcgtccggctccaagcctgcgagggtcggctccgttggtccgctctgcggaccgccgtttgcggcctgtgctggctgctggcgacccgcggaaggggacaggcaggccctgccctgggggagcgcacgtgccggcgggagtcgggatacacccggcgatctcacgggctagagccccagggaaacggggctgcgcgtctttgtcgtggaatgaagggaagtctgccttggagaggggcggtcctggccccagaaccagccgggggctcgcgtggggcggctggagcccagggagccggtgggaaagcggctccccgggatgagacagcgtccaggcgccagcacccccatgactctgcctcggggagactgctgggggcgctccgctgactcggacacccagcgccagccagagcccgggaggacatccttccatttccctcctacagcctgagcgatgagccccagtgggcggtgaagggatggggggtggggtctgagggagaagggcatggaggaggggctgacacggaggagagcttgagcaggcccaagaagacagatgctggctctcaggcgagtgtggtgggaggaaagccggatgtcacaggcgggggcctctggcacctgccagctacagggaaggcagacagccccgggagtggggagatcaccttccttctccagaaaacaacacacaaaaagactgagttcctggaggtgaccttgtgaagctgggggtgggaagcgcaagtggaagagccgagctctgggtcaggcagctgggccacgacctccacacccagggtagggctgaacacccgtgaatgtcgggggttgtctatgcgtgccctggcctagctcctccttagccatccgtggctggggtctagagcccctgcagggacagaggctgcttccagacatgggtatgccgcagaccacagcccccagctcccaagtgcagagtctcacaggcctgcccacgttggccccagccccacccagctcagcgtgtcctgtctcctgggggcctggaacggccctcccaggaaaggaagggtgtatgtacactgagctctagggggagctgacagcgcccattcctgtcctgctgcctgcattattccctgcacctagagcagttacctaggaggcttactggatgaatgcacctaattggactctagcgtgcactctccactcttcttttttttttttttttttttttttttttttttttgagacttgagtctcgctctttcgcccaggttggagtgcagtggcgcagtcttggctcactgcaacctctgccttccaggttcaagtgattcctctgcctcagccttttgagtagctgggattacagatgcatgccaccatgtctggctaattttttgtgttttattagagacggtttcaccatgttggccaggatggtctccatctcctgacctcatgatctgcttgcctgggcctcccaaagtgttgggattacaggcgtgagccactgcgcccaacctccccactcctctcccgtccacaccaggcactctgctgcttggcctttgggcactctgcagccacctgtacctgtgtgaactggcacttgcctggcggtgtctgtgatccacaggccccaggctcctgtagctcctgcccacctgctcacccacactgtctccctatctcccatgccactttggccacctgtccccagggcaggcatgaagcccctggtctaatgctccaagacccatttgggcaccgtggtgctcctgtggccctgtgtctcatgagaagacagctggttgcaaagccagggctttctctgggagggtctgtaggtgcaaggctcaggcacttcctgagacaggtaggtagaagccagggttcggccagggcccagcccagggtgtttgtgaacaggtggacttgggtgtggctgaaaaggagaggttgtaggaagctggccagagaatcagggcaagtgccaaaggtaagggggttgctcggcccacgggaaagcctctccaagacaggagtggaggaggcggtgcaggagggcacacgggctacctccttttctagtgtttgcagaagtgtttgggctgggggcagatggatgtaaggctatgggccccagggagtggtcagggctgaagatgaaaaagtggaggttgtccaagggttattggaggctgccccagaggagcggtcctgtgcctgagccctcagcgtgccacagttgggagaggagagaagcagcaaggaacctgaggaggggcagaaggtgggagaacccccacagtgcatgacacccagtggctgcgctcctcacccatcctcatcagccctgcggcaggcaggtgatctgtgtgaaagggtaagtctcttgcacgtgcagtggaagtcccagggcggcgctggaggtgacccccctccccaggtgtccacagagggcatggcactcatcaggcatctgcatccgctaacctagagaaaggaccgtgtttgtgggccctgcacagctgtgtccctcacacagcctcagtttcccccttgaaagctgggggcttcatctgcctgggcagggcctctggcctccacccccaccccggcccaggcgagaatggaaagccatttctggggctcagcccaggggtccctggcccttgagccatggctgtctctttcccaggatccgaggggttggggtgagaggaggcagctcacacagggccaggtgtcctggaacacccccacccaggggcttttagcctcggagccttgggctgtggctgtcccaaacctcactggccctttatgcggctgaaaggccgaggaggaaggcggagacagtgacaatggggccagtggcgggaaacggtccttagagaccccattgtgcaccccgcccgccggaaacaggcaacaagcaggaccctgcagaggggaccccacacccttcgggctcctcgccacgtctggatgctcagcacgtcgaaggggcctgaggacagaggggcccattcttccccaagggcgggacggggccaaggatgactctgcgggctcacagcagccatgggggaagtcggcaccctgccagcctgcagccccttccctcacaggcctggctcagagccggagcgctgtgcgcccgcctgcccccaccgtacccgagggaccctatgcccctctgcccctttcctctcctgctgagccccagaagcacctggcacgggaggcaagtgggagccagccagggaagcaggcaagggtgcgggcaaggacggggctggtgggtgcagcagagcagaagcttgcatgagtgcaggtccccacgtgccccccacccagcagcggcccctccccggaatgtgggtgtagctcctcctgacatctgctctccctctcagttgccaaatggtcttgaacaagataccattcccctgagcctcagtctcccgccaggaggcaggaattggagccatcctcacagctgcgaggcaggcccaaggctgggctggacacaggagaccaggtccacagcagcttgcgtgaacagagttcttattgatagtcccatcacctccaaagcagtgggcccaccctccctcctaccagcccctccccagcacccagcccctcagtgcagcgccacctcgcaggggtggaggtgggcagcacgggcagcctcgtaggcacggcggaactcctggaatcgtggggcacagcccagccgggcctccccaaagcggctccagcccatgaagaggaaggtgcctgggcccgggtggacgccacagcgcagtggggtacgaatggaggtcagcccctggtccccggatcgccccgcctggaacagcggcggtgtctggcggaggacacgggcggccaccacagtgatgacagactcctgcagctccacgtcatgggtgaccccatggatgatcccgtgaattactgtggggaggcatgtggctgcggtaggcattcaggggaaggcaggctccaggctccccccatggcggggacactcaccgaagtcgctggtgcatgcggccaggagcagctcagcgtcgctgcagggcctgcaggcacctggcatgcagagggggtggtgaggagaggccctgccctctcccggcatcaccccaggccccgtcccttgtccgcacaagcggcaggaggcagcaggcaaatgagcagagcccacgctcagggcctgatggcacctgggggtcccagagagctacacagcagatgtgcacgccctcggcgacacctgtactcaggaaacacacttgcaggcgcgtacctccaaggcaggaatgcacacagacgtgggcctgggggccatgcctagcgatcagctgtcctgggccgccctcctgcactcccatctgacatatgcaccccagcatctgggacccctctagtttcccggatctgaggtctgaagagcagcagcccagctagggtgataggaagtgggggcagaggaagggtggtctggggtccctggcccagggccagggggcagaatagcgagagcccatccctttcagggtcaggcgccaagctccaggagagccaagcaagagctgggcctggtgccctgcagggaggcgagcggcgtctccatggtgaccgggctgcacactggacttttgttggttgggctgggggaggggagagaggtcaccgctgggccagggagccccggacagctttggccggaggcttcgattctgtccccaccatctcttcccccaaccgttcagggaccagaggcccaggattgctgggcccggcctccccttccctccactctgcccctgccagctctttccagagatgaatcgggaagggagggcggggaggccatccctccccagcagtcccaggctgtgtggcctgacaagcccatccaacccttgtagctcactttttccttctgcagtggggccgacaaggcacattcccgccaagcccaggcagggtaagacttcgggactcccaccctgtcccaaccagaccgccactcaccgtctacgccgagaccgtgggcctgcgggggcagctcggggcgcccgtcctcgcgcagctcaaagcggaaggcggccacgcggcggctgatgtcctggtgcggcgtggcctgcaggaagagggcccggcgctcgcggggaccccagcgcacgcagcggccccctgccgggcccgggccctcggccagcagcagctccagggcgccccctgcgcgctccgcgaagacctgggcgcccgcgaagggccgcaccggccgcagacaggcgatgccgggccgcgctctgggatcggggccgcccagggtcaggcgcagcgccccagccgggtacagccactcaaccgcgccctccgcacaggccagggccagctgccccacgctgccgggctcctgggtgaggccgctggggacaggacgggacggggcgctgagacgggggcgggtccccgcccggcgcagcccccgctccctcccgaggccgcctcgcggatggggaaaccggcccagcgctctgcgcgctccgaggggcgcctggggggtcctagccgcagcgcaccccgtcctaagtgcggggacagccccccggaccgtacctgcccctccagctgcagcgctcctcggagtagccggcgcgggcagccggggccaggaggccgcagcacagcgcgcagagcagcgccgcggccgggaaccccatggcacggcgggcggcgtccggggagtcggggctctcaccaccgctgccccggcggggcgcgggtccgggcggcggcgggagcagccgggggcgccggccgcccggccccggcgaagcccccaagcccgcggccgctccgcctgccgcgcagccccagcgccggggccgccttggagcgggtcgggaagggggcggggcctgcggcgtgtcggccagtcgcggcgcggcccggaactttccgccaatagcaggcgcggggcggagcgggggcggggccggagctcgggcgccgccggaggactatcccacggtccaagcgcctcgagggttggggggggccttggcgcggaagggaggctccttgcccgccccgcgctgtgcgtctctccttcgccgcgccctcaccctggcctcgccccccgcgctgtcccgatcggagtcctggagcctctgatggagccgaggttttgatgtccactggaacctcggggtggcggtagggaaggtggcccacctggtggttccgcctcgcgggcggccgggcctgctccttcctaacactgggacctgggcctgttggccacatccctcccaaccaggtccggt

SEQ ID NO: 97717 - DNA, 33855 bp, Homo sapiens
ttacatggtagtgcaaggctcccaagatcacaaaactgaaagctcccagcaaaggctcgaactagggtgaggccagagggacccagggttcaaaaatggaaggaggtgttcactctcaggttcatgcaggggccctagctgggagtgagtacccaggataccctgcgtgcctctcctgggccagccctgctgccaggccatcttaacgcttgggcctgggaccaggacagccccacttccattacgttctgtcaggggaatcacaggctcaacaaagatagaaaacatggggactacagcagggagaatggcacaaaaaggcatggggaacacagggaggcgggagagtctccagtgctctacctgtgattttcacttttatctattttagaactgtgttgttagaagcatataagtttaaagctgtcatagctctcccaacaacagttttatcattatatagtgaccctctttatctgtagggagctttttgtcctgaactatacactgtctgctgttgatatagcaatactagcccttattttgggtgagattttgggtggcatatcttttttcctgatactttgactttaaatatttctgtgactttatatatgaggtatgtctcacaaatagaatatgactgttttgttttgagccaatctgccattcttaatcttttaatggaagatttttgtccagatgcatttattatgattgctgatatagtaaaatttattttcttattctgtaattttaatacattctatgctttttgtttcttttttcctcctcctgtcttgtcctcttttagattcagggttcattttaaatttctcattccatttttccctctatagatcagaagttatcatctctacacctgttcttttaatgatgatcttaaccatgttaatatatattcctaacagtctttattatctgttccagttatcaactgatgtgtaataaaccaccccaaacctcagtggctttaagtagcaattattatctctcatggttctgtgggctgcctgggttgaactaagcagtttttgcacggtatctcaggctatcaaatggcagcagtggctaaagccatctgaagactcagtgtctaagacggcttacttgcatggttggcagctggtggcagttgctagcggggagctcagcagaggctgtcaaatgaagcacccacagggaaacatgtgactggagctttcatcagtgtggcactgggttctgagaaggagcacttccggagacccagtggaagttgcaagacttcttatgacttagacttgaagtcaaatagagtctcacttctgctgctttccattggctgcataaggcgagccatgattctttgtgagaacagactacacaaaggcgtaagtgacaggatgtgtggctcattggagccaggggagcctgtttgcacaccacttaccacaccctccatcttaaataaaacctgaaggattctttcattctaatcatgctcctcccaatttatataatgtttttgtcctgaatcttagttttaacatatggtttatacctcacaaatcagtcattatcaatattattgttttatgcaagtcatactttttcttagatttacctatatattttccatatttttgttgacattccttcttgtgttttgagctttccagctgaggtattctctgttcctccaaaaacatattctgaggaatttcctccattcagagtttattggcaaatgacttaggtttttgtttgtcagaaaatgcatttattttctcccaggtcccctaggaattgtttcactgggtgaaacaatgtcacaattctaaattgatgttatttttctctccactattgaagatattctactatcttctgactactattgtggctcctaagaaatctattagtctaatctttagttctttgcaggtaacttggtttttttttttccccctctgttatttttcagatctttttaactggagtgttttgctgtttcattatgatgggtacagttgggatttctctgtgtatttatcccctttgggatccactgagttttccagatgtaagaagtagtgctttccaacaattctgaaaaactctcagccattctctcttcaaatattaccctttggcttcctattatcttcttctaaaagtctaactagactaggtctcatgcttcattcatattttttctctttgtgttgagctctgggtaatttactggtattgatcctccagctcattacttctgtcttcaactgtgtctatgaaggatgtttaattcatctacagagcttttaatttcaattacattttaagttctagatggtctatttcacttttgtttaaacatgattattcatttttataattttttattttttattttattttattttttagatggagtctcactgtgtcacccaggctggagcgcagtggtgcgatctcggctcactgcaacctccacctcccaggttcaagcgattctcctgcctcagcctcctgagtagctgggactacatgtgtgtgccaccactcctggctaattttttgtatttttggtagagatggggttttgccatataggccaggttggtctcaaactcctgacctcggatgatctgcccacctcagcatcccagatttttttagtctttaatcctttttttttttttttttttttttttttgagacagagtctctctgtcaccaggctggagtgtgcagtagtgcaatcttggctcattgcaacctccgcctcctgggttcaagcgattctcctgcctcagcctcccgagtagtgggactacagagtgcgcgctaccacattcagtcaatttttgtatttttagtagagatggggtttcacctgttggccaggatggtcttaatctcttgacctcgtgatcctcctgcctcggcctcccaaagtgctgggattacaggcatgagccactgtgtccggccttctttaatcatctttttaaacctaccttttttattttagacatagtaaacatagttattttatattcattgtttaattttatatctgaagtctttgggagttgattatcctatataatttctcttgttgattctaatgatacatgtttccttgtgtgtttacgatttttgactgtgagctcatataccttgcaactttatctggggttattatttggagtctgagctgaagctgcatcccttcacacttgatttgcatttatgtcagccagtttcctggacacactactggcctgtgactatttttaattaaattctttacttcaacattttttggaccacataaataattaacatggatctcaaatcagtgtgtgcttatgaattctcagaagagactttatccccctctattccatgctaaggctgagtgagccctcactgtccatttttatttagtgggtttatatcttgttcatccctacaatgaacatcccaattttatacaaaggggtcacatgctttcctccttaggtggagggagtagttatcttccattctttgcaaagctgtcaaaacagaaatatgaagttgctattaatagaatgtggcaaaaatcctcaaggatgaagctagcattggttcctgtttatctaatgaagtttctgatttcaatttgataatgttccctacacagtccttagcttttgtgtgtatcagtattttagttgtttccatccaatggacatctttaaggtactgagtccaccataatgccaaaaaataaaatcatttcattggtatatctattttttaggcattttataactattgccctactgccctctagtaaaattgtgccaatttatattacattcatcaggggggtaattagaaactacaaactttaatgtcttaggctggccttagcttaaacatttcaattgtatttgatatgaagctttatgaaatccaaaatactaggatatttaatattttcaataaaaataatgcggaacagggtcgagcacagtagcttatgcctgtaatccaaagactttgggaggccaaggcaggcagatcacttgaggccaggagttcgagaccagcctggccaacatgatgaaacctagtctctactaaaaaacaaacaaacaaacaaaaacagctaggcatggtggcatgcacctgtagtcccagctactctggaggctgaggcaggagaatctcttgaacccaggaggcggagattgcagtgagccgagatcgcaccactgcaccccagatctgggcaatagagcaaacctctgtctcaaaaataaataaattaattaaataatgaagaacagattcaaggatatttatattttggcacccacagaaggtctataaacaaacaaaacagagagaaaaaagatcttttaagaaacaaatctatgcatactttaaagttcagaagaacactttaacagcagcggctgtgaacaaatccaggtttccaacgtactgtttgaccctgcgccagcctcccattctcatctgtgagatggacatgatagtggccacctcagagaagtatcagaacaataacataatgttggcatagcacagagcctgacataaactaatttctcaaaatctggcagctaatattattaacttgttttaagtgactccactagtgagtgaggcagctgagatttgaaccaagtttgtttgaatccaaagcccatgagaaacctttttgatttgcatattattataggaaataggaatttgttgttcccagagatttcttgctacaattttttcactgtgcagtaagctacccatttgctcacaataagccccataaagacaaaaaggtaggatccttttctggcatgtcataaaattgaggaaccttctttttttttttttttttttttaattgagacaggggtccgctctgtcatccaggctggagtgcagtggcgtgtcttggctcactgcagcctctgcctcctgtgttcaagcgattctcatgcctcagcctcccgagcagctgggattacaggcatgcgccaccacgcccagctgattattgtatttttagtagagatgaggttttgccatgtcggccaggctggtcttgaactcctggcctcaggtgatctgcctgccttggcctctcaaagtgctgagattacaggtgtgagctactgcacccaaccaaaattgatgaacattcttgaacttagttatctacttacagaagatagatgatatttagcttcccaaacagcttgcaggtaaattttctaataaggcttttgatacaataaacatcctgtgattctgttcttcggcaatgaacaacttctacctttcctcttggagaagtgagtactgacattttttatcctgtccccaaaagagagaaaaaagtccactattaatctgatatgataagccagtttggttataatacgcacaaaactgaacactaattcaatttccatgtggtcagagtgaacatggtgtgagaatactggtgtgacacgttttcccctgggtgtagtctgtgacaactgtcactgcaaaccagctgacgttcctccataggagaatgaagtttctgagaactggcctgtttagaagtttctgcaactatattctttgtttccaacaaagctgctttaaaaaattctaacaatagaattggaaaaacattgaaaggaattatttacggattcagggtcctcttatatttaatcggccacgatggcatgtggtgaagagttactggggaaatactgacagctgctgcctatgttcttaatagagttctccaaactggagccctgaaggtcagcagtcttgagacatattttgagaccaaaaaagttctgtggttaagtgtaggaaatgctcgcaataggcttcctgaagggccaccaggcccattaacatctttgagaggttccataataaagcaacttgttttctttgtataacccagcctttccgacactctttgggaagagaatctctaatgacggcaacagtggagaacctaacgttccagaaggacactttgggaaatgctgttgacaaaaacagtaggtcacaaaatgatttcaatttctctctcattgtctcaatttctgtaagtctctcttctctctttccctcccttctttccttcatagggaaagccattttattatatactagccastgagctcaaaacagggaaaacaatgaaggagaaattaataatgtctagactcctatcgaagctaaccataaatattgtcattccttgttctggttttaaattgaaagcaaaattggaatgagacatcttgtttgtgaaacatatcataaactaatgctacaagtatataaaaattctgaataaaataagraagtataattaattagataactgactttggtaaaaagaaaacaagaaaagaagaaagaaagcgagcgagggaaattctccaaccaggtggcaatgatgtgagccgatctgacacaggttttggggatagaatggacctcactccaaacagagaattaaaaattaaaccatgcatctacctggractttggatgggcccctcggtaagygagggggctagaaaaattaaactcaccagcccaagaaagtgacaagctttctctacacaaagctctaggtagaaaataaagcaaaaatactgctgagaagtccaaattctagactaaagtgggtatggcattctagtccacacaatctgtgtattatgggagtcaccaagaactttagatgatagactctgaaacagactacaaactaagtatgtttataataaagaaatatagaaagagaaacaaaagtcatgagaagagaacaggtcattatttaaaaaagaacagaaacttaaaaaatgaaatatgtggttattaaaatttaaactaagaggatgggttaaaaacagaagaataaagaaaataaactggaagatacttatgaacaaattatctagaaagaagcacatagaaacagaaaatacagaattcagtaaagacacatgtaagacagaatgaaaaacatctgtcttatgggaattccaaaaggaataaatgaaacatttgaaaataatggctaattacttttagcatggatgaaagacatgaaccttcagttcagagcaaaaaatacaaataaactccaaatatatagtaaaactacaaaaccctaaagacaaacagaaaactttaaaggaacctgacaaaagacagactgtctataaaaaataattagactgacagaatatttctcatgagcaacattagaagccagtagcacgggggttagcaaacttctgtaaaaggccagagaataaatacattaagctttatgagccacatgttgtctacacaactagtcaactctgccattgtagcacagtaacaaccagagacaatatcggcacaaatgagcatgaatgtattcccacaaaattttacttacatacactgaaagttgacttatgtataattttcatgtgccatgtaatttttaaaaaatgtttaaaatgtaaactacatataaagtttaatgtaaaatgtgtgtgtgtatatgtgtatgtatgtgtgtgtgtrtatatatatatatatatccctagctcattcacagtccatacaaaatagtcaatgggctgaatttagtctacggcccatagttttctaactactagaatagtgttttaaaaatataaaaggaaaaaataaccattaacctagactgataaacctaaacaatcactttaaaatgaagataaaataaagacaatttcatacaaagactgaaagaattcaaagaatcttgtagaaagaactaggagatggtatattctgagaagaataaaatcagaaagaagtggaatacaagattaaatgctgggaaataagaaggtaaacatgaaggtatatctacaaaagcattgatggcaaaaagtaagaaggataatacatttttcctaaaaaaaaaaaaaaaaaaaamcaamcaaaaaaaacacacacagagatgaactgaattgccagacaacaraaatgtaagagagaaggatggtgatcagaagcaaagtattctagcatgtttgtacttttgagcaaaggcaacagatgattaaaccaatgattcatttggtaaatcaattgtttacagtaacacatttaaggaaaatcacttcaaaraaacatctttttaatatttatttattttgttaggtggctttatgaaagtgatataaaatcttctctatttaaattttgaaaagtgarataaaatatctaaataatatggttaataaagagttatggcaaatacattgatgttggttataactgactgcagttctaraaatctgcataaatcttttgttgaaagtaatatctgcattggtagacgtgatattactacatacataaatatatattttccccaaacaccaaaagagctttgcaactgtggaaattatcctaacaaatgagctgccaagtcatgtcattatacatttgtccaacctcatagaatgtacaccaagagtgaaccctaatataaactatgaactttgggtgataatgatgtgtcaatgtaggttcaagattgtaacaaatgtactgctctggtggaggatatttttaagagttggaggctgttagaggagggaagaggtacaataattgatagcaggaagctgtggagggaggaaatctctgtgtcttccacttaattttgttgtgaacctaaaacttctctaaaaatgtctattaaaaaaaattctcttaacctttgcttttcagtttttgagggcaggttaagtattataacagctaacatctactgagcatttgtctttaatcctagtgaaacagatgttattagccttgttttatagttgargacattgaggctaagaaaatttaactagagtaattaaggcacacacagaatttaaacatgtttcttatcacaagactgagttgttttccagttactctatttatattttttcctaatatctggcttcaaagtaccttctgttatttttaattccaagccttagagttaattatttgggcaccttagaattatttgggcacaactgtcccgaaaccagaaacgagggggcgtggacccagagactactagaatgcaatgctcgaggcattgcagcctaaaagggcggcagctcgccccgtcgcatgctgggaatggtagtttcctcgctctcccttcttcccccgccctcgagcatccagattggagctccgttcytactcccttgcagggcgccacggctcgacagagccactcgtcctcgcctggtcatcccagytccggaggctgacctggggatgcgccctggacgccctgcaccgcagtccttgcgtcgctgctagtcagcacggcgtwacccacctcatccgcagcwccaggacgccgcactccacgcgctgccgcaaggaggacgcgcagcctggtcaccatggaaacggtgccgcctccgtcacggctcawgcgagaggtcaaaggtcagtcctgcaagttccgcttccggttccgagatcctgtttgttttctgaaagctttgtggtttcggtgagctctcagagccgatttctagcgtccgtgccggggacaggtgtccagaggtcgrctgctgcagacatggcggcctccaccgcggccgggaagcagcggattcccaaagtggccaaggtaggcgatcgcgaggggccttgtaggaggtggcctaggaaaggggcatccctcagccctgagggtgcccgggttgggagagagtgttcccgccggggagaaggctcaccctgagagatggagaggaagggcagctggtggtggggcgcgggctcttgtcatcgcggagcacgacccgcgttggcgtggccttcgttctggggtggttttgctggggagtggagtggggtggttcggtgaagatttactgagccaggcactgcactgggcgctgggaagctacgctcgtacgctggccacaagcagtactcaaaacacgagtttctgtataaagacgaccttgctagatgttaccgagaggcaaagtagaatatgccatgggcgtgaataagggggtcgtatgaaggggtcctgaaagtaaattttgctgaggaaatgacctttaagctgagacttgaaggctgaataggagttagcccagctgacagcggagggcgagagtagacggtaggagtagtatagtatcataagttaattaaacagtagacttactatctggtatttcctttgatagctaatacttaccaagtgcttaatatgtggcagactttgaagcctttacagataccctccctccagtctttcttgagcccggatgactctcttgaactggacctttacataactatttgtctgactcgcaggagtaatgcatatagagcaagtaacactgtgtctggcacttagtgcttattaaatatgagctatcaccattatcatcattactccacatgtggcattaagtaacattttttataattcagctacataaacttttattgggcatcactggtccaatggaaatataatgcacaccacatatgaaattttaaattttctcatatctacattaaaaagtaaaaacaaagcaaaaaagtgaaattaattttgataatatatattttatttgagctaatgtatccaaaatattatcatttcaacatgtaatcggtataaaaaatgtaatgaggtagtttattcttttttatacttcatcttcaaaaccaatgtgtattttacacttacagtccacctcaatttgtactcaccacatgtgactcatagctactgtgttggacagcacagctctaagctacgttagactgtaagcttctaagacctcaagaagcttacagtctaatgatgagaacttactgaaattgcctttgacttgaagtgccatgtaaaaccaaacccagttatacaccggggcattaaataagttgaagaattctgtaaatgcaggttgtaatgctgttaataagatgtgctacacattttgataaaacaaaacctctggtcagaattttacctagacggcctcaaagtttattattatactcatctaaaagggaaaacttgctattatttttgccacctttttctcttgagacttttacctatggctttgcagtagatactatgaataagagagaaaacggtattttttttttcttttcagtctcatggaggaatgggaacatgtcatacaaaaagggcatcttgtgataatactaacaaagttcatatcctaaaaaatgtatgtttgtttcttaagccttgtgtgaagagcaactactaaaaatagaaatgtcttctttcttaaaaggtgaaaaacaaagccccggctgaggtacagataactgctgaacaactcttaagagaggctaaagaaagagaacttgagcttcttccacctccacctcaacagaagatcacagatgaagaagaattaaatgattataaactaaggaaaaggaaggtcagtcagtgtggtatctttcagtccactaattgttaagactgtatcggtcagtttgaaaagctcctcattggttggattctgtagggcaagatgaggttaagtgtttccagacrcatgaataatgtacttctggttaccagataacagcatttttctgaactatataaaatatgccatgagttgtctggttaaagtgtaaagaaattgaatctgcataatttttgatgctgaatcaaagtgrgcggaagtttagcagatggaacaactgacaacaagaaggagggtatgcttagtaaggctgcactgtgtacttctgtctataccaccttctgtgttaagaattgagatctggctgggcacagtggctcrcgcctgtaatcccaacactttgggaggccgaggcgggcagatcacctgaggtcaggagtttgagaccagcctagccaacatggtgaaaccccatctctactaaaatacaaaaattagccaggcgtggtggcaggtgcctgtaatcccagctattcgggaggctgagacatgagaatcacagcaactcgggaggcagaggctgcagtgagccgagatcgtgccactgcactccagcctgggcgacagagcaagactttgtctcaaaaaaaaaaaaagaaagaaagaaagaaaggaaaaggaattgaggtctgcaaaaggaccatgagaagactttgggatctgatttgacctcttcactctagaatgtgggactgttttaaagcactaatgctgttatatatgaaattctgagaattaccagaggacttaaaggtaatagtcaaaaacattttttattagggacaagcatagaccattttaaagtatcagttagttgactgtaaccttctgtagtgggtttcttattcctcaaggattccaggatgtaatttctcttaaatatgaacaaaatgaataaccattttagtacaagacttaaaatagaccaagggtgctgtcatttttagtcatttgtcttttgacttgacccyttttgccttcttccagacttttgaagataatataagaaaaaacaggactgtgattagtaactggataaaatacgcacaatgggaagaaagcctaaaggagattcaaaggtaaaattactgagagtgtagttttgtatrtaatgattcatagattaacagataccaaaaagaaaagaagaaaaagttaaagcacaggtaaaagattgtgcctcgggtagaaattttcaactttggttccatggaaccctagggttcccttgagggcctcaggagtactggggtagaatagtcctggggagggtggcagaagaggctttagagatagatcttgtcagttgtagctaaagaagcacaatttcatttgctttgtatatattgagatttttamaaawktcagctaaacaatggccaaaaaaaataaaaccaatggccaaaaaaaataaaaattgcaatctggcccttcctgtggtctagctttctgcattctccccgcatacctccttcccccactgtgcctgtgtatgtgccactccctgaatatatcrtgtctccttatcgtgaggcttgactgttctccttgcctggaatgagcaccccctcctcaccaaacttagtttcctggtaaatyggaacgttcctcaagttckcatttctacaattacctactacttagccttttccaccaaacattttcatttcttcctctctgtttcccgtgcagatcttgactataacataaatcacattgcattataattgcatgcatgtctttttataagactttgtaaggtacttgagagcattatatcttttcatttttttatgcccagaacttggctcatggtagacacctaataaaacatcagtgcattccagatagtttgaaataactgctacatgtgttgaatgctctatttttgatgccctgcaaatcttgcttcttaagggctcgatccatatacgagcgtgctttagatgtagactaccgaaatattacactctggctgaaatacgcagaaatggaaatgaagaatcgccaagtcaaccatgctcgaaatatctgggaccgggccataacaacgctgcctcgagttaatcagttctggtaagtttctgatctaacaaaacagccttttatagactagcaaagttccacatcttctgtatttattttatttacatgatgatagtttaatttgatatcctactttttcttcagacataaatgctgttatgtcccatagtctattaagtcataatcrtaatgttctatagctatgtaatcaaaactaaaattttgattgcaatcttttattcataagcttcttgttgaactaggcaacttttaagaaaaaaaaatctttttttccaatggttcatcctttttcagatttacatacaaatgacaaaacatgtttgatttaacctttaagaaaggtaaaatcttcaatcttcttcccattcaacaatggaagaactaaaccacagcagatattttcgggtgattttgttacaggtacaagtacacgtacatggaggaaatgttgggaaacgttgccggtgcccggcaggtgtttgagcgctggatggagtggcagcctgaggagcaagcctggcactcctacatcaactttgagctgagatacaaagaggtggatcgggcccgcaccatttatgagcgatatatcctttggacgagatctgtatggtgccatgattgtcctggatgctgctgctgctcctgtagagatgtctcatgatcaggacacacagtcattaatgtcaggctcaaagtcaagaatgccagtttatcagcttccctatgttttgtagggaaagagattggtcagaatgaaaatttgtattctgggtaactagtcttttctagtgagagtttgggtttattttattgtaatgctaaaagctaatgtttccttgtggaaaatgatattcctgggggattgtttccaggaactcaaggggataccaaaatcggtgatgcttaagtccctcatataaaatgatgtagtatttgcatgtaacctatgcatagcctcccatataattcaaataatctctagattacttatacctaatgcaatgtaaatgttatataaataattgttattctgtatattttaaggaataataagcaaaaaaacgacatgttcaatacagaagcacttttttctcacgaatactttatctcaggttggttgaatccacagatatggaacccatggctggaggactaactgtactaaggtcctggctgccattgccagtcctgtttttctaaggtttgtgttggtcattactaccttactggagttcatccaaggtttactgtttactagctgtgtggctccagagagtcatttaactcctttgagagttggtgtcctcttcttaaaaacaagaataaaaacacctttgttgggctgttgcgaagattaaatgatacacatgaaagcacttttagaaactgaagtacagtcattcctcactatttgcagattccatgtttgcaaaatcacgtatttgctaaaatttatttgtaacccccaaaatcagtaattgtggcactttcacagtcatttgtggacatgcacagagcatgaagtccaacaaggtgaggcttgccttctggtcttaacctcatataaccatgcctagagcttggagacaggaagggccagtgccatgtagtgcaaggagctgtggctctggggccagtcggggagtttgaatccctgtcagtggggcagcctcagtccagtcacttaacatttctgaaccacttttcttacaaaataatgaagatagaatctgccaggatgagttctttttaggatttaagatgatgatgaatgtgagattgtatatatacacgtttctcctaggagcagtggttcagtactcaataattaagtgttcgcattgactaaatagaacataactaccagaaataatgagagtcaactttattatgcagtattaagatctttttatttttttactcttctctgttgaggtgacaatgttaagatcttaattatgtctactaattttaatattattagtttgacgaaagcttttatagcacttgctacgtgccaggcagtattctaagtactttacagatattgttgtttaatcctcataacatccttgcagtgtaggaacttctctgtcctacagatgagggagctgaggcatgagagattaagtagcttgactgggttctcacaggtgctgatggaaatagaatgtgaacctagtagagcagcttcagaactgatgctcttctttgccatattggaatatattactactttggaaattaatgatttattcaaggaagatagattaaaatgacaattcaaaactttctgctttgactctagttaacagttttctttttatagcatgtttttttcttaattattagttcaagtattcatattttaatataattggtgctatttaatgaccagaccattattgaccgcttacggtgccatgttcttttggctagaaactgtgctaagggctttacatacattttctcatttaaagctggcagtaatccagtgaggctggcattatttttccctgtttacaaatgaaacagctgagacttagacgtctaagttcagtgactwatccaagatcacatggttggtaacctgggttgagatttttctttgcttccaactcgagtttatacccaccactaaaatcttaactaagcactggaggaaaatagagatgaacaggcgtggccctgctctcacagaagccactgtttaattctacacttttgtatgtgttttgttcccctagagttgtagtttgaatttttggagtttccaggctttggtatggttttggtgtttacttacttactatttttttaagccatgctgttttgcctgggatttccttaattcccttgcacttgtcctcgtgcaccctgatgttaagaactggatcaagtatgcccgctttgaagaaaaacatgcttattttgcccatgcacggaaagtgtatgagagagctgtggaattctttggagatgaacatatggatgagcacctttatgttgcctttgccaagtttgaagaaaatcagaaagaggtaagtatacctaacttcattatactgtaaaacagcttagcaaagattacattttgtgcatggtgagttcatttccattttttcttactgacatatccctggaaagatgttttcaaaatacaaaaacacagcttctcacagagaacagcatatatatgtgactaagctacagatgggagctgattatagattgtattataactgtcttaattttattgtgctttgtttgaaaattaagccttttagtctgaatgcccgtaaactgagaactagtcttttrgcatcctaagtaaaggacttaaccgataataaatatgggaaacaaaaagcttaaagccctagaacagaaaacatttagaatggaaacagagattgccctacaaataagagagttctttttttcccttgtacctatgaaaatagctcaaatattgagaagatgaggcagaaggatcacttgaggccaggagtttgagaccagcctgggcaacatagtgagaccctgtctctaaaaaaaaaaattgagtgggcatagtggtgcacacctacagtcccagctacttgggaagctgaggcaggagtatcacttgagcctaggagtttgagactacaatgagctatgttcgtgccattgcactctagcctgggtgacagagcaggaccccatttcttaaaaaaaaagggagttcaaataatacagaattgagatccatccaaatacaggtttgagcattcccagtctgaaaatccaaaactcaaaatgtgaaacttgttgagtgctgacatgacactcgaaggaaatgttcattggaacatttcagacttcgggtttttggattagggatgctgaaccagtaagtataatgcaaatattcccaaactggggaaacatcccaaatccaaaacacttctgataccaaatgcttcagacaagagatactcaacctatataaggtcttgcacrgaccatgctagggagttcagattctgttcgggccagtgggaagcattgaaaggttttaagcgggacagtgattggatatgatttatattttaaggagagcctctggctaattcatggagaatgtatgagggtagatggcaaaagtggaaccaggggagaccagtggggagacttttgaagtgggccaggtgaacagtggagtttgatggctgggggctggggagaagcaaatggctgtgtggaagagattgaaatggtagggcatgttgcaagagtgaatatggagtatgaggaaaaaagaggaattgaggatcacctgaaggttttggcttgagcaagtgactgtaggttaggccttgcctactaaaattgggaagatggggagagtcccagtttgagtggggaggaaacagaagctcagttttggacctgtttgagatgtgcagtagacatccagttggcagtgttaggtagacagtattaaatatggagctcaaagcagagtaccggtccatcctgacagagataaccttcaacaagagggagaaaagcatcttactctggatattatgaggcctcaaaatctaacttataagtaatattttgttatatttactctcctagttgtgactggcatgagaatattgtgttatagaaggtaatcatcctgtctgcatttagtttgaaagggtacgagtgatttacaagtatgccctggacagaatttcaaaacaagatgcccaagaactctttaaaaattataccatctttgagaagaagtttggtgataggcggggtattgaagatatcattgtgagcaaacggagattccagtacgaagaagaagtgaaggtgagcactggtgtggatggtcaactctgcagataacccaagatgtgctcatcaatactagcaacactaaaatgaataatagcaagtagcactactagtgattactctcgtgatgatgtgcccgtgatccaattggcagctatttcagacaagtaggaataaacaaggctgatagaaaaggcaagcaaacaacacttggatttgctctgccacttacatgttgtaagtcgttttgttgattgttgactgtatgtagaactggagcaaaagaaatgtggaatccattcgagctcattgttggaagaaggtggaagagtcagagattggtccaaaaacctgttttgcacatcacctttgagcttaactgcctgaacaaaagatgtatgctagacagggttccatcggcatctctttttctgtaatgtactattttgatttcaattcaaagagagtgtcattttccttcagtattctgttgtgtatttaaaaatactcttccttagtcaagttaattaagatacctccaagcaaaggactaagtctgttattaaatgtggtggtaggttagcaagatatgttaaagatgaattgctattaattggaaaggcaagtttaacaattgtgagcatgatacgattctgttgttacagacataatgatacatagtcacatatttaagcaaatgcattggcaagaataggcatctaattattgactgtcgtgagagtgatggctatagatgaaggagtccttgctgtgggacacctggccagtaatctatcctctgtattcctgtttcttttctatttrtgcagtctcagggatggtgtttttaaaatgaaagaacatgtaacatttagaagaaaaggtgctaaaatatagaaagtcagcctgatgccttttttcagcttgcttaacctggcaagtgcagctcttggttttgttttttatttattaaactsgttgtctttctaggcgaatccacacaattatgatgcatggtttgattacttgcgcttggtagaaagtgacgcagaagctgaagccgtgagagaagtctatgaaagggccattgccaatgtcccacccattcaggagaagaggcactggaagcgctacatttatctttggatcaactatgcactctatgaagaattggaggcaaaggtgaaaaaacagaattatgtgtcagctgataatggtttcctgtcttctgtattcacagctcacctattgtggatgtttgtaattcttgaaagaaggaaatttagttttaaatttttataggcttctgttcatccatacagttatatattcgctctgcaacattttaaaccctctgtgcttgttgtggccacacgtgaggggcttttttaactttggtttgatttttacttgaggcacaacaagatatcacttggagcttgaaagagaacagtgaaccagcccttaatttagtgaaatatagtttcctggatttgctyattaataggagtaattctggctagattatgcatttttgcttttagcaaaaatcaagtggcattttcagaaatcatttgtattaaccttctgggtttgatctgagactatgaaacatctttgtttctttctgccatcaggcaaaamggctttctacaaagaagggcttagaagtttggtggctatcttgttggtgattcttaaactgaagtttcatggccgttcatactttagatcataaatcagggtttgcaagtaacaacttgtgaaacatgctgttttgggggtgtacatttttaccaatatcagtaaaattagtaactagtaaaatgagtgttagcagcagacttcaatattttgtgaaaatttcttatcctaatacaggatcctgagaggacaagacaggtgtatcaagcctctttggaactaattcctcacaaaaaggtatgtttgctctaaagtgttccatttcaaacaggtcagaatcctcttctgttacttgtgaagtaattcagtgaaataatattgattgataaaatgcttccctgtcccaccatggacaacataaataagactgagatatgctccttgcctctgaaaacagctcacagactaggttggaggacaacctgcattgacaaacaaataatataaattcagagaaggctaggtaatgtgaatagtctgagtggaaggagaaagacatccatgcagagagcacacaacgtgtgcgggggacacacaggcgggtttgttggtaacagtgagtgtgtgcatgcacagatgaatgtgccccttgtgtagatggttgagatgttacctccgccttgtttcccagcacgagaaacaaaacgtgtttccttctgtagaagtgttgactgagttacttttcagaatagaggtaggacattctgcccatatacaagcatgcctacaaaacaaagtctgttctgagcagaggctaccgtgccatacagtacagtacagtatctggatcatggttctcaggrgaggttaccatgccatgcagtacaatatagtatctggatcatggtatgtgggtttctaacttttgtgaaatgaatgtggtctttgcttgtaaataagcagagtacattcctcttactctgaagttttagagaaatcgaattaccaatggctttggttaatttaaattaattttaattcaatttaatttggatgaggcttttaagctagatatttttgtgcttttgttttctagttcacatttgccaaaatgtggatactgtatgcacagtttgaaatacgacagaagaatctgtcattagccagaagagcattggtaagtaaagaaaggatcaagatgtctcrtcaagttctatgagaaagaaattaaaatcttggtgcttggaagttgtacagttcctactttaaagagtgacagaagtattayacctttatagcctgggacatgttagaaaacatgcgtcctctgtaaaaacactgactaataatgcgtaaattattcttattacctggggcaaattaacattctgtttcaatattggaaacttctatagctaccasttactaaatctttccacagactggaattagtaatctgatcctgtgcaaactttttggtgtgttaaatgcacttttaattgttccactttttttttcttttttttttttttgtttgtttggtttttttttgagacagggtctcgctctgttccccaagctggaatgcagtagcgcgatcttggctcactgcaacctctgcctcctgggcggaaatgatcctcccatgttggcctctcagaatgctgggattacaggcatgagccaccatgccttgtcctttttatttataggaggttttatgcatttgacatccctattccctaggagatcctgagaaactttcaaatcttattttatttagttgcccaaacaattctggaacactgcctcttgctgagtgaattagaggagtttccttcagccttttgtcaagaaccagtaaacattgtgataccacagagggaaagaatggtaggccatgttgactttgcaagattcttcctcagcagagaacagcctctagggcagtgcaataactgcacagattaaatccactacagtatcacagtggtctggttattttattttccagggracttccataggcaaatgtccaaagaacaaattatttaaagtttacatagaattggagctacagcttcgagaatttgacagatgccggaagctttatgaaaagttcctggaatttggacctgaaaattgtacctcatggattaaattcgctgaattagagacaatccttggtgatattgacagagcacgggcaatctatgaattagccatcagtcagccacgtttagacatgccagaggtgagcatctcaagtcaaatataattttgtttgagatacrtgtttagtcttactttagatgaccatctaaatgtgggtgtattttagagtataacgatgatctaactaacttagtctcttctactcagattaggcttgtacgtggaaaggtggctgtgggggacaggggaagtagccctctcattagataccagagcagtagacatccaggatgatgcccaggatgaactgggatatcatgggggtgggtgacgccccttctgcagcaggaaagcctaaaggggctggggaagaggccaggcaaggaagaagccagcaggctggcccacccggagaacgagggggatggaggtaggaactgcacatccctgtattctctaaaccaggatgtccttgcaacttctgttgtcactgtcctgaaagtcctcgcctgccttcagtagttaagcttgacccacaaggtagcaccaaaccacagctaggaaagatttgaatctcacatgagtcgtagaactcacccagccgttttgttaatctcatgcactaacatgaccctgcatttaatggtttggccccctgattgcattaattaaggcagggctttgggtatcactgagttcatcagttgtcctcggctcctccaccagactgccagctttcaggtgtccatgccacggtttattcatccttattccctgccaggctgcaccgagccagtgcgcacctgttcagtgaatgcttgttgcactgaactctcataataacaaggaatgtacagtagaggtaagaacatgcatactggctaacctgggcctgttttctctctggacgctcaattgcgtgtggctagaatatggagtacctgggagatgcttggcaagtttctcagctcttgataagtcaagcatttgaaaaacttccaaagagaatctctaagactgaatccaaggccctttttctgtaatctggaattctagccaagttttggccagcttatagataccaatgttatttatcttatccacatgtgttctttagttgttcagtaaaaatcctatgttcctagatgtaggttagagtgatacttcagctgtgctttggatgggggcatgctgctttgtaaatgtcaagactgacccatttacttttcttccttaggtgctttggaaatcatatattgattttgaaattgagcaggaagaaacagaaagaacacgaaacctttaccggcggttgcttcaacggacgcagcatgtcaaggtatccttgctttgtagatgatctttcattttgcttgaatcagcagtccagaagaaaatgatatatttctgtattttaagtgtttgggtttttgttttttttttttttttaatgacttccttgcttttcaagagaaacgtgagtctcagaggactttggaatgtttggaatgttaagtttataccaggtcattgtttatgctgcatgtgagtagcttgggtatcacaagattgaaaaaaagttaaactattttttttttttttgagacggagtcttgctgtgtctctaggctggagtgcagtggcgttatctcggctcactgcaacctcygcctcccaggttcaagcaattctcctgcctcagcctccagagtagctgggactagagacgcgcaccataatgcccaggctaatttttctatttttaatagagacagggtttcacctgttggccaggatggtctcgatctcttgacctcgtgatctgcccacctcagcctcccgaagtgctgggattacaggcgtgagccactgcacccagccaagttaaactcttttcaagagtttaagactatgtcagacatttaattgtagaatgtagaatcaaatattttcagtgtttatattgaagcatatattcattgttttcatctgtgaaacattagtgatgcacacattactttccgatgtcattaactgggaattcgctttattattactacattattatcttctgagtgatatggttaatttggttcaataataactttttttaaaggtatggatcagctttgctcagtttgagttgtcttcaggaaaagaaggaagtttgactaaatgcagacaaatttatgaagaagctaacaaaaccatgcgaaactgtgaagaaaaggaagagagacttatgctgctggaatcttggcgaagttttgaagaagaatttggaacagcttcagataaggagagagtagacaaactcatgccagagaaagtcaagaagagaagaaaggtccagactgatgatggggtaagaactctgccctgggactgttcatctcacgtcacatgagtagaaacacttctgacgtcgaaatgtggacttttaagtggcatatgtacaatcttagaatggaagcagaccacctggagtaggagatggttgcaatctggctgttatggaaacacggggtagaacatatggtccagtcagaggtggagaacgggaaggggttggcaaaggtgttttggtgatggttgagtctgggaacttcatgaagtgtgatatttttagagcatttaataggaagtaagtgtggaggaagatggaactgaactttcagataggagcctatccagagaaggcttgtaggcggtaagaaggagtttggtgggagtcagtgaaggctgttttgcataaaatgacgtgaccagattgctagcctctcatcctggcagactcaaggggcttagattggagaaagaagacccatcaggaagcagtttttataagctgagcaagacatggaagctggaactagaacagggccacagggcctgttagaacaatatttgggaagtgaaatcagtgactgataggaggtgaggatgggaaggtagggagttggaataataatgcacagatgtatggcttttgctactgggtgaatattatgtaaagatcgttaaacgttttcttaagtgtaagactgcacaatgtagttggagacactgaacatcttggttggctatagaggagctgtgcttagatttttagaatgtttttctaccagtttagttctcactgagctacagttgctgcttactcactcccagtctttcagacccagcccttgttctttctgtagtagactttgatgttattttgtaaaatggaggtaatcatccggatttccagtaaaaattcttcactctgatatgtgagtatatcacccacgtttgcttatcttttcattttttatttctgtagtctgatgcaggctgggaagaatactttgattacatctttccagaagatgctgccaaccaacctaacctcaaactcctggccatggccaaactgtggaagaaayagcagcaggaaaaggaggatgctgagcaccatccagatgaggacrtcgatgagagtgaatcctgatctttttttcatagacaaatgttttgttatttttataaattaattgtttggaactcttgtgactcctggaagttcttatatatttcaccagtaagaaattgattggtatctttgatggctactttttaagttattttttaaatgctcttgggttagctaggggtagggattgcaagtaaaggacttttttaactgctggatttgtttttccaactgagtccaaacttttctaatgtctgtccacatcatgcattaggaaatgtaattaaggtaacattctacagttacttttcatgtcatacccataaagatagtttatgcattcatctgaaatgtgtaactttttcatgtcttcagagtcacagacttgagttcatttcccagctctgccactcatgattatataacttaattttcattttcctcattcacaaaatgggccaatagtttgacagctcattttgaagattacattataaaaggaatatacctgrtgggtgcatagtaagtgctcagtaaattgtttgttctaagccacttttaaaaatggtttcattccttgtagaattgaatgcgagtggattaataatttaccttactttcttactagtgtccagttatattgttttttagaacaacacttggaaaataatttgcagtgattatatttctgaacaaggttcagaaaacattgtttactaagaatttartctaataatttcagttaggcgctcatcagttctccagagtggttgagtttgtaataccttgtttaaagaataatggcttgttcacgtgtgtgctatgaaaaatgatgtcccatgttcacataaatttgggaaattctggactaagacttaagtctcgttaatcaaatctctttatagttaggcttctgtacattatgtatctccagtagcaatgytgccatattatttatttcccaaacttagtggacaatggagtcatttctacctagagtaccagtaaacatctcccagtgtgctatagtagaaaatgtctactcctcactgctgacatgttaaacttactcttggtttagagcatgtgtagaaacacctaaggtagctctatgctaaataatgaagagtagcacaagaatgaatgtatttgctgatacgttgctcacattctcaagcaaaaattcaactgcattaaccgatctgagagttttcctttaacctggactgtgtttctcaagcacattttttctttgttcactgcccaaggactagaactgtatttttaaggttgttttcccctaaaaggacctttagtaagcaaatttattattaaatgtgcacatcttattcacccaagggaataaaagctacttcgtaatgttgttactaaattttatcttgaaaataaataacagtgtttgaggacagaaraaactaggactgttgttgagataaaatctgttttcagcctgactgctttagtcactggacgagcatcagctactgcggtgtcagatcacttctcgagtagaggtctgcctagtgagtgagcaggagaacatmatcttaatagcctttggctcacccagagtcagggagagatgaaaataataggtcagaatgcaagtgacttaatcacagtcttcctagaattatctgtttgtttatgttgcatgaatgcataagaaaaaaattctgtcatgttcccaaggtagaattgtaataagcatgtgccagtgtgaaagctggaaggaaaaaagctattctctaacaggagaacataaagattcatttctctcccaccctcaactccaccaaagtaaatcctttcgatagtaaaagtttaataatttcttgtgggtttttctttcgttaagtctttcactaactaactaactggatattttcacatattacagaggaagacactacacataaaatacatggttggcctatgatatagttatatggcctttctttaggaattatgttcttttccctctccaaaaaaaaaaaaaacctcaagttttttttttttttttttggctttttagaagggcaggatttaagcaaagcattgtgaagaggagaaaagatctaggactaacaaacaaacagtataatggtatgaacgcaggtgactgggaagaatttactacacgataagaagggagcttcttaagtatgctggacagtgattgcttcaagtgtgcatttttaaaatactacgtatggaagtcacaatttaattaaacgtatcttaaatgatgatgacctttcacaatcctgattttttttttttttttttttcttgaggcagggtcttactctgttgcccgggctggagtgcagtgggacgatctcagctcactgcaacctccacctccagggttcaagcaattcttgtgcttcagcttctgcatagctgggatgcccagctaatttttgtattttttttagtatagattttggccaggctggtctcaaactcctgacctcaagcaatcagcctgccttggcctcccaaagtactgggattacaatctgatttagttttacaaatgactaacaaacttcagaaaacattcatagagtcaataatgtattatacatcttagatttatacatttcatatatgcttttaaagcttcaattaacagttcaatacaaaatttaaaaacaaatatatgcagcagtggttctcaggcacagaactgaggaggagactggagcaagtcttttccctagcatacatacagtgaatactatgaaccatgagagtggtatgtttccttctgacctagctgcctttttgattgaattttgttacaatgaacagctttaataggtatgatattgctaactggaaacaatgagatttaaaataaattgataacctgtattttcttgaagtctttaagacctaaaatgattacttttctcctaatagagctccagaatcatccaatgaaaataatattgtccataaagcatctagagtatctgcctaagaaccactgcccagggttattcaatgtcttcaggcctcacaggatgaggtaatggtatgatggatttcttctcagtatccctggaaagtgctttcctcatatctgtaaagaagcaaagtttaatataaacacccaaaaaatgtattatatcaaatgtaaagtgtataggtaaagttcccataagaggttttatccctacccccacttcaccatattctaagcaaaatgtatttataaatgtctcccaattgccaagtgtaccagatgctaaccagacctcacccagtattcagctcacaatacacgttttcttgttagcaaaataatatgtatgtaacagagtgaaacagtaaggtacagaaattaaccattggttagttaataggtaagttaattactactactaataggttgataaaggtaggttgagggaaatttaaattttaaagtcaaatattctacatttattaaaataatcaaatactacaatctgtagaaagaatgtaactgtttcgacttcttggggatactgccatggaagggagcttaccataagcgtcctcatcaggctccccgttgctggccgaatagtactctatgaccgtcctatatacactgtagcccaactgcttgtacatgttaactgcaacttggttagatactcttacaaagagatccacaaaaaatccaccctttctttaaaagaaaaacaaaaaaggaaaatgttagaatgtgagaaaccctagaaagtaatagatacatattttttttaaaacgtgtttttaccttgctttgactactactcagaatggtagtaataggaccttgtagctgattacatggtaatagaaatttgtattacttaggatttatgacaattactttgcagtgtaagaacatgactttatgtttgcatgctagtatttcaaaagcaacacgttttcttaaaagataaactcaaggcatttgttctacaaattcaccacctattacagtttctcctgtttatgaagtttatatacatggaatcatatattcttttgtcttttgcttctctcagtcgactaacattgtaagagtcagcttcaagagtggctgggcttgtgcacaagtcattcacggtcctgttgatacgtttctggcttttactatacaaacgatgctcctgtgaatacttctgttgagtgtctcacgtaaggtctatagctaggagtctcactgttgtgtcacagggcacatcttcattagttaataccaaactgtttttccaactggcttgtaccaacttactcttgcacagaagtgagtaagcctccattccacagcaacaaggcttggtgcatcacatgtttttatttttgccaatcttacagtgtaactatatctcagattttaatttgtatttccaattactaacaatgctgaatatatttctgttggttggccatttagatttctccttctgtatagtacttaaatctttcatacaatttttcccccgctacagttctctatgtattgtgaatattcaatactgtgtaatgtctgcaagtatctttttccaatttgtggtttgtcttgtcattatccttatgttatcttttgataaaaagttacttcacttcagtgaagctgaatatatgaatcctttccttagcctttttatggcctttttaaaaagttctacactgaggccacagagacactctgccatattatattcaaaagacttcttagttttggtttcacatctaggtttttaataaatctggagttgatttgtgtatggaataatggtaatctgggaaatttttttttcccatagggacatccaattgtccaaccacctttactgaaaagtctatcttcatactattgatgtgcaatgcctcttctgtggtatgttaaagtccatatattcttgggtctgtttctcaaattctgtaacactggtctagataactacagcactaagatatagtctcactctttacagtctgatacctggaggggcacatcacccatttttgttgttgttcaagaatatcttgtctcttttttgctctttctgttcctctgtatgtttcagagtcagcttaacaagtactataaaaaatgcttgggattttgactgcaattacattggaactgcggtcgattacctgtttactgtatcctctaatccagtgatagtttatcgctccacttatcagggctactttaatatctctcaaaaaagttttttaaatgtcagagaggtcttgcatagcacttgctagattcttaagtacttaatgttttttcatgctatggcatctttttctaaattttactgtttatatatatataaatacaattgatttttatactgactttctatccaacaaccttgcctaccttttattaattctaaacatttatttctagattcttgtggattttatatttgtataatcatatctgtgcaaaataagtaagttttgtttcctctcatatgtaaatacaattgatttttatactgactttatatccaacaactttgccttttattaattctaaatatttatattcttatggattttatatttatataatcatatctgtgcaaaataagttttgtttcctctcaatcctcctatcgtttattttttcctgctttcctgtgctataatttctagtaaattactgaagcgggactaacttgtccctaatttcaaaaggaaagcattcagtgtatcactactaaatatatttactacaaatttcttgtagatatttttcaggttaaggaagttccccctttctatttcccagtttgctaacagtttttatcaggaaggaatattggattttatcaagtttgctgcactttctaaaataaccagtgttctcctttagtgtaaagttgaaaccaccttgttcctgatgtgtcatcctatttatgtagtgccaaatccactttgctaattatttttccgagattttgcatctgagtgagatgttcctcgaattttcctttcccatattttgccaagtattgttatcaaggttatcctggccttaaaaaataagttgaggaatgttcccttttttggcttgtgcaaaatagtttgtgtaaaagtgacctttcagtcattatttcttaaatgtttagtaaaattggccagagaagccacagctttcttcgtgaaaagattttgggctactgattgaaattctttagggcaggggttggcttataacctattttgctactgccttcaagctaagaatggtttttgcaatggttgttaaaaacaaaacaaaacaaaacaaaacaaaaaactatgtaaccaagactttaggtggcctgtaatgcctgaatatttactatctgacccagaagaaaattgctgattcttgttctataggcttgacaaatttctatctcattgttctatcaattagaaaaaagcatgtctaaatctcccattataataataatttgtctatttctccttgtagttttgtcaatttgtgcatttttactttgaaatgatgtcacttggtatataccattttaaatcgctatttttttttttttttttgagatggagtctcgctctgttgcacaggctggagtgcaatggcgtgatcttggctcactgtaatcttcgcctcccaggttcaagcaattctcctgcctcagcctcccgagtagctgggattacagtcacgtgctaccacacccggctaatttttgtatttttagtcgagacgggatttcaccatgttggccagactggtctggaactcctgacctcaagtgatccacctgtctcggcctcccaaggtgctgggattacagtcatgagccaccactcccagacttgttacttccttgattaaatattttatcaatatgcagtgacccttttttatgctggtaataattattcaactataactattattaataagtattctaactttcttttggttagaatttgcaaggtaatttaaaaatttactttcaatctttctgtattaaaaatattttaatatattttacacatatttcctgtaaacaatacagacagcctttgtcttttaaatagagtcatcatagctggccgtgcatggtggtgggcgcctgtaatcccagctactcagagggtgagagaggaaaatcatttgagcctgggaggcagacgttgcagtgagctgagatcacgccactgcactccagcctgagcaacagagcaagaccccatctccaaaactaataataaataaataaagtcctaagtccattaacgtttactgttgtaattactgacaatatttggattctgggctaccattttatttcatgcattttgttttgctggtttaatttcctttttctcttctttggagttgacttctatcattcaatttttcttctcctctacttgtttggtttctatttttaatgtatacattgtatgcactatgtatacatgtatatagtgtatataagcatatgtatatgtatcatgtatgtgtatatgtatatatatgcctacaaatgaagattacttaaatcttagcaactagtctaaaataatgaaggcttagaaactggaagggaagagagcttagtggtcttctactcagagggagaatctatcatacaaataccctaaattatatgtgcaaggtcatagctagttacgacctgcttttttttattattattatactttaagttctgggatacatgtgcagaacgtgcaggtttgttacataggtatacgcgtgccatggtggtttgctgcacccatcaactcgtcatctacattaggtatttatcctaattctatccctcccttagacccccacccccgacaggccctggtgtgtgatgttcccctccctgtgtccatgtgttctcattgaacaacccactttctaactccctgttcactatacaataatgccaaatactttttttcaacataatgccattaataaatgtgtgtaaacta

SEQ ID NO: 97718 - DNA, 30352 bp, Homo sapiens
  misc_feature (1)...(30352): n = A,T,C or G
ggggtgaaggggtccagaggctggaggagggtcagtaggaagagcactttaggaatcccccctgcaggttcccagcccttgagtgacacctccttttcccagggggctgatgcctcaccttgatgtaagatgccagggtctgagaagttgagtgaaacaagactgaagaaggtaaggacaaagagggagcctgtgataacaggaaaggcccactccccgttctgagccagccacctgcaactgagaccagaggcaggctcggtcctgagcaggggcagcccaaagcccccggcccaaggcctgtggcttactcaggtcaggacccacagaccttcaagccagatctaaaaatccaggctccaaatacccaggcagactcataatggctccaccaaatgtcaccagcatgaccagccacccaaagctcccaaaatgcacaggcacccttgacctctgcgcctttgcacgtcggttcctggaacagaatatccccttttccctgcccgcacccttgacctctgcacctttgcacgtcggttccctcgaacagaatatccccttttccctgacctctcccccggtcttctgcactcccctgcctccatcctatcatcttctgtttccctggctgtctctttgtgggaaacctaacggcttgcctggaaaactcacgggaatgcgaagaagaggccactgaaaaagaccagcagcaccacattgaaggcagcaaagaggctagggaggaaccagggacgtgggaccagaggcaggggatggggctccttcaccagcggcgtggcatccgttaagagtgtcatggctgggcctccttcgcctccaggggaggtcagagccaccaggcttcctcccccagcccagcttccagagctccatggccacggcagcctcagagccgcagcccagggtgaaaggaaagaaggcccagtgtgacatcacagaggctgggggacctcagcagaactgtctgcagccctgctctagctgcctccggtgacaggcacttccaacagcaaaccccacccccaccccgacatgtgctggggaaccgggagttcctgcccctgagaggctgatgttgttggagaaaatatgacctggagaaacacatgggaagaaagttggtaattttcagccggcgctgtaatccctgtaatcccagcactgtgggagaccgaggcaggcagatcactcgaggtcaggagttcgagaccagcctggccaacatggtgaaaccccatctccactaaacatacaaaactagccaggagtggtggtgcacgcctgtagtcccagctactcagaaggctgaggcaggagaatcacttgaacctggaaggtggacgttgcagcgagccaagatcgcgccattgcactccaacctgggtggcagagtaaactccatctcaaaaaaaaaaaaaaaaaaagaaagaaagttgctgggtttttttgttggtttgttttgtttgtttgtttgtttttgagatagtttcgctcttgttgcccaggctggagtgtaatggcgcaatctcggctcactgcaacctctgcctcctgggttcaagccggttctcctgcctcagcctcccaagtagctgggattacaggcatgcatcaccatgcccggctcattttgtattttgtagtagagacggggtttagtcatgttggccaggctggtctcgaactcctgaccacaggtgatccacccacctcagcctcctaaagtgctgggattacaagcatgagccatattaaacttcctttataaaaggcctcaaaaagaagaaactgaggcagaaatttaaaaataaatatgcattcattcactccaagacaagtaacaagcaaggcaaaagttaaaaagaaaagaacaagttttcctctgcccagcaagctcacttcaaggacagttataagataacgctgtttaagaggccaaggccaaaagaataagctccagacacccctcgcctccagagcaaagttgaagaaaaaaaagaaagacaaattctttgactgttactcctttcccaggtttcttaagcatgattatgttttacaaatgtctgtatttagccagttcttgtttttctttcaatgcagctacaaagtcaccagctatgcaaggccacaagttatgctatagatgatgtgacctgtcatatgattaactacttttatttattggaagtctgcttataaaaaccccgctctgtctttgttcgatgctcagctttttagatgacagtccactaagccagtgcgtacctgaaataaacagtcctctcgttctctgtctcagtcttgccagtcctcagtttcctgcaacatctctactaaaaatacaaaaattagccaggtgtggtggtgcgcacctgtaatcccagctactcgggagcctgaggcacgagaatcgcttgaacctgggaggcggaggttgcagtgagccgagatctcaccattgcactccagcctgggaaacaagagtgaaactatgtctcaaaaacacagaataaaagaaaagaaaagattatgcaaaatggaagaaactaggcacaaaaagccacatattgtatggttccacttacatgaaatatccagagtagccaaatccatagagatcaaaagcagattcacagttgccagggtgtgggaggagggggactggaagagatgaggtttgttgttgttgttttgagactgagtctcactctgtcgcccgggctggagtgcaatggcaccatctcagctcactgcaatctctgcctcccgggttcaagcaattctcttgcctcagcctcccaagtagctaggattataggcacctgccaccatgcccagctaattttttttttgtagttttagtagagacggagtttcaccatgttggccagcctggtctcgaactcctgacctcaggtgatccacccacctcagcctcccaaagtacgggcattacaggagtgagccactgcactcggcctaatttttgtatttttaagagatggggtttcaccatgttggtcaggctggtctcgaattcctgacctcaagtgagccacctgcctcggcctcacaaagtgctgggattacaggtgtgagccacggcgcccagcctcttttttgatttttcaaaactgactctcatattaaggaagccaaaacttaagtgataactgaaatgatcgtgttactgaccacaggttctttaggctccgataaaaattgacacgaggccaagcaaatttcccagacaaggctttattaggggcttccgttccaccacgggggagacagcaccgcagggagaggtctccggctggctccccaggggactgcgttgtggcgtctcgaggagggcgacacgcgtaattcatgaggtaggtgagcgtccctgcaggagtgacagaacgcacagggatagttaggaatcgcggtaacacatacatcgcaggatcagaacacgacgagaaagcctctccctggcagaggcttttgttttgtttctgtctgtcacccagtctggagtgcagtgacaagatctcggctccctgcaacctccgcctcccaggttcaagcgattctcgtgcctcagcctcccgagtagctgggattacaccaccacacctggctaatttttgtatttttagtagagacggggtttcaccttgttggccaggctggtctcaaactcctgacacctcaggtgatccgtccgcttcggcctcccaaagtgctgggattccaggtgagagctgccgcgccgaggcagaggtcttggtcttgtaatgaggccgagggtaaagagtggtcgtgcttccggcttcctgcacacaaaggcaatggagttcattccctgaagtacaagattggaagtgcgacgctgcctatcttcatttttcaaggtcgtgtgatcagtggatgtggcattttgtgtaagatttacagtggaatgctgcttatcttaatgctttcactgtccttcaatgagcaggtaagaaaaaaaaaggaagaaagaaaaatgttgggggggggaatgcattagcgaatgcattagtggagttggcagccgagtcccatccctcctctgtctcaataagtgtcagatgatgctatcatataattttgtgggaaaaaataggccaaagaaatgaaattcagaaggacttattctttttggttctaaaatcagtttctgagagctggcaggccccaactgccaagaggagaccctggcggccacagctcatcctctctgaccaagccttagctggggatgggccggcctccaggcagggcctcccgctggctggatcccgggccacactgtacagaagacaaccccgtagagaccttgggtggggcagaagcccccttccctcactgacaccctgccggtctctcctggggtctcccagtctctgctgcccagtggggaagcacccgtctcagcccaaccgcagccccccccggctccctcctgccctttcacctttcctgccattccccactgtgtcctgaagtttctaagaacatccccagcgccctgttgtcagctctgggaagtctaaagttcagggctttgggtaattaaacccaaggcctctcagtgggctgggggtgaatgacctggcgaacgtgcctgcggagatgctgggaggaagctgagtcagtctgcgtctttgtcagggtggggctgaggccagtgaccctctgggggtcagggcccttgcaggcctcttccttccctgacctccaccttaggaggcagctggcccctgagacgcctgcctcacgacattgtcctgtcccaggaactggactttaggaggaggggaagctggagggggatgcagcttgactcttgggagagactttgaggtgtctgggcacaggagtggggagtcctccgggtaccccatcagggactgcttccactgcttgtatggcctcaccagcccagcgcaggaagccccctctcccttcccagaattgaccctctgcaccctctcctgggccctcttctcactacctccatctccaccatgccccaacagagcccctcccccaggcccctttggccgctctccacaccccacagctttctgtctgacctggtttcttagcctctctggacctcagcctccttatctgtaaaatgggaataaggatactacttcccttgtaacgcggtggtaaagtttaaataagctaaggaacacactgcatgtcctgcgggccctggcacaccagacatgctgacagacgctggctgctttcatcagctatgcaaccaaattctaaggggcccttcgtatgtgtcaggctgcgtgccaggaacctagaggtaccaccgtaccacagtacaagatgctgtgtctggcttcgaagagatttcagtctatgtggagagagagaaaagggaagctatcagccaataaaatcgtttgcaagcctgtaattcagcaggttttcaagacctgtcaaatgcccagcaatctcactctgcaactctgcctcttaaatacagcatcttccggcccagcgtgggggtggctaagcccatcatccagatgtgatgaactggggtctgggaaacccacaccggcctcatctggcttttccagcctgtcctcccttccacacatcaggctgacagcaccaaacacggccgaggcctcagccctgagtctccccgctgcagagtgcccaagcctgagttccagcaggttcttcaggggccgctgaccagggaacactgcggtgaggagcgaggacttcgtccccaccccggcccagggcaggggcttcgtggtgagcccaccccaccccagaaggctcctggaagggcagggcagactggcagcaaaatcctataggatgggccgggccagaggcaaggggtggccaaaggcacctgtccaagaggtgggagggaccacacctgggggcagggacgagtcaggcacagggaactccgccagcctagaggatcaaattcctccggggtgaactctgagatagaaagttggcccgggaagctcaaggagggagagcggcagaggggaagactctgcaattctgcttgccccccaccccggcccaggcaagccaccctgcccccggcccccacctgcccgccccgcctgcccttcctcaccccggtgcctgcgggattgctggagagaacgcggcgatggagccgggcaggacccagataaagcttgaccccaggtaagtgagggcggcgggccctgggccagtcgctgggcagcggtggcccctatcccgcggcctgtcctctctccctcccagagccctttggcggccgcactcagaatgagacaggactggaaatgctctagctgttcctaggtcctcagggacaacgtgggtttgggccagggtgtgacactccagggcctcggccttgccccccagcgtggggagagaaaggtcgcagagcgggggctgtggaaggcattcgcagaggaaatggcagcatccctcagcagcagggggcccgtccgtctgtaaggactcacccttcctctgggatcctgctcttcctctctggtcagtccctgggctgctgcccgacccgcatggagagaatccacggtgggctcttcaggcacggcagccaggcacagcctggctaggtggcagcttgtcttactcccccacctgggccagttctccactccctctaagaaaagggccctgaggccgggcgcctgtaatcccagcactttgggaggctgaggcgggagtccaggagtttaagcccagttccagtttgagtcctggagttcgagaccagtgtctgagcaacatggcgaaatcctgtctctaccaaaaatataaaaaattagccgggcctggtggcgtgcacctgtagtcccagcttactcatggggatgggggttgagtagatcacttgagcccaggaggtcaaggctgcctgtatgagccaagacagaccactgcactccagcctggacaacagagcaagaccctgtctcaaaaagaaaaaaaaagaaagaaaaaggaaggaaggaaggaaggaaagagaaggggaaggaagagagaaagagaaagagagagcagaaggaaggaaggaaggagaaggggaaggggaagrgagagagaaagagaaagagagagtgaaaggaaggaaggaaggaaagaaagaaagagagagaaagaggccctgaggggaaatggacaaagtcctgcactcaggagtggttgagggtccagtgtgcaaccctcccccttcccccagcccccatggttctgagcacaggctggtgtctcgccaggtacacagcagatcttctggaggtgctgaagaccaattacggcatcccctcygcctgcttctctcagcctcccacagcagcccaactcctgagaggtgagtggggaccctcctcagagggaactgagaggagggaaaccaggatagctgagtggagctggggagaggcggccctgagctggtgcacctgggcagccggggagaataactggcccggtgtctgtcatcgtggttaaggctctggagaagggcaatgcctcaaggagtcagtgggtcaaaagggtagcatgagagcctggctccggagagcaaccgtcatgttgggcctccacaaaactggcctcaaagctcattcaaactgcggacactgcgacctggggcgctttttcagaccccagagccatctggggacccaagatggtgcccaagtggtccaagccccatcgggtctcctggagggctgcacggcatccrccctggacccatgtcactctagagggtggttacggtgagtgacgtgcttcacacaggtgaaccrgttgtatttgttttacgatccagcctttctgaaaaacctttgtcctcactggagcattctgttgtcgggtttttgtgtgtgtgtttgtgggtatttgcctcattccacccctgagctctcaggtggacagatgggattcaaaaacctgttctacagtgtttattgtagtggagtaatttgtttgcaataataagtcataattgtccactgaaggggagggtgtggggatccccgaggccagctcaagttcagctgttggaagaattccttgactggaaattttacctttgcgttttgtcgctctgtttcctgaagataacttggggtgctcctggtcgtccatctactgctttgattccttggatcccacccattctttcactttaagaaaaaacaagtaattgttgcagaggtctctgttttgcagcttcccttttgcaagaagcactttttccaaataaaacagtaattaaaaaaaaaaaaacataggtgaacctgcaaaagtcctcgcagtgttggccaacaagattctattactgaattacttttgaaagtgaaaggcattggctgggagcggtggctcacgcctgtaatccctgcactttgggaggccgaggcaggtggatcacttgaagccagaagttggagaccagcctggccaacatggtgaaaccccgtctctactgaaaatacaaaaattagccaggcgtggtggcgggcacctgtaatcccagctactcgggaggctgaggcaggagagttgcttgaactcgggaggcggaggttgcagtgagccgagatcacgccactgcactgcagcctgggcaacagagtgagtgagactccgtctcaaaaataaaagaaaaaaaaggaaaagaaaaagaaagtgaaaggcataggatggggctcagcttatttccccggacaccaaaaacattgagaatcacggcccgagcatgcttagagaaaatgtgactcacgcctgcgttttattttgttttcctgctgcatactgactacctctgaaatgttggatacaagtctgtgtctctgtagcacatttaacacgtttcccaggcaacaggaagctctcagtgtgcgttctgttgcagacgtgggcgtgtccttgggctgtgtagggcttcatttcagatgatctgaaccagagcggttgccaactgccagtgtccggagatgcctggtggccactctgtggttagtggcagtaggtggctgctacatctagttccagtgaacctcctgttgagagagtgcagctggtggtayaagccttcccttacacagcagctgtccccccagggaatatttggcagtgtcgggagacttccggttgccacactggaaggtgctactggcatctcgtggtcagaggccaggaaagctgctaaacttcctacagggcacgggaagagcccccacagaaaagattattcaggccaaagtgtcaatagtgctcaggttgagaaaccttgcctcacgcaatgaaaacggttctcacattgctttgcttcagaatgtgcaaacggaaaccccaaggctgttcagaacaggccattctgagtctgctagtccagcaagcctcgccgcaggcagagtggggaggatttggccagcgggccctcctgggacagggaagctgcgaggatgagttcggggacgccccaggcccaggggagcgaggtctggcaggattcaaggatcctggtggaagagcaggggacaattgagagggccgggcaggagaggtgaggcccgctgcgcgccgkgctggcggaggagctgtgctttatcccgcagcgagaaggagctcgtgaaggctctgaggctgggagtggctggatgaaagtcgtgcttctcggccattcgttagtaatcaggatggactgcagaggaagaggcttaagaagcagggatgcggccggacaccgtggctcatgcctgtaatcccagcactttgggaggccgaggcaggcggatcatctgcggtcaagagttcaagatcagcctggccaatgtggtgaaatcctgtctctactgaaaatacaaaaattagccaggtgtggtggcgcgtgcctgtaatcccagctactcaggaggctgaggcaggagaatcgcttgaacccgggaggcagaggttgcagtgagccgagatctcaccattgcactccagcctgggtgacagaacaagactccgtctcaacaacagcaaaaaataggcagggatgtaaatgagaggtcgttgccccggcctgccatgcgggaaaagagtctgaggcagggcagtggcagggaaagaagaggaagggttgggaaacaggcagttcaaagaaagagcaggcaatctaggaaagccctaggcgtgtaagtgctggttctgggcaatggtgacggcacagccagaaataggagaagcaggaagaagtgcctctgggaggctgtggcgaaactccttcctcgcttcatttgtaaactttgttgtcccttaatttttctttttttttttttttttgagacagggtctcactgtgtcactcaggctggagtgcagtggtgcgatctcggcttaccccaaccctccacctgctgggctcaggtgatcctcccacctcagcctccctagtagctggggaccacaggcacatgccaccaagcccagctaatttttgtatttttttgtagaggtggagtttctccatgttgcccaggctggtctcgaacttaaaattaaatgctaagaaaactatttcaggccagtcacggtggcccatgctgcaaccccaggaggtcgaggttgcagtgagctatgattgcaccaccagcctcagcctgggcaacagaccgaaaccctgtctcaatttaaaaaaaagagagagagaaaaaaaagctattattctagaagaatgattgaatcaattttttttttttaattttaaaatcacggctcacggcagctcgagctctgggctcaagtgatcctcccacctcatcctctcgagtagctgggactgcaggcacacaccaccatgcctgggctaactttcaatttttgtagagacagagtctgacttcgttgcccaggctgatctcaaacgctccagctcaagcgatcctcctgcctcggcctcctgaagggctgggattacaggcgtgaatcactgcgcccggccttaaagctactttttattgaacaaatactacacgccaggtgctttgctaagaagcttaaggagaggataartaacctgtctatggccatagagctattagtaagtggcattttactttgtttttgtttgtttgtttgtttggtttggttttttgttttttttttttaagagacagagtctcgctctgtcccccaggctggagtgcagtggtgtgatctcagctcactacaagctccgcctcccaggttcacgccattctcctgcctcagcctcccgagtagctgggactacaggcgcccgccaccacacccggctaattttttgtatattttttagtagagacggggtttcaccgtgttagtcaggatggtctcgatctcctgacctcgtgatccgcccgcctcggcctcccaatgtgctgggatgacaggcgtgagcccccccgcccggcctggcattttgctttgaactcaagtgtctgactccagtgctctacactgtgctcctaagctactggatctaatatgcaagcatggaaataatttttggttagaaagctgggattatgggtgattactcttttttcaaattcttatttaatgctcctgttttcattattttaaaaagtagtctttgctattccagagacagtgggaaatttaatagttgctataagtatgattatattcaaaatggtccactagacaagcatttcccaaagtctcagactcttaatcccaaggagtccttcatggaaacannnnnnnnnnnnnnnnnnnntaggtttaatattgtttccttaaagtactgaagacctcacatgtaccccataagtatatacacttataatgtacccataaaaattgcattttttacaaaataaaaaaataaaagttaatgtaaaattttgaagacaactctcattgcattctaattatcgtaggtgaggaattctatccttttttaatgtaatttttcctttatgagtattggttttgctcgctaatcttcattatttgaaaatcttataatgggtatagataagatttttagattgactgcatgtaaaaatccataactcctttaggttttataaatattattcataatgtgtctggcctttcttacctcctattttggttgggcctttggcttttcttcctttttttttttttaagagacagagtctcgctctgtcccccaggctggagtgcagtggtgtgatctcagctcactacaagctccgcctcccaggttcacgccattctcctgcctcagcctcccgagtagctgggactacaggcgcccgccaccacacccggctaattttttgtatattttttagtagagacggggtttcaccgtgttagtcaggatggtctcgatctcctgacctcgtgatccgcccgcctcggcctcccaatgtgctgggatgacaggcgtgagcccccccgcccggcctggcattttgctttgaactcaagtgtctgactccagtgctctacactgtgctcctaagctactggaagcaaatatgcaagcatggaaataatttttggttagaaagctgggattatgggtgattactcttttttcaaattcttatttaatgttcctgttttcattattttaaaaagtagtctttgctattccagagacagtgggaaatttaatagttgctataagtatgattatattcaaaatggtcaactagacaagcatttcccaaagtctcagactcttaatcccaaggagtccttcatggaaacagagttctgtaggaagttaagttttgtgaccaggcacggtggctcacacctgtaatcccagcactttgggaggccgaggcgggtggatcacttgaggtcaggagtttgagaccagcctgcccaacatggtgaaaccctatctctacttaaaatacaaaaattagctgggcatggtggtgggtacctgtaatcccagctacctgggaggcggaggcagaagaattgcttggatccacgaggcggagcttgcagtaagccgagatcgcgccactgcaccccagcctggcgacagagtaaggctccatctcaaaaaaaaaaaaaaagttaagttttgtaaaaggtgcrttctagaccctccttttggaaatttacaatgtaaattagcagattaaaaatgtcagtatgctctgcaggaatcatcacatttaaccttaatgcatttccaaaaattcttcagcygtggaatacttttgtcccatagtgtctatttagatgcccttttggggaaattgagtttaaccagcaaagaagaggccatctcctaagaagatagtttgatggacagacccagtatcgggctatggatgctaaggaacttttcctttcctaattagagtaccaaaggcaacagttagaagacactgcaaaaccatttgtgttgaacagtcagaatctgccccaccctcaccttcataaatggaacggccctcccagggttgcctttgatgatctctcccatatccacgagtacacacacctggagtcactgtgtgtcatggttaataagagtgtgggcttagtcacgaatacctgcgtttaaatctctgctccttcacttccaggctgtgtgaccctgggagatgtgcttccttctctgagcctcgtttcctgaaaaagtctatgaaatgcagatgatgataggaattctcataggttatttctttcattcaacaaatagttacagagccgttactcctccgggcgtttgagaacagagcacaagcttgacaaggtccctgcctccgtggagtgtgcaccacaaggtggagagccgagaataagcgagtaaacagctgtgtaaatacaaatagccctgatgtgggcggaaggaggacataacgttayccggaatggagattttcacggagcagggagcagttagggaaatgaagactgggaaggactgggttggtggcgtgtgaaagggcagtttttacgctctccaagggctgatgagcacacggggctgggggtaagagaggctctagcaatkgcccccgcttcccaaccacagaacattggttttggaaaaccacctgcattaatgttggctttttcctatctggactttgcctattgtctgagtttttttaattaaacatttctattataaaaatcattcaggtttagttaaaaaaaaaaaagaaagaaagaaaatacagaacagtaaaaagagaaaaaaatcatctacagtcccacccagagacaggcacggcaaatatcttagtgtaatttccttttttttaatgccttttttttttttttttttttcagacagagtctggctctgtggcccaggctggagtgcagtggtgtgatctcagctcaatgcaacctccacctcccagttcaagcaattctcctgcctcagcctctccagtaggtgggattacaggtactcgccaccatgcctggctaatttttgtatttttggtagagatggggttccaccatgttggccaggctggtctcaaattcctgacctcaagtgatccacccgcctcggcctcccaaagtgctgggattacaggcatgagccactgtgcctagccctttctctatgtttttatttaacatttgtagaaatcatactattcctaaaattttatgttctgtttttgtaagcatgatacaaaataaatttttcacatcattgtatatttggaaaaatatgttcttttttaaaaaaaggtttatttttgttataaatacatattcattatagaataattggaaaagaaagacactagggattttcacacaccgagaaaaggccatgtggggacacagtagaaacgcggttgtcggctggacccggtggctcacgcctgtaatcccagcactttgggaggccgaggtgggcgggtcagttgaggtcagttcaagaccagcctggccaacatggcgaaaaccgtctctactagctgggcgtggtggcaggtgcctgtaatgcccagctacttgggaggctgaggcaggagaatcacttaaacctgggaggtggaggctgcagtaaggtaagatcagannnnnnnnnnnnnnnnnnnntctgttggggcatggtggagatggaggtagtgagaagagggcccaggagagggtgcagagggtcaattctgggaagggagagggggcttcctgcgctgggctggtgaggccatacaagcagtggaagcagtccctgatggggtacccggaggactccccactcctgtgcccagacacctcaaagtctctcccaagagtcaagctgcatccccctccagcttcccctcctcctaaagtccagttcctgggacaggacaatgtcgtgaggcaggagtgtcaggggaggagagggagagttgtctgcaagtggaggagagaggcctcaggagaaatcaaacctgctgacaccttgatcttgaactagcctccaaaactatgagaaaataaatttaagttgtttaatttttaaaaaagtgactactcagaaaagatagaaaaaagtaagtagaaaagaagacacaaatcatccatagtcccatcacccaaacataagcattgctaacttttttcagtattataggtattttcctttttttttttttttcacccaggctggagtgcagcggtgtgatcctggctcactacagccttcacctctcccggagtagctgggaccacaggcaggcgccaccacacccggctaatttctgtatttttagtagaggtggggtttcactatgttggccaggctggtcttggactcctggcctcaagtgatccgcccacctcagcttcccaaagtgctgggactaccagtgtgagccaccgtgcccagccgagggtcagcgtattttttgacaaattcacccatagtcctggttggtcctgtggtgccaccaggtgcgactgaccgagacaagagctccagctcaagtctgtaccgtggccacctttctccctgttttggtttcagcagtcatattgctcccactgagctgccctcatgttccttagtcaccaaaacacagagcagactagctaatcccttcctcgtgctcaccccgcaaggcaacaggacaatgactggagtgtggcagttttctccctttcttcctcttatctagtcaggtagcaggtgcaaaggagggtccaataactagaaaagacacttagataaatgaccacaggttcactaaggacctagaaccctttctttaaaactaacggctgcattaatgaatcacgtttgttcggaaacacatattgtgactatattcatttttttctgttagcaacggtgaggccagatgaggtctaccagtatttgtcaaagtgtctgctatcctccgaccactatcaggtgagcttgttaaaaatgcagatgactgggcccatctcagatctatggacgcacatgtctgaasgtagggcctgggcagctagctgctttttaacaactcccaaaatgactgcaatatccacgaaagtttgaaaaccttggactatagttcatgtaagaccaagcatgaggccagcgtgcgtcaggtgtccttggggtttttatttgatccgtttctcttttgttgaagttcycccctggccgagtgtggtggctcacgtctgtaatcccagcactttgggagaccagggtggaaggactgcttaagcctaggagtttgagaccagtctgggcaacgtagtgagaccccgtctctacagaaaatgttaaaaattagccggccgtggtgggggtgcacacctgtagtcccaggctacttgggaggctgaggttggaggatggtttgaacccggaaggtcaaggttgcagtgagccatgatcacaccactgccctccagcctgggcgacagagtgagaacctgtcctcctccccacaaaaaagttctctgctaatgtcctggtttcaccatataattttggtgaaatcaacttaaacagatccagaatgtcccataaattatattcggcttcaattatgttaattgatctacattcgctagtgcagcacctggcactggagatagaaaagtgaagtggggtygggcacgggggctgaggcctataatcccagcactttgcagggccaaggcgagtggatcacttgaggtgaggagttcgagaccatcctggccaacatggagaaaactatctctactaaaaatataaaaattagccgggcatagtggtgggtgtctgtaatcccagctacttgggaggctgaggcaggagaatcacttaaacccaggagatggaggttgcagtgacccaagttcacaccactgcactccagcctgggcaacagagtgaggctccgtcttaaaaaaaaaaaaaaaagaaaaagaaaaaaaaaagactatttcttaggttgaatactctaggtctaaaaaatcctcattcctgtgcacgggtgggagcctagatccagtaaggcaatttcgatccgaggaacaagcccaggccttctcccgctcagtcccggtcgtcagctctctgccttctcctcctctagccctgggccctgtggaacttgccctcactagcatcctgaccttgctggcgctgggctccattgccatcttcctggaggatgccgtctacctgtacaagaacaccctttgccccatcaagaggcggactctgctctggaagagctcggcacccacggtgaggcccccggggctgccctgtggggggaactgaaaagaaggcagagaccaaggtgagaattcctctaaactcagcacgtcacttcygcaaagagtgtcctgccacgacccgcggagggccgaggtttgcaggccgacctccccttgcagttaggatcctctgcttggaaggctgtgcagygtttgcattctaagggctgcggagacagctggagatctgctcagcccaccagccgcctcatccttgctccccgctacagtgttgccacttgaagagcttccttcagtggttcctcagagtgtgggggaaagtctcattccacagggtcacactcagctccacccttacgctgaggcttttgaaacaccctcccacaggtccttggtttgcttgacttaattagtgctttttccagctggcaacgtttaaggaacgctgcctcgaatgtgtaggttttgcctcctgtgtccttgccgcaaaaggcttccggagcctcagggtctccctcccgccctcacctgctcctgccccttctgagcaggtggtgtctgtgctgtgctgctttggtctctggatccctcgttccctggtgctggtggaaatgaccatcacctcgtgagtgccctgcctcgccccayctccaagggcccctctgctcccgctcaccaggactcgagtccgtgtccttgatcccagctgaccatgtatctggcccttcccagcttgtgctagttccgggctcttgcgctcctggctctgctcagggaatgcctcattttggcatctggcacattcctcagccagccctctgttcccacagtctgaaattccccttctcccagtcctgtgggccgtctcctctccctcgcccctcttgggtcacacacccagaacgcccagccctagctctgctcctcagtaagccccacctctccctgctgtctttctctctggcagcagacctcgyaggccctcttctctccccaccccaggttttatgccgtgtgcttttacctgctgatgctggtcatggtggaaggctttggggggaaggaggcagtgctgaggacgctgagggacaccccgatgatggtccacacaggcccctgctgctgctgctgcccctgctgtccacggctgctgctcaccaggtgaggcggggccaaggtgccttccccaggagcyggggagcctctcctggacccctggycccctycaaggctctgggaattaggcgtgaataggccaaagccagtgacggaagggtgggcatcccacrgccaggacccacgggcgccaccctcaggggacaggggagcagaggaaggagagctcctcaattgtcatcactgaacttcactgcaccctgcaagccttagccacacagagaaaactggacttggggccattcgcttgccccttctgcccactttggtgaatgaggttgaggtcacactcccagacctcgctccaaagacrgaattcttgtctggaggtgagtgggagaccaagagggttcccagcactctcaacattctgcttttttcctctgtccccatccacttaacctggttggtgtttatgacagcagccgagcctcagcccaggagccctgtgaggagccggsgcgtcttcctggggcagggggtttgtgggcccatgttcctaaccctcttccccactcaggaagaagcttcagctgctgatgttgggccctttccaatacgccttcttgaagataacgctgaccctggkgggcctgtttctcrtccccgacggcatctatgacccagcagacgtaagccgggagtaagggacagcacagtccaagactcatttagtacctttgtgttctaaaaggaatcaccagagccaacaccccttgacagagggccccagaaaagggtggctgtgggaaaacagaggctcagggactgccagggagagaaccgcaataggccaggcccccgggctttttcattaccgttcctgccgtgggagaggagagctcaaaggaagcaccaggtgccatgatgcatggctcacgaggccgaggtgggaggattgctcaagagtgggagttcaagaccagcctggacaatatagcgagatgccatttctaaaaatgtttttaaaattaggctggacatggtggctcacacctgtaatcccagcactttgggaggctgaggtgggaggatcacttgaagccaggagtttgcgaccagcttgggcaacatagtgagataccatctctttttttttttttttttgagacggagtttctcttttgtcgcccaggctggagtgcagtagcgcatctcggctcactgcaacctccgcctcccgggtttaagtgattctcctacctcagcctcctgagtagctgggattacaggcatgcaccaccacccccggctaattttgtatttttcatagagatggggtttctccatgttggtcaggctggtcttgaacacctgacctcaggtgatccgcccgcctctgcctcccaaagtgctgggattataggcgtgagccaccacgcctggcccatctctattattaaaaaaaaaaaaaagttagctgggaatggtggtgtgcacctgtagtcccagctactcagaagcctgaggcgaggggatcactggagccaggagtgtgatgctgcagtgagctatcattgcacctctgcactttcagctgggtgacagagtgacaccatctcttgaaagagagagagagagagagagagcttgcctgcctcactgactactttctgttgccaccagatttctgaggggagcacagctctatggatcaacactttcctyggcgtgtccacactgctggctctctggaccctgggcatcatttcccgtcaagccaggctacacctgggtgagcagaacatgggagccaaatttgctctgttccaggtaactataccctgggagagaaaagatgtttcataaccgagctacagatagttggggttagtaagtgaggccaataaaggctaaagtgggccgggaatctttttcataagcctcacgtctctcatgagatttggaaaatgattcctgtgcttcccgcttttgtctttctgtgctggaattgtttcccagggctgccatgacaaaataccacaaatcagatggcttaaaacaacagacatgtcttgtctcattgtgctggaggctagaagtccacagcgaaggagccagcagggccctgctccctttgagccctgcagggggtcccagcctctccctagtttcctagttgccagcagtcctggaccatccttgaccagcatttgcgtcactcccatttctgcctccattatctcgttatattctccccttgtgtttctgtgtgtcttctatttttttttttttttttgagacagagtcttggtctgttgcccaggctggagtgcagtggtgccatctcaggttaagcaattctcttgcctcagcctcccaagtagctgggattacaggcatgtaccaccacgcccggctaattttgcatttttagtagagacggggtttcgctatgttggccaggctggtctcaaactcctgacctcaggtgatccacccgcctcagcctcccaaagtattgggattataggcgtgagccactgtgcccctccatctcatctatttttaggacaccagtcaaattggattaagggcccaccctattccattatgacctcatcttaactaattacatttgtaacaaactgttcttaaataaggtcacgagtaccggggggcaggacttcaacatagctttttggggacacaatttaacctgtaacacgtgtgttagttaacaaaccttacatttgtctccttgcttcttcctttccttttctacctatgacttcctaaaatcctataacccatcaacaccagcagaagcattagcattagctacaggacctacctacaccatgtgccgggcactttcacacattacacttcaattttcacaaccccaggagtcatttttcccattttacaaaggaagaaacagacccagagatgttcttgctcaaaggcacataaggaacggggctagaatttatacccaggtatgtcttgactcctccacacatctgtcttctccttaccctgcccttcatcttcacaacgcttctgaaaattctctcaaaggcatgttggcccaccttctacgtgctgccttctctaacctcaaagatgacttttccaccaaatgcaatgacttctaacccagtcttgttctccttctctctccatcctgtctccttgctggtcttctactcccaaggcataatgactgccctacagtttaacagagtgagttcacgtacattctcatttgatctacgtacatgcctcccaaatgtgaacttccaggcacataggaggtagaatgaaaggggctatgggaatagagagagaagtccccggaatgagtcagggactgaaggggcagaaaggttctgggtcccagaagtacttgagaccaggccgaaagataaaagccgtgtgatggccgagcctgcccatggttaatgtgggggagcctgggtgagccaygccagccttgaagaagctgaggtttccacacaatgtactcagggagggcaatactaagataaatggtgcttccagggcttctggacagtgatcttcttcttctccccttttgccttctttatttggtgaaatattgataaaatttgccattaatgattttgaagtgtcaggttctgtggcattaagtacattcccatagttgcactaccattaccaccgtccatctccaggcacccattaaacacattccccattgccctctccctgcagtctctgggatggcagagcttccaaagggcattttaatggttaattgtccattattctaggagcagggacctcaggcacttgakctagatggaatgactcttctctaatcacccatctctttatccattgagtgctcattggtagccatggctgagaaagggaattaaaaatgaaccctttaatcagttcttatawcttgtcagaaactctaataaactactgggtagaaaataagaatgtcatttgcctaaagatgaaaatcccacagatttttaatgaagtgagagyctcaaccctctgtgactgcacagatctgacggtgggtggaacctgcccagcggaagggcaaggcccggcagtgggctggctgcgttctgtgccgtgagggcaggcccagtccacccttgcctctcttttatgttccgcaggttctcctcatcctgactgccctacagccctccatcttctcagtcttggccaacggtgggcagattgcttgttcgcctccctattcctctaaaaccaggtctcaaggtgagcacgttaagcctcctgtcccatcgtgggatggatgagacggggagagtcaggaaagaaggggccccagaacagacattaggccagcctgacttctgctcagagtgttcagaagggatcttcgggaaatcccaacagaggctttaaggaaactatgacctctctgatcacacagaagagaagtgaaaccccacagcttgaggccagccctgagggccaacccaggaagccatgggttcagtcctcagctcctgggagaggaatgggaatggttaaaaaacagaagcccatgttgattgaacacacataagaaatggactgtatgccagcctcagagcacagaagtagacagccaacttccggttctggctctaccattaacccgctgtgttatttatgacaatttcgtatccctaagtcctgatttggggataaactggagaaagtgttgctcaactcccgtgcccgggctgctagtaaaataccacctctgtaactcagcataacctacgctgtatttcacccyacactgcagtgatgaattgccacctcctcatactggagacttttctaatgactgtgctgacacgaatgtactaccgaaggaaagaccacaaggttgggtatgaaactttctcttctccagacctggacttgaacctcaaagcctaaggtggatggcttggacaatgaaaggatgctgtactcattagaatacaagattcctttactgtccctcaaccttgaccaaatgggaagcattcccccttgtcaacacaagctggcagatacatttgactctacagatgaaggtgaacaatgttagrataaaattgctttggatcttgcctggaaggtgttttaagttttgtaataaacaagatgatgtctgaaaatgtgtaactgggcaccttgcctctgtccatgtcactattaacccttcaaggttgtatattgctggctaggtgcgacagctcatgcctgctatcccagcactttgggagcctgaggcgggaggatcacttgagcccaggaggttgaggctgcagtgagcaatggttgtgccatacactccagcctgggtgatacagccagaccctgcctctggaaaaaaaagaaagcttactgagctttcctaaagcagatgaaaagaagagtatatagtattgtgtctggcataagaaaaggagaacttggtgaggtgaaatagcaccagcccagagtcttgaagaagccaggggccctggagaacagatggaaggtgacctttccctgacaggtgtgctactacggcaccaaccacgcggggccctggtggtctgggtcagcctcactttgtgggacaatggcttttgagtcttcagtgacaagctagaaaaggaatctcctgacactgtggtcatggagcttgatttctaaggagagagtcagcacgtggaagcaaaggcaccgagagtccaagtaaaagtcccaaatccataaaatgcaccacacaggtcaaaacacaggacacggccgggcgcgggggctcacgcctgtaatcccagcactttgggaggccgaggcaggtggctcacctgaggtcaggaattcgagaccagcctgctcaacatggagaaaccccatctctactaaaaacactaattagccaggcgtggtggcgcatgcctgtaatcccagctacttggcaggctgaagcaggagaatcgcttgaacctgggaggcggaggctgcagtgagccgagattgcgccactgcactccagcctgggcaagaagagcaaaactccgtctcaaaaaaaataaaaataaaaaataaaaacaccactggacatggaacatcaggtaaaaccacactgcctttatttggctaaagaacaaaatccaaaataactcagaacaaactaagaacagacaggaaaattacagactgaaccccacttgaggaagacttccccacggactcacactggtgatggggcgaacgttcaagacgaagccagcagtcctttccaagactcttttgtcttttagggatcctcaatacaaaacaacccaactaatccaggatatgtgttcaaaacagtcagttttccccctcaaaaggcgggaaggcccacttcaaacctccaggaacacaacccaagtcatcccagtgttaaacctggtgcttccgttttctgcctcaatccgagcgctaacataaaatcttggcagacaacaatctttcttcttcaagaaaattaacatttaatggtataatcccaagaacatgttctacttatttacttggaaaaatagaagctagggaccactctttatccgatggcagtctattctatgagagaaaacaagaacaatcattgttatgactttgaaaaatagaacctttaaaaatacttatattggtaagcttaaaaaaatatcatcagttaaaaacattaagggggctttctttttctacctgtattggttcaacttctggtgagaatgtgtgctgatagaaaatctagaagctatggcttttagggaattaaagaaaagcagcaaaatataattgatttggaaagattttggataagtgatctggaacaggattaaaaaggcaaagagctcttgaaaataagctacccatagtcaaaataatccaggaagggggaatgacgccctatgaaccactgtggaaagaacatctagagatggtctgaccagctgtgcagcctccaaaaaaaaatcactatcgctcaggtgcagccccccaaaaaccaccatcactcaggtacagcctccaaaaacaccaccatcactcaggtgcagcctaaggagtcatcagtgatcagaaagtggctaagtttccttagcctccctcatattttttctcttcttcaggattttcaacctcctcacatccctaactttcttacccaagcctcagcaatataatggtctttggctctagctatcagcaatagctgcaagagcacaaatgatcccttcctagtcctctaaagtgtcaacctccattcttcagtgcttctgaatctagcataagaccaagctttccgtccggcccaccggaaggcagtggctgcgccggcacctccccggctctggccttctaatgtctcacacacagaggctctgctctaaggccaacacttctggctctctcatcttggccacatttggcccacccatgttgactgctttctcgtgtgtgattcagggaaacagctccatagcctcaaacgttaatatctgaagatttagatcccaggcattgtggtggtgtgcacacctctaacctcatttaattaggcacagatgaccacattatgcaacttcccaacagctttctccatctacccgtgctagtccagcacctcagaccacatttaccccaaagtatctaacaggccacactataaaagattttagctttcagtcagacaaatagctttcagtcaaaacgattagactgaggtggtagaagctcaccaaaaggggaaagggagtttcccaataacatgtacgtttgctggccctagcagtctcagaggcctgtcagcctgcaggtcccgttccaagcacagggcatgccaagagcagcccactgagagcagaggaagagggctcaaacatttgggacccagacaatatatttaggaggtatggctccaatagggagggaggaggaaaaccacgttccgggcatctccctgtctatccaaatacacttgcataatgtgcacttggaggaaccaagcagatgggcttcagcacagacttcactgccacaccacaccagggagaataagttagacagaaacaggcagcattcccaaagagagaaggctgacgcagaaaagttcaaagatgagactatgtaacactgggtaacacaggaaaacactaacttcagctgtttcaaagacagacaggattccaagccaaagcttgtatgaccagatttaagagtaagaactgcgcttcaaagaagagttagaaatgtcgttgtcataggcgatcaggataacaagaggcttcattctccctcgcctctgtgacgctctttctgggtgatccaagttttgttttttttctagttgattatttctctttatttctgtatgtgtgtgtggtttttgttttgttttggagacagagtctcgctctgtcacccaggctggactgcagcggcaccatctctgctcactgcaacctccgcctcctgggttcaagggattctcctgcctcagcctcccaagtagctgggattacaggtgcccaccaccacgcctggctaatttttgtatttttagtagagatggggtttcaccacgttggtcaggctggtctcaaactcgtggcctcaagtgatccaccagcctcagtctcccaaagtgctgagatgacaggcgtgagccaccacgccttgcctgggtgatccaagttttaagaaccaaggtagtcctgctgtgcaggcaatgattctagcctctgaccctcaggcggaaaactaggtgttaccagaaagtgtttagggagtggactatgagatgctcacagtcctagcagaggcaaggaaagagaaaatgtggttttcttagctgaaaacactaaaattccacccccacaaggggtatttatgagtgacaggggtggggcctggacataagcaattttcccctggatctagccacaggattactgatgggtgatgatctgctaggccgcgtagctaagcagctaaggagacaggaggccagggctttaaaagttagagcatgctcaacagcaagtgctaagcattagcattctttgatttgaaagtcaagtgttgaatccccccgggcaagccaacaaggcagatggaaccacaaccaccaggcgtgtgtgaaaagtggggagaaaacctaccacactcttgtcacgtgagggtatgctctgtggcttgctggaggagcagcagagggaggtccctgccagctgcagctctcagaggaaaagaaagatgtggagcactggttccagggaagaatgttctgaagagggacagaggtcaaggtgataaggctgttgctttagaaaggaaggtgtttcctatgcttttgcctttacattctgtgcaaatctctctaatatggctatgaccaaaatggattaacatcaagttccaacagcagacatttacaaagtatcctttgtaaaaggctaggtaatattaatagcattcaaataggagtagcagggccaggcacttactcccagtaggaaactaatctcaatcgacttggtataggattgagtattgtcccgctcctctcctcatcattgtaactctaaaagtgttccttccttcgaaggtagatggcacgaaagagactgacaaaagctcccaaagaactgggtcacagagttttctgagaagatgaacacagcagaaacactgcagttgatgccatgggtctgcttccatccccatcagtgtcttcatggaccccattgggtccaacaagaaactcctcagggagtaagaaaagttaggttcagatctccttcccgcagccacaatgacactggtgacagcagtacgttcaggggatttgtgactgtaactctgcttttcgcttttccttaaggaaatcaaaattaagatatttctccacaaattacccatcagcgtggctcatttcgtgaaggacttggcaagccacatagcttcagaacggaaggcaaatgctatagtataccgggaagaaaaggcctctgcgtattacactacctccttcttctgcccactcctcaggggcaaaaaattagttctacatttgaaagacgaattttttaaaaaattaatgaaaatgacaatttccctgttgagatcacgtgaacataaacagtgaaacaaagcccttgggggggggtaaatggatgcagagcaggcttctaaggtgcagtccccctccttcgtgtgggtgagtgatgtcacttgcaggacaggctgtttgggttcccccagtcctaggtcttctttccccagttgtctttcctttgtagctgtccttaggtttagtgttggggtcacaatttggaattcaacagagagcttctgaaggtaatgggacagaaagggaggacaggaaaggagggaggaaacattagtcttcttcatcctcactgatatcataggctgcagccttgtgcctggagagatttgctggggagcaaggtggggaagtcttgccggagaagggccatcggaaagagggggagggggagcgctcgcgagtagggctgctgctggggctctgcttcgggctgatggcctgcagcatccggcccttcccctctttcagcatatgtttctgcagaaaccgaaaggaagagtcagaaaaacaccgtggatcctacttaatcatcactgaagcatctaggactgggatagtctatgctgtactatttatttaagggttctcccctgctgtcatcacccgggaaattccccattcttcctcaataatctagtctaggattattctaatttatccaaacaccttcacagacagatccttcctgatatctaacctaggactcacttgctcaatcttttatttggttgaaaagactgctactcctcaaagacagaattcccaccttacctggggttcctgctgcagctacttgtagtggaggctgctttctttttattgttctttattctttcctttccttctatctaaaatcataccacagataaaagctgggcaaggcgacttgcttatcttgtcaccagactttaaggttgagagagagctggcaaaattatctaggagaatgtgtaacgtctttctgtaaaggtttcaaaaaccttgctggggacagttgaaagatagttctgcccagataaggggatagactagataacttctcagtgtcgatgccccttcctgctcaatgattctgtcattctttccacaacatggaactccctacattgtccagtgggaaagaacataccagtgctccttccggaccaaacatttccagaaaacttccaatgaattctcgggacttctcctcccacttctgaatgaggtcaatgcttttttcctccaccttctgaacaaattcttttgacttttcctccacat

SEQ ID NO: 97719 - DNA, 38979 bp, Homo sapiens
tgttttaatgatgatgaagttcactctttccctctctccatttgttgaaaaagtacaaaaatatttatacataaagacccaagtattgactctctttaaagatgaaattatcccactaggtacagtggctcattgtaatcctagcattttgggaggccgaggcaggaagattgcttgagtctaggagtttgagaccagcctaggcaacataataagacaccatctctaccaaaaatataaaaataagcctggtgtggtggcacacacctgtagtcctagctactcgggaggttgaggtgagaggattgcttgagcccaggagctcaaggttgaagtgagccaaaatcatatcactgcactccagcctggatgacagagcaagaccttgcctcttaaaaaaaaataaataaataaaaaacggttcattagaagccatattttagctgttctaattctatcccatctccccagtattagcgtgagagaaagatgcacagtgtggcaggctccttagctgttttgttgttttctttctttcctcttgttttagagacaggttctcactctgtcacccagtctggaatacagtggtgtggtgtgatcatagctcactgcagccttgaactcctgggctcaagggatcctctcacctagcctcctgagtagctgggactcagacacgtgtaaccacactcaactaatattttaattttctgtagagatggagtcttgctatgttgcccaggctggtctcgaactcttgggctcaatccatcctcctgcctcaccctcccagtgttgggattacaggtgtgagccactgtgcccagcctccctcagctattttctgattgctaatctgtagattattttaaaatgaaataatagcttaatagcttgatattgcatggtttcttcctttaggctcgattttattctccagccaccatatttattgatgagatagactccatctgtagtcgccgagggacttctgaagaacatgaagcaagcagaagggtgaaagcggagctgctggttcagatggatggtatctgtgtttagcttgagttgaacagggacgggaggttgttaggtgtggtgtctccagttccagtgggtcaaactttactcatagtgctaacccaagcttttaataggtattcttaacttcagatggactagagggggtggcaagaagttcctgatagtgatagtaatagatttggtacactgacagtggtgacaagtcagaattaatggccacacacagggcacccttttggtatatacaactatcttactttagctatgaaattgaaataaaaataaatgcagataaattggccttagagtttatgtacgctttgaaaaagatttaaaattgttatgtatttgagatctggcttttcgattaaatctattttgagtcatatatttgcatactacagaactcattttctttggattacaaattcacataggtaccagttaacctaagtcttaaggaggcattaagactgtgcttccttgtattgttgtactaaatagttgttgatctttaaatagctgagcttcatttggtataatccaacttaatatctttttcactctccccttacccttattttaggtgttggaggtacttctgaaaatgatgacccttccaaaatggttatggttctggcagctactaattttccctgggatatagatgaggctttaagacgacgccttgagaaacgaatctatattcctttgccgtcaggtatcttcctttcaatcttgtcagaaagcctgttaactttcatgtagttttgtttagagaatttaaaatttgttattaactaactttctggaagagatacatgaggagtatcttcctttacagtactagtttggctatatgccttaatactaaatagtaaggaattaaaaagtaaagaatggctctttacttaattatctcttcttagagatccaattcttactggaagacaacatctcacacaaagaagatttgagacaatagtatactatgtttatgctgcaggcttacattttaaaatttgtttctaccattagcaaaaggcagggaggagctattacgaataagtctacgtgagttggaattggctgatgatgttgaccttgcaagtatagcagaaaacatggaaggttattcaggtgcggacattaccaacgtgtgcaggtatgaattatcatggaagcataggtttttgtaagcataaacttctagtatgaagttttttggttttgttttttgagacacagtctcgctctgttgcctagactggagagtagaggcgcagtcacagcttactgcagcctgaaactcctgggctcaagtgatcctctgacgtgaagtttttatgctgaattaagacagatcaatatcttggtggtggctcacgcctgtaatctcagcactttgggaggccaagtgggagatcacttgagcccaggagtttgactggcctgggtaacattgcaagacctcatatccatgaaaaaaattttaaaaattagccgggcatggtggttcccacctgctcaggaagctgaggcaggaggatcgcttgagcccaggagtttgaggctgcagtgagccatgattgtgccactgcaccccagcctgggcgacaaagcaagaccctgtgtccaaagaaaaaaaaaaaagatgaataaagacccacattccagttttgttttgttttttgagacggagtctcgctctgtcacccaggctgaagtgcagtggtccgatctcggctcactgcaacctttgcctcctgggttcaagtgattcttgtgcctcagcctcccgagtagctgggattacaggcatgcaccaccacacctggctaatttttgtatttttagtagagacggtgtttcaccatgttgaccaggctggtgtcgaactcctgacctcaagtgatccgcctgcctcagcctcccaaaatgctaagattacaggcgtgagccaccatgcccggccccacatacattttgtagtcagggtcacaaattctggttttgttggtgttagcaggtgctggtaagatatctggtatctttcatgtcagtgaagagtctacagttcatttgaaagctacaagttcaagaagctaatgttaggataaattgtgtaaaatagaaaatcagtaattgtcttggattaaataaattgttggtgcctttgttcactatattataaaatacgaaatgactgtgaaatatattgacttggcatatgcacagaatacagtctcattctcagtgaacttatcctaaatgtgacagaatagcagtaaaaagaaaaaaagaatgtctttaatccagctggttcaagtaggttttgtcctaatctaagtattagtagagacacttaattaaccaggggcttgactgcgctcgtttcctcctttctaaagtgagcataccacacagggttctgaggattaaagctaaagtgtatacatcaaacagctctattgctatccctttgcataaatggtggctgctattaaggataaaacttggtaaaaggcaagagctgtttgaatctgaagttttgttttttttttttaacacaaatgagaaaaggagaaaccctgaacttacctagcttttcctctacatggagaaaatatttaattttcttgttaacagtttctcttctcttctgactctgtgatgcttattcttcattttattgaatagttataatgaaattcaaattgctagctttaaccccacttttactttttctgggattttatattcagtattaattatttaaattagcatcctttttcattacagaagatttaactgcttaaaaatcaatcacaacaggctttgtattccaataagtttctatacaatactacatatatatgtaatataattagagaatgctacaacagatcaattgaaaatttttctattaacaggttttcatttaaccaaagtaacattgtgtgtgttgttgttgtttttaacttaaaacctagggatgcgtccttgatggcaatgagaaggcgcattgaaggtttgactccagaggaaatccgaaatctttccaaagaagaaatgcacatgcctacaactatggaggatttcgagatggctttaaaaaaggtttctaagtcagtgtctgctgcagacattgaaagatacgagaaatggatatttgagtttggatcatgctaaattctcacatgtaaactgtgagaaatgtgccttaagtgtttgaatattaaatgcagtaattcattgtactgagtgctatattttttttaactttcataatggtaagatttttttaaaaaaacccttatgattctgaataaaggcaatatttttaagctgaaaatttgttttactttagcattactagatttctattattatttcactgaccacaaatgttacttagcttggaaagctgtcttttttttctttgctttttctatttttttcaagactgtttgtttcttctagctgaactggccattcatactgggattagccaacagaccataagaaagacatcaatcttggctcttgtttgaaaccaatagctacaatggcaaaccatcacgtttcttgattcagggcctaggaaagctgactttatatgcacttttttttttttttttttttggtatataaactatttattaacagacaaggcctacagacttacttcttcttagacacacccacgatgcggccacggcagcctgtggtcttggtgtgctggcctcggacacgaaggccccagaagtgacgcagccctctacgggcccgaatctttttcagtcgctccaggtcttcacagagcttgttgtccagaccattggctaggacctggctatattttccatcctttacatccttctgtctgttcaagaaccaggctggcatcttgtactagtgtggattctgcataatggtgatcacatgttccacctcatcctcagtgagttctcccgccctcttggtgaggtcagtgtctgctttcctcaacaccacatgagcatatcttcggcccacacccttaacggcagtgatggcaaaggccattttccgccacccatcaatgttggtgttgactactcggcaaaatatgctgggacttttcagggatcactagagacatggcggcagcacaagtggcggcatgtaggcctcctgtggaagagagctatatgcacttctaacttggcatcttctctcctactgtttgctgctgttactccttctaggaagaaaaaaatattggctctagctccagttaaccttacccattgcctctgggtgccagcggataactgaaaatccctgaacatttttacacagtagctaattaaagcatgagccaagcccagtatgtcttccttcccacctggtgttatggtagcttcccttcacctcctgggagagttttaaagacacattttactttgcattttaaaaaaataaaataaaattcttacttgacttttattttgcctatgtaagaggctgcactataggcaaataggcatttctaaacctgtgctgctcatagtactctaatcactcattaactcatgcataccaaacatagctaaagtaaagtattaatggtatgagttaataagtgaaataaaagttaatggtataaaattttagataagatttccatgtgtgactacttagaagaaaataacttaccatgttatcccaaccatagaaaacagagcctcaggagattgcggaccttgctgtggtcccaagtcttactgagaaagacagaagcctgggtagggatcttctgactgcagagcctacactctccaatagaccatgtagcctcctaaagttttttcttcactagaatctgtaagcttatggttaatagataaaataagaccatgtcatcatttggagttagaactggtgctttctaatgacttagggaatgagaaagggtgtaaagaacaagtgttactggttggtaactcaaggatcaaattgtaagttgcagattatttttttcagcagtatggagagagtattgcataatagagctccatgcaatgtaattaatttaaagtctggcaaagtgaaacatcactccttcattctacttgtcatcctctccacccccatcacacacatacctatttggcctaaatataaagtggtctcaaaaaaaccaaccatggccgggcatggtggctcacgcctgtaattccagcattttgggaggtctaggtgggtggattacctgaggtcaggagtttgagaccagcctgcccaacacagtgaaaccccatctctactaaaaatacaaaaattagccgggcatggtggtgggagtctgtaatcccagctactcaggaggctgaggcagaattgcttgaacttgggaggtggaggttgcagtgagctaagatcacaccattgtactccagcctaggcaacacgagtgaaactccatctcaaaaaaacaaacaaacaaaaaacaaccattactttcttggatagtgttttcaaaatgatgggttgcagtatatatatatatatatatttttttttttttttttgagacagagccttgctctgtcgcccaggctggagtgcagtggtgtgatctcggctcactgcaagctctgtctcccgggttcacaccaattctcctgcctcagcctcccgagtagctgggcctacaggtgccccccaccacgcccggctaattttttgtattttttttttttttagtagagacgaggtttcaccgtgttggccaggatggtctcgatctcctgacctcgtgatctgcccacctcggcctcccaaagtgctgggattacaggcatgagccactgtgcccggccagtaaaaatattttttaatgaaacaacagaaagtatcacatagagggccaggcgcggtggctcatgcctgtaatcccagcactttgggaggccaaggcaggcagatcacaaggtcaggagatcgagaccatcctggctaacatggtgaaaccccatctctactaaaaatacaaaaaattagccgggcatagtagcgggcgcctgtagtcccagctactcgggaggctgaggcaggagaatggcatgaactcgggagacggagcttgcagtgagccgagattgcgccactgcactccagcctaggcgacagagccagactccatctcaaaaaartatcacatagagatgagttatatgtactcgttcacattgtaaaatattaatatgtcaatatgagtgatggttaaaaaaggtaataaaacacttttagggtaaacagcactatatctagaaccacaagaccaagggcacagtctaattcatgacatcaatggactcattcaatttgagccatggtttcagccagtgtaaatgaaagtatacctactcctgcatctcagccattcttacctgggcaaaggttttatatcagtgtaaccaaaacagctatacttttttcctcaaaaaaaaaaaaaaaaagtttattttagagtgagaacatgtcatactacttttaaatcttggagcattcaaggtaagtagtcttggtacaggatacaatcaaatcatgatacacttcagtgattttatactgagtcacatacttaatataaaggcacactgtactgaataaaaaaataagtgttaagttcttgaccttttaaattagaattttataaagtgcttttcataaagtcttatatattatagtaattaagtggatataatttccttaacaaaggcaccttgaaaagttattggcacatgagattttgtctggtcttttttttttyttttgataatttcaaagtctcttcacatgtgttctcttccactttaagttttccttaacaattcatcatatgaatagccagcccttttagagaataaggtcaacttttttttttttgaaacagagtctcgctctgtcacccaggctggagtgcagtggcgtgatcttggctcactgcagcctccgcctcccgggttcaagcaattctcctgcctcagcctcccaagtagctgggactacaggcgtgcaccgccacacccagctaatttttttattttttttagtagagacagggtttcaccatgttggcaggatggtcttgatctgacctcgtgatccgcccgcattggcctcccaaagtcctgggattacaggcrtgagccactgcacccggccgagaataaggtaaactttaacttggcactgtaaaggtcaattttcaggcagtcttagagtttagcaatttctctagtgtataaactgattcttaacgatttaaagaaaattatattcaagtggcaaatttggaggcaacaggctacttcggagtccatgatatgagatggcgttttaaatacatgttttatcttcaaggttttcagctcttttctctggaccatctggatataagttgatagctgtcacaggtatgacgtccactttatccaactgaagaattcctctgaaatagaaagtgattaattactatcaaaattaaatgtttcctctgcctgtagtttgatagtgagaaaaggctacttcaaggttataatatacacctaaggttaggtgcttttgctacattctatttaaaaattcatagtggttgtacaaactgagcccaaagtcactttaaccaaactggctgagagaatagaaaggcatcgaggaagttcattatttcctattttagggaagaatagggtaagtatagatctccaaggcagagttaggttcctagatacacccaggctgagcaaaaagcctaagcctaagcctctctctaaataatactcaccaccacaacacaaccttaggtctttagatagtgttgctctttttgttacttaaaatccctgaccagagagtacgtctttggattgaatctaggaccctgcattgtaaattcagtgttattctaataagaacatcaacgggggttagttgtttatagaaccaaacagattctaaagttcacaggggagtaactgcaagaacagccataagattttttttaaaagaacaatggggagaagacaaagttgtcttaagtagctctcaaaggttttattaaaacatgatagtaggccaggtgtaggggctcacacctataatcccagcactttgggaggccaaggcgggcagatcacttgagcccaggagttcaagatcagcctgggaaacatggcaaaaccccatctctactaaaaatagaaaaaattagctgggcatgggacacatgcagtcccagctagctagctattcaggaggctgaggtgggaggatcgcttgaacccgggaagtggaggttgcagtgagccgagatcgtgccactgcactgccgcctgggtgacaaagttagcccctgtctcaaaaacaaaaacaaaacatgagagtaattaaaactgtgctactggcacaggaatagacaaatagatcactaggacagaaaacagtccagaaaaagactaacatatatggaaatttagtttataataaggtaacattctaagtcaatgataaattactaatggaaaaatggcctctgtctgggaaacaaaatgagaactctagctttaaaagtatacagaaaagtaatgctaaaaaataaattttggctgggtgcagtggctcatgcctgtaatcccagcactttgggaggctgaggtgggtggatcacctgaggtcaggagttcgaggccagcctggccaacatggtgaaaccctgtctctactaaaaatacataaattagccggctgtggtggtgcacgcctgtaatcccagctactcgggaggctgaggcaggagaatctcttgaccccgggaagttgaggttgcagtgagcagagattgtgccactgcactctagcctgggcaacaaagcgagactctgtctcaaatatataaataaataaataaataaattttaagaaaatataatggctgggcacagtggctcatgcccttagtaatcccagcacctttggaggctgaagcaggaggactgcttgggcccaaggagtccagcctgggcaacatagtgagaccctgtctctacacaaaataaattttttttaaaaaaatggctgggcacggtggctcacgcctgcaatcccagcactttgggaggccgagacgggtgggtcacttgaggtcaggagttcgagaccatcctggccaacatggtgaaacccatctctactaaaaatacaaaaattggccaggcatggtggcgggcgcctgtaatctcaagctattcaggaggctgaggcatgagaattgcttgaaaccaggaggtggaggttgcagcaagccaagatcacaccactgcactccagccagggcaacagagcaagactgtgtctcaacaacaacaacaacaacaacaacaaattagccaggcagggtggcaagtgcctgtagtcccagctacttgggaggctgaggcaggaggatcgcttgaacccaggagggtcaaggctgcagtgggccttgatagcactgccactgtactccagcctgggcaacagaacaaaaccctgtctttaaaaaacaaaaaacaaacaaaaaaagccccataattttaagataggaaagtctggcctacttagtaggcaaaataaaaaccctacatgctgtaaaggaataacatgaattacttaggccttgaatttaaagcttttgtatgatgagataccataaataagcaaaagacaaacgataggctgggattagtaaaaaaatctgcaatgtgcattacatatgtataacagacaaaagagctcttatatactaatagttacaaaatgccaacacaattgaaaaatggccaraggctctacgtaagcaagtcatgagagaatcatatatagccaattatcacaaagatgttgaacccacccagacctaaactagcaaagatgctagtaagatgaaaatgcaaattmagatgaattatatttttagtagcaaaaccaaaaaagattatcatcaggttgtaaggagttaatacaattacttgtgacacagtaattttacttttaggaatctattctacataaatacacatgtgcaaagaaatatatgtgcaaggatgtatactagaacattattgggattaacatgaaattggaaattacctaaatgttagaggaatggttatattaaggtatatctatactgtggaacacctgtgatattatgacttgtaagttcctctggcttcctggaacagctcctaaaatccttaaatctccaaagtggtaagtatcttttggatgctaatgatgactgatggctgggggatcctggatagcctcaacaggggagctggttgccaggggtatcaaccatgagatcagtcccatcccccaaccttggggaagggaacggggtactgaaggttgagttgatcaccagtgaccaatgatgtaatcaatcatgcctgtgtgatgaaacctgcaaaagaacccaaaaggactagctttggagagcttctggatagctgaacacacagaggtatgggacctggatagaggtgcacctagggagggcagggaagctctgaacccctctccccctccccatgtcttgccctatgcacttcttccatctgcctcttcatgtttcctttgtaataaaccagtaagtggaggtgtttccctgagatctgtgagccgccccaaagacgtcccaagcaaattaatcaaacccaaagaggaagtcatggcaacctctttatacccagctggtcagaatcacacatcacaacctggggcttacaactggcatctgaaggggggcagtcttgtggaactaagcccttagcctgtgggatctgacgctgtgtccaggtggaaagtgtcagaactgaactgaattagaggacacccagctggtgtccactggagaattagttattggtggtgaaaaatccccacacacgtattggtgcccaaacgtgaagtactccagagtgtcagagtaggaaaaaccaaagtatttttcctatgctttggtttttcctatctcctttagaactatgcagccataaaaagaataggtaagctatacataattatgacatgtcagttaaaaataatattaagggctgggcatggtggctgatgcctgtaatcccagaactttgggaagccaaggtggaaggactgcttgaccccaggagtttgagaccagcctgggccaacctggcctctacaaaaaataaattaaaaaaattagctgggcatggtgacacacaccttagtcctagctactcaggaggctgaggtgagaggatcacttgagtcttgggagattgaggtgagaggatcacttgagtcttgggagattgaggctgcagtgagccatgactgagccactgcattccagcctgggtgtcaaggtgagaccttgtctcaaaaataagtaataaaaaataaaatagaattaaaataactaaggggacaaaaaagaatatatgtagtgataagaaaagatcttaggtctatggttcccaaactgcactgaggtccctgggttggtgagcaaactcacagaggcaccacagaataatataaattttcaagagacttcatgtgtaatattaccttgaggttacttcatgcttttaacattagattgcaaaacattcaatgaagtcaatctttccaaagctgggttttggtggtgctagatttggaaagtttttcccctccaaacctcatgttaaaatttaatcccctatgttggaggtgtggcctaataggaagtgtttgggccatgaggacagatccttcatgaacagattaatgccctctctggaggggaagggaatgagttctcattattcattccctggagacctggttgttaaaaagagcctgacacccccctgctgttcctcttgcttcttttcttgatatgtgatctctgcacatgctttgccttgcgaagctgctgagtggaagcagcctgaggacctcaccagaagcccagctgatggcagcaccatgcttcttgtacagcctacacggttcttgcagaaccatgagctaaataaataacctcttttctttataaagtaaccagcccaggtattactttataagcaacacaaaatggcttaacacaggtggttactatgataaaaagcaaatactgtacaaaactaacactgaacaagaaatgaggatgccaatttccagtctgatgccaagatatgaggtattgtgtagtgctctataggcactcacatcccattagtatttcttaaattagtaatttaagaacaaaattgctgggcgcggtggctcacccctgtaatcccagcactttgggaggccaaggcagggggctcacgaggtcaggggatcaagaccatcctggctaacacagtgaaacctcgtctctactaaacatacaaaaaattagctgggcgtggtggtgggtgcctgtagtcccagctactcgggaggctgaggcaggagaatggcatgaacccgggaggtggagcttgcagcgagccgagattgtgccactgcacttcagcctgggcgacagagtgagactctgtctcaaaataaataaataaataaaaaataaaaataaaaatctttatatttgtcttttggcctaagtataggggcattaaaaaaatttactggcacactaaggatactgtaaaccaagaaagtttgggaaacctgtgtcttaagtgaaaaatgcaatgtagaacaattaacaatctgagttgataaacaattatgattatctagtgtacatttacattaatacatagaatttggattaaaaatgtcaactcagttgacaatgactacctctaggtagaataagaattgaagaacagagaagggatactttcagttcattgctctctatagttctgtattaaatccttttctaccaggaagtatctgcagtacaactgcaaatttggtttttaattttatattgcatctgttcctgcagagaaacccataacaaaacaatggcaaaagaaaaagaaaaacattacaacaccgttttctatgcaggtatacataataaagttcaaaaaagtttggaacttcctggcagccaaaggggaaagaaatctgttaaactacagaatttttattacaggtcaagcatccctaatccaaaatccaaaatgctccaaaatccaaaactttttgagtgccaacatgatacttaaagaaaatgcttggccaggcacagtggttcacacctgtaatcctagcactttgggaggccaaggcaggaggacaacttgaggccaagagttcaagaccaacctagccaacatagcaagatccccgtgtctctctctctctctctctatatatatatacatttataaatatttatataaaatatatacaagtattatatatatatttccatatatgcaaaggaaatgctcccaagagcattttggattttggattgaggatgctcaaccagtaagtataatgcaaatgttcaaaattccaaaaaaatctgaaatctgaaacacttttggttctaagcattttggataaggatatttctatatcagaaaggaatgggaatgccaattcagtggaaatgtaaactaagaggtgggaggggcaactaatatttctttactctgcaggtgctttgcttgcttcatgactttgactttcaacaatccttcaagggaggcattagttcatcattacacctgaagaagtcggaggttcaaagacctcacaacaagcaagtggaaaagtaaatgttcaaattaggtcttcttttccaaaaatcctgttacataacagtataatgcaatgtagctaagccaagaactgtggtcatctgcattgagatttgtttctgttaagataattaaaatgactaatgggccaggtgcagtggctcacgcctgtaatcccagcattttgggaggccgagacgtgatccacctgatccacctgaggtcaggagttcgagaccagctgggccaacgtggaaaaaccccatctctactaaaaatacaaaaattaaccaagcaaggtggcgcatgcctgtaatcccagctactcgggaggctgaggcaggagaatcgcttgaacccaggaggcggaggttgcagtgagccaagatcatgccactgcactccagcctgggtgatggagtgacattccatctcaataaataaataaaataaaataaaataaaacgactgatttaacttgaaaaaatactaacaataattcattttaaattttataatttttgactaaaaaatatacaaaaggaagtcaaagtcagtctctccacctctgctctcattcccactcattagagataacttgttttctcattccagaaattttctatgcatttatatacacataatacttttgttttacctaaatgtgatcatactgctttgccatatttccccccacataatagattttggacttattcagccagagaaaatctcattagacctcactgatatacagttaagagggcttttattttgcttttacttttttttttttttttcgagagggagttttgctcgtttcccaggctggagtgcaatggcgcgatctcggctcaccacaacctccgccttccgggttcaagcgattctcctgcctcagcctcccaagaagctgggactacagatgggtgccacacgcccagctagtttttatttttattttttgagatgaagtctcactctgtcgcccagactggagtgcagtggtgcaatctcggctcactgcaacctctgcctcccaggttcaagtgattctcctgcctcagcctcctgagtaactgggactacaggcgcctgccaccacggctggctaatttttgtatttttagtagagacagggtttcatcatattggccaggctggtctcaaattcctgaccttgtgatctgcccgcctcggcctcccaaagtgccaggattacaggcatgagccaccaggtccaggctaatttttttttatttttagtagagatggggttttaccatgttggccaggatggtctcgatctcttgacctcatgatccacctgccttggactcccaaagtgctgggattacagccatgagccaccgtgcccagcctattttgcttttattttctattacaaacaatgctgcaatgaatatcctgcttgtctactgaaattaacattttaaactgatactctggggttgaaaatacatcatgaagtcctcgggttttgttcacctctgatcatacagttgcattttccattacatgtatttgtttccttcctctgctactagattttaagttcttagcagagtttgtcttacttacatctgaatctctccaagaatgtcttgatcacaatagctattcaataaatgtgtttcaattttgctaacattggaagatgagctagaaaaacagtaggtgttattttccctcccatttgtcttaccctttctaatttttatattttctattctaaaacatagcaaatatgtctcactttttaatcattaaaaatactaacatttcaaaaataagaaatacttacttgtattcagaaactgggaaaaacacctttaagatggttattaccacagctgctcctgtaattccaaccaccatgatgktcaaaaactgaaagaatactgggaaaacgttgctccagaacctacacagatcttttctaaactyttccatccactgacacattacctgaaaaaggaatttcgattagatatgcaagttgcatcaatctctaagaataaactttaaattttttaatgttttagctttgggatgataaaaatattctatattttgattgtgctggtagttacatgggtgactacatttgtcaaaactaattgtatattttaaatggtgattttattttagaatgtacctcaatgaagttacttacaactttaaaaattatgttctaacaatacaagcacaaaaatgttaatagcctgtaaaattatttatattgttttctaactacaaatcaagtgaaaataattgctaattgacaagagattcgttaggctagtccattataaacgaaatggagcagagtcaactgtttccagtacctagagcacaagagaaggaagagaaagacaaacatattagaaaattttagaatacatgggaagttcactgtgtacaaaacatgtttctatactttaagagcgagagcagaacttaaggtcggcactgatggcacggactatgaagacagtctgctctggggctgagctgctaagggaggtgaggtagacagggtaaaggtgctacagtccagactgctgaagtgacctcaaatatgcaagcctgaccttcagtgagaactactactcctttaataccaaccatagaccctgctcatttaaaatgaattttgggtaggagtctacttaatatacagagagatatcgggatactctctgaacccatgaatatattcctggtaagcagtataaatgtcacaggtaacatctgagaaattagtaggtgccaatgcatatttatatgtagtacccaacttatttaatccttgtaacaacttcatgagatactactttacactgctattcagattaagtgggtgccccattgtacagataaagaaactgagggtagagagattaagtgccccaaagtgggagtacggggaaataaagagtaattatcggccggggatggtggctcatgcctataatcccaacactttgggaggccaagatgggcggatcacttgaagtcaggagtttgagaccagcctggccaacatggtgaaactccatctctactaaaaatacaaaaattagctgggcgtggtagcgtgtgcctgtaatcccagctactcaggaggctgaggtgggagaatcacttgaacccaggaggtggaggagtaagccgagatcacaccactgcactccagcctaagtgacagagtgagactccatctcaaagaaaaagaaaaaatttgttcaagatcacacaactagtcagcggcagaaccaggtttcaagcctgggcaggctgactctaggaagtatattctcaaccacctgagctgaatcactgggcaagatcctgggggcacaatgcatatgtgtgtatgcgaggtagcgggtacagaataaacacagaaatctggatatgagaaataactgtggaatttataattccaaccaaatgaaatccagcaccttgataatcatgatctgactacaatattattaaacaaagctcgaagaggaaaataggaatactaaaaatatcacattaagaccaagatgagtccattatcaccaatgctctacagttccattcttcaggatttccactccattttaaatgctagggtygattttcttcatcttaaccatgaatgcttatgataacaccaaatacttgatttaccttatatgaagatggcggctctgctctgagaggagtttcaggtaacttgccaggtaaaacatcttcatctacagtggtttccacattcctgataagatactggctagtggtttgcagtgaactaacactttctacccaggagaaagagcaacgttaccaaaatgctggtgtcttatcctactagtcctaagattacgataccaatagcatttaggatagtaagaacacatattttaccatgggagaaaaaattaacacatctgaatgttcactgatttaaatgtcagaagagaactataaactaagacacgtataaggagctaaagcagttatgattctgtcacatagaaagccaaaattttagaagttctatgtttctgtgaaaaaatgaatagttcttcctctgaatgaacctttacaatagtcttattacatattttgtgatcagtacccagagtaagagtaattactgaaaaatgtcactatgcaaccagcactgatcacattctactaatgctccaaatagagtcctaaagtccttaaatggacatatgaagcaatacatgttatgaagcatttttttaaacaagctcatttccaaacatattaactattaaagataaatagcaacttttgcaaatagtgtaaaaaataacaaagttcaagagtatataaagctaccaactaaataaataatctccttaatactttaaataatggtcttttaagttaccttttttggagaggttaggaagggtaaataaaatgtcactgtctcgagaaatagagtagagcatgctttcttccaaagggagggtatagtttgaatgtctgagtactccccggttcttaactaaaatatcaatttcagtgacatccttttgctgaacctgtgaaagaaaatataattattctttattttaaatagtagcacagccccataaaaatttaaaagcaaattttcctcccagatttatataactaaaacatgtgtcctattcagacaattactctttttttttttttttgagatggagtttcgctcttgttgttgcccaggctggagtgcaatggtgcgatctcagcttgccgcaacctccgccttctgggttcaagcrattctcctgcctcagcctcccgagtagctaggattacaggcatgcgccaccatgcccagctaactttgtatttttagtagagacaaggagtttctccatgttggtcaggctggtctagaactcctgacctcaggtgattcgtccaccttggcctcccaaagtgctgggattacaggtgtgagccaccatgcccagctaacaattactatttatttccccgtactcccactttggggcacttaacttgcaactttaataatattcctgtcctgctttaacacttactattataagcttaatctcgattctacttcatttacacacagagacttcatttaccatagaggaaatggtagcagaactatgagccaaattgaatctctttgcttactttctatttaataatgtctgtacattttaaagtgatacaaacatgtatgaatatgggaaattttaaaaatacatttcaaatgctaaaataaatatacaaaaattctaaataattggatataggcaacattaggcaccttccttatcaagtcggaaacaaataaaataactgaacacatgcataatatctagcacaaatctaaatatcatttaattcccaattaataaacatactatcttacttgttttccatcaatctctactacctcttcttgaatgacaattagttgcaaactggaaccagatgtcataggccactcatgaactaaaatccttacactgacaattccaaaatattctttttcctccaaattttcaagattttcattcttcactataaaaaaaaaagtagtgacacctttgaacaaagattaccaccaaatctgtgagtgagtgtgattattttgatgacatttacatggaacaagacagttgaaaacccatttctttggctttcttcatccctgacctcaatgctgtttcagatttattaaaaacaaagacaatctgacaaatctttatgactgcttacactcatttgaaagggtaaaatgtgttgatctttagactttgtatgaaataccacactagcaacatctttcctattcttttttttttttttttttttttgagatggagtcttgctctgtcgcccaggctggagtgcagtggtgccaccttggctcactgcaacctttgcctcctgggttcaagggattctcctgcctcagcctcccaagtagctgggtttacaggcttgcaccaccatgctcagctgtttttttgtatttttagcagagatagggtttcaccatattggccgggctggtcttgctaactcctgacctcaagtgattcacccaccttggctgcccaaagtgctgggattacaggcgtgaacgaccacgcctggcccatctttcctattcttttatacaggttggccatgaggaaccaacatggcacaactataaagccagccagaagatacagccaatcccacgttttaacataataagcacatacattcatccatccacaaaatcctgtgagagaagatgcccaagcagtaagaacattgagttttttaatcaatcctttccccgattagtgactcattactattagagagagcaggaatggggaaagagggtgggggaggcctgtcatttctctctggtaatcgataatggggtaggactagctattgtccacgttcttctctagctaggaaacctctactcctgctccagtagaaacggggtgtagtagctgcagctggtttacagagccaacggctactctattaaggtagaagtgctatcgaaaaagataaaacaacatacaccaatgcacctgtcacagatggagcattttatttctatccctcaaataatctgaagatttttgccaaacaggaatccagatatacaatctgaatgcacacccagctgtttagtctgattctgtgcatctatagggctacttcctttgtctggaatatctcaatatctagttcattaactacttactattacaagatatacctacctattctcccctgctttagtccccgccgccaaaccattcagacaacatgccaagctcgtctcactgtgacgtggttttcagtccacagcctcctgctcacacacctttagtggcacttctgtgaagttcccggtcctctcactggtcctcctcaggctcctcatctggcccctcgctgctcctctctctagtgtgcctaatccttcatgccctttgaaaagcaccactgtcaaaggtaccccctctctcatggtccatccccgtgttttaactgaccattaccacccgtgggtctccttcgtggaacagcaggcgctgtgtcagcatgtccgtaagcccaaagactaaggtacaggagactcaatgggtgagaaaatgcagtcataaaaatacacccaagtggcaattcttcagcctgcaaatttggtacctgatatagtttggatgttccccgcaaatctcatgttgagatgtaattcccaatgttggaggcrgggcctggtgggagatgtttgggccatgggggcagatccctcatggcttggggttacggcaccccactgccactcttgctctctcttgctcctgctctgccatgtgagatactggctccccctttgccttccaccatgagtaaaagcttcctgacgcctccttagaagctgagcagatgctggtgccatgcttcctgtacagcctgcagaaccatgagccaattaaacctcttttctttataaattacccagtctcaggtatttctttatagcaatgtgagaagagcctcatacagtacctctaatacagcataaaattaaataaaaaacaacaaagcccttcatattgacttccttactgtggtaggcggctttcaaaaatgcccctcaatgacccttgcctctaaggagtcagacatttctgcaattcctccctcaagtgggctggacctagtgactagtcagttagttacctatctatctatcgatctatgaatgatttttttttctttttttgttcttttgaaagagacagccttgctatcttgcctaggctggtcttgaactcctggcctcaagtgatcctccagccttagcctcccaaatagctgggattacaggcatgagccaatgcacacagcctagtgactcgtttctaacaaacagagcatagcccaagtgatggaatgttactgccacaattagattattaatggctatgacttctgtcttgctagtactctttttcttactggcagtctctcttgtcctctcgatgaagctagttgccaygttgtgagatgctctatggggagcttcgtgtgacaaggaactgaggaagaccttcaaccaacatctggtgaggaactgaggcctcagttcaagagctcagaaggaactgactcctgccaacaaccacatgagtgagctgggaagcagatttttcccagctgagccctgacgtgatggcagccttttgagaaccacaggaccctgctaagccaagctcagattctcgacctacagaaactatgaaataataaatattgtcttaggccactgatttctgggttaaactgttatgcagcaataaacaaatacaccaactaaagaaaaagtttctttaaagaattaaagaagatttgttgttgttgctgcatttaatgttttgaagattcttgctgtaactggataagatgagcatttatttcagttatcatagaaacaaactcagtgcaatgactgggatgactaaaagayggccataagagaggagacaggctgtattccacgtccaattcccagtgaatacaacaacaaaagaattattatttcagtagtactagcacttcctttcttagctaccatggatcagcttgcagcacaccaaccctcttgcaatgaaccacttgcaaagaactgctagaaaagatgtaaaaaatacacacccacacatacacacaaaacctacatctgtgtagaggcatcagaagctaaagacagccagcacttgaagggccaagaaaagagctccctgaggtgagtacaatatcctatgtgatttcttcccscaaaggcatttgccaactcccagacagaacaggtggagaggttgaaaagctgagtagaaagcaacgactaggaggcaaaaaagctcgacaaagtgtctggcagtctcacccagcaggggagaaaatgaagtgtttaaatgttaaaacaaaaatgctaagctatgcttccacagccagcaaaaatagccttctaaaatgaaggcaaagagatgttttcagacaaataaaacctcagaccattcactgctaacaaacctgtactgaaagaaataccaaagggaattctttaggccgaaggaaaatgacaaccagggcacaatgcatgtgtgtgagggcaaggcaggagttgcagaatgtrcagagaaatagggatagaagaaagaattttggaacttgaaattccaaccaaatgatatagagtggagcacagataggaaggaataaagagcaatgaaaaaggtaactatgatggtaaacacacatgaatattggactacataaaacaataattatgtcacatggggtttaagaacacaaagagttaaaatatataataataacccaaaggcaaaaagggaataaatggaatttaagtgttctaaggttcttgcattgtttgggaagtgataaaagtacaaatttatttatttttattttttaaattcattttttgagacagggtctcactctgtcacccaggatggactacagtggtacaatcacagcttactgcagcctctatctcctgagctcaagggatcctttcacctcagcctcctaagtagctgggaaaacaagcctgcaccaccacactgggctcataggtttccctatgttgcccaggctggtctcgaactcccagactgaagtgatcctccagctttggcctcccaaagggctgggaatacaggcatgagcaaccatgcccagccaaaagtactaatctattgatagcaagggtaaccactaaaagaatagtaaaattacgtaaaaccaagacagaagggaactatgataccaaaaataactaacctagaagaaggcaaagggggaagaaaaagaaacacagaacagttgggacaaagaggaaacaagaaggaggatttaaatccaaatgtatcagtaattttattaatgtaaataagttaaaatcccaactaaaagacagactgacagaaacaacaagtgggccgggcacggtggctcacgcctgtaatcccagcactttgggaggccgaggcaggcggatcacctgaggtcaggagttcgagaccggccttgaccaatatggtgaaaccccatctctactaaaaatacaaaaattagccgggcatggtggcgggcacctgtaatmcaagctactcgggaggctgaggcaggagaatcacttgaacccaggaggaggaggttgcagggagccgagatcgcgccactgcattccagcctggacaacaagagcaaaaactccatctcaaaaaaaaaaaaaaaaaaatcctatgtatattctttgtatttgctatttcatccaaataatatggcatattccaatgcaacatacctgcttacctttaaacaactcaaaatttttaaaggttaaaaagaaaatgttctactgacataagggtagaagaaactgaatactagataatcagacaattcattttcttggctcttgctatcccatttactacctttatgcacatttttttttttttgagccagggtcttactctgttgcccaggctggagtacagtggcgatcctcccacctctcaggagtagctgggactacaggcacacatcaccacacccagctaatttatttttgtattttttgcagagacaaggttttaccatgttgcccgggctggtctcgaactcagggctcaggcagttcacccgcctcagcctcccaaagtgctagagccgccatgccccgcctctatgcacattcttacatcgttatctacttaccagaaatacagtttcatcaatactgatcttatggaaaatagtgaatatgcgagaagcagccaatataaaacaagaacagagttttaaacacattagtgttattgtacattctgataatgatctgtgtgtgtgttttagagatggggtcttgttctgtcacccatgctggagtgcagtggcatgattatagctcactgcagcctcaaactcctgggatcttgcttcagtgatgtatatttttactttatttttattttttttgtgacggagccttgctctgttgctcaggctagagtgcagtggcgtgatctcagctcacagcagcctccgcctcctgggttcaaacgattctcctgcctcagcctcctgagtagctgggattacaggcgcacacaccacattttcagtagagatggggtttcaccgtgttggccagtttggtctcaaactcctgacctctcgtgatctgcccacctcggcctcccaaagtgttgggattacaggcgtgagccactgcacccagcctatttttactttaaaatggaaatatataacatccaaaaattgttttgctaatttagtattattaaaaacagaacaggccaggcacaggggctcacatctgtaatcccagcactttgagaggcagaggagggtagatggtttgaggctaggagttcaatcaagaccagcctggccaacatggcgaaaccctgtctctactaaaattacaaaagttagccgggtatggtggcacatgcctgcagtcccagctactttggaggctgaggaatgagaatcatttgaacctaggaggtagaggttgcagtgagctgagatcgcaccattgcactccagcctgggtgacagagcaagactgtctcaaaaaacaaacaacaacaacaacaacaacaaacacacaaaaaacagagcaattatggaaataatttagtaatactcacctatcaaagtctgacagcttattcgggttacaccactatttacaggtaagtcatttacatacacctgtccactctcataggttatgttaagaacaaccttaaaataaagcagcatatacattaattccaatatttataaacaatagcaaactcttcaagtcaaaaaagattaactaaatgagacgtgcaagttaaaaaatcaaataagctgcatagcacttagctaaattatatattaaaaccagaaaaggagacaaacctgctgtttagatatgtccccatcatctttcagtgtagttacattaattctgatgccgtcctgtaaaacaagtattgtgtaaattggaaggtgtgcatctcacagattgagaacaacgtggctttctcttttccctccaattgtatctattgtacaatcacttataacagcattaagagagtttaaaagatcatcttttccattttatagccatttttccacccttatttacaattccaattatttatttatttatttatttattttttgagagtctcactttgtcgccaggctggagtgcagtaccgcaatctgggctcactgcaatctccatctcctgggttcaagcaattctcctgcctcagcctcccgagtagctgggattacaggcatgcaccaccacacccagctaatgtttgtatttttagtagagatggggtttcaccatgttggccaggatggtcttgaactcctgatctcgtgatccgccctcctcggcctcccaaagtgctggaattacaggcgtgagtcaccgcgcccggtctaattttttataatatatactttttctatttacttgtgaaaagtatcacatgagtatataatatgcaaatatagagtttaaaagatgagcactcctgtaagtaccaccgaggataaaatataaaatattacccctaccttggcaggctctgcatgattgccctctatccccccagaaggaatcctatacccaattccatttgaatcatttcttgcttttctttatagttttactacctgtgtctctctctctaaacaatatgttgcttagttttatctgtttctgagctttatgtaagtgggataacagtacacatgtattcttccgtaactgtagttgatactgttgatgcacatagctgtaatcacagtagtccatctctgactaccaatttacttatttattctattacccacggacatctgagttgtttccaacttttttccttttataaataaagttgcaatgacttttttttttttttttttgagagggagtctcgctctgttgcccaggctagagtgcagtggcgatcttggctcactgcaatctccgcctcccgggttcaagtgattctcctgcctcagccttctgagtagctgggattacaggcatgcatcaccacacctggctaatttttgtatttttagtagagacgggggtttcaccacgttggtcaggctggttgcgaactcccgacctcgtgatccacccacctcggcctcccaaagtgctgggattacaggcgtgagccaccgcacctgaccaaagttgcactgaccctttcttgagtgtgtttcttatacaagcatctgtaatgctccaattttattgcctctcaaggtattatcaaaagcaggatacccaaatattgaagatgacatgctttatatacagaagcaagcactattttaagaagtatttaccactgaccacaggaactacaatctatcatttctaaatcaaattctttcctaagtttattcacaaatagacattgttattctggaataaaaacaatactctcaaatactttttctttgaggttgtattaacttagaaaataggaaaactgttcataaacatcaaaaagaatatacaagtatatctgctggccctgagtatcctaaatactttatatataatttcccacaaatgagagaataagactgatgaaatttcatgaggtcgagctgattccaggaataatttgtgaaagaggattcataccacacaagaccaacatcatacatttagggtgactttggttcacttcccaactaggagcctaggaagctttctaactagaaattcctcagaactagccagctttttcctggcycaccttgatctagacggttagaaccaatagtgcatctaaaacaaatccacattcaatgagctatgagattgatagctacattgttttgtgtccaaattcaagtcatatggatctcctttgcaaactagagaatgtattaattataaactattattcttctaacagcccagaagtaagcctccaatgttgttctaggaaaccattttatagcttctgccttttagcagtgaacactatattgttagcaagttactgaactttatatatatatatatatatatatatatatatatatatatatatatatatatatatataaaacctacctagtaaaattacagagtttgaaaaagacaattaacagacacamgcacactatattttccagagaaccaagtacaacaaaattattttctggtctttctgaatgatttcactgcaaaagggaatcacactccttactgccccctggccaggagttcagagccaggtcatatttattgttcttgagaacttctgattgaactggaagttcaggctcgtaagccagggttgcatatacttaaaaagtgcttggggacactgaaaagtttctccctaaaaatcttcaattcttctaattcctttactcataggatgcccactggggacataagtgtcttcctaagaataaaggtaatagacagctggtttaaaatacgtctgagcgaaatatacagttatgcatacaagaaagtaagtgtcctccgaatgcctctctttggtgaccaagttattttagtattagaagaatttactataaagacttttatttttcggtcgggcatggtggctcatgcctgtaatcctagcactttgggaggctgaggcgggtggatcacctgaggtcaggagtttgagaccagctagccaacatggtgaaaccccgtctctactaaaaatacaaaaattagccaggcatggtggcacgtgcctgtaatcccagctatctgggaggctgaggcaggagaatcgctggaacccgggaggcagaggctgcagtgagccgagattgcaccactgcactgtgcaggatgggggacagagcgagacttcacgtcaaaaaaaaaaaaaaaaagtgaccgggcgcagtggctcacacctgtaatcccagcactttggaaggctgaggcgggtggatcacttgaggtcaggagttcgagaccaacctagccaacatggtgaaaccccatctctactaaaaatataaaaaaattagctgggcgcagtggcgggagcctgtaatcccagctacttgggaagctgaggcaggagaatcacttgaacctgaacccaggaggcagaagttgcagtgagccgagatcatgccagtgcactccagcctgggagacagagtgagactctctctcaaaaataaaaaacaaaaaataaaaaaataaaaataaaaatacaaaaactagccaggtgtggtggcacgcgccagtagtaccagctactcaggaggctgagataggagaatcacttgaacctgggaggcrgaggctgcagtgagccgagatcatgccactgcactccagcctgtgtgagacagagcgagatattccgtctcaaaaaaaaaaagacttttatttttcaatcttatgtgcaatcttgtattacctcaacttctgacaactgcatacataaaaacagaaaaatgcttatagtccaataaatctgagtcatcggaagaaggcagaattttcctgacttcaaccagtttaatttatatcagactggaaacgaggatggacagatgtgataaagctagtaatgttaagggtagtctggttctgcactgttcaatatggtacacactaatcacttgtgactatttacatttacattgattaaaattaaataaaaatttaaaaacagttcctcactggcactggccacatttcaagtgctcagtggccacagcagtctagtggctacccacaaggtgagaaaagacataaccatcaaggcagaaagttctactggacagcacttacacaatatgtgggaccactgtgaaattctttcctattggaaatgtttcacaataagacgttgagaagacttagatcaagggacttcagtttcccacagacacagtccaggtaatgagattctctttctagttgttcagcactcatttaatctgtgaaactttttgttgttgagacaggctcttgctatgttaaccaggcttatcatccaacacccaactcttggtctcaggcaatcctctggctttggattcccagtagctgggattacaggcgtgagccactgcacccagcgtaatatgtgaatttccgagtttagatctggactttctgaaagtgaaatgaaggcccaagaagggagaactgaaatagtaaaatcatcactaagagccagccgacaatgcagtgtattttaagcctgcagtcaaaatgtatttttcgcagattatatagacgtaaacatctcattgacacataggtgtcaattatgaatctttaaaacttgaaaaataggaaaataatgtccgtatttccagaactttttagaactatttcacttttatttggtcccttggtgcctgtccatcacattcctattgtttaaccagatgcaactgtggtccacatataatttcagatataggtggttcttatggcaggcaatgtcgtggcttcttggaatgccctgcagaactgagacatgctcatcatttttgtacccacgtggggtaatgtcattatcctaaaacgttaacacttggtttttttgtttttgtttgtttgttttgttttgagctccctcacccaggctggaatgcagtggcacgatctcggctcactgcaacctctgcctcccgggttcaagcaattctcctgtctccgcctcccgagtagctgggactacaggcacctgcaaccacgcccagctaatttttctatttttagtagagacggggtttcaccttgttggtcaaagtgacacttaccgtgcccttcgcctttgtatttagagtgttcatattcaagtcttgactaggaagaggtgtaccgacatagtttcttgtcattctcagaacacttgctctttaaaatattcaaacttttccctaccattctactgaaaaaaggctgatactggcctaggtaggcacgactctacggcaggaatggtgagcatcagccacgttttaatgttaggatgcctcgattctcccacctcagctggcatcagaagcacctgcaggactctccaacccggactgctgggccccgcccccagaggccgggctgagtccccaggggatgcggacaccgccgatcgcgccccgccgtgagaacttctcctccaacatccgacaaaaacattacgtcgcgcgagggccaggtctctccctctgcccacctgagcccggcggagccccgcagcctcggaacggcggaccctcgcgatcgcaggccgagcaggcacaagtggcctggaaatgcgcgaagtgggcaacttccacacttcccgagcacacaaacattccttgcccaagcgctggctctaccccgggaaggcgccattacgaaggcctgatcaccggcaaccgcgcgcttcgacggcaaagccccgtcaggtcgcgcgccggcttgggccgccggagagtcggtgtggagtggctcgaggctcactcacagcgacgcagccccagtgggtccctttcctcttacctcggcctcccacgccgcccccatttcctggggtgcttctccccacacctccttcgggggcccggacccccgcccctgcccgccggtgggatgtgggaagcgtcactgtggacagcccgggcctcccggagagtcggagtcgtaaagcggccagccaggcccgccctgccctacctgtggggctccggacagcggcggcggctcgggggcgcccgtcgtcagccagccggaggcgggtagcgccacgaacagcaggagccggagggcgagcgaccccggtggagcgccctccatcttggacaacccgggcagagggcagccgcggccgggaggtgagggcggagccggcccgcgggcgggacggagcttcggcgggagggacggggaggggcggggagagacggggaggggcgggacgggccctcccctccccgggcggccgcggagaggcgcggggacgctccgagatccggctcgccagggaaaggcgtttgcgcacgcgcagcgccgcgcggcgtcgaggggcggagtgaaatcttggaaggtacggcccctcattagacccgccctcaggattggacaggactccaactggagcgatgtaaatgtcctcgtaaccattatttttaaaattagtatttacacacatgcatgtgtctgtgtgtgcacatgtacatgtacctatacgatgaaaacaacggtaatatttcagaaaactgttatacattaaaaatgaaacatcgcatttacaggggaagtttttattaagtgggtaattccccacccttggctgcacgtgggactctcccgggcagctttaaaaagtactggggtcttcctgaacaccccactttccagcctgggctgcggctcgggccctggtggttttttaattttctcgggtgattcattgtggggccaaggttgaggatgcgccatgcttactgttcagcattctgccgacccctggaggcggcgcggggacagcgctcagctggaaggaagccagcgcacctgggctgtcagtgcctttttggtcagtatcgtaactctaaagtgaaagtgttagacttttcttccaccttgcagatttaaaaaaaaaaaaaagttacggaaccctgtaaagcagagtagcaagaaattcaagcattttagattaacaggattgcatgttgattgagaaaaacttggaaacttggccattcaggcagaataagagtaatatttagtcttcctttgaaataaaacttttgacatgaaataaaacttttgacatgaaaaaggaaacaagaatctatttctctctttgagccccctttactcctttgaacaccctcctcccacaggcctgctgaccgccaccgccccctcccccggccccgccccagaataaattataaacgttttggctaaagactcctttcaactaactccgggcttactctgagattccccacgccattgttaagctacaagtgatttcacagcgaagccccacacacttctgggttccatctgcaaacttggccttttcctttttttcctactgctggaattaaaaatgaatttggagatgggcgtggtcatttgtgcctgtactcccagctatgcagcaaacgcaggcaggaggatcgcctgagtctattaaaaaaaaaaaaaaaaaaaggaatctagaagccgggtgcagtggctcacgcctgtaatcccaacactttaggaggccgaggcgggtggatcacttgaggtcaggagttcgagaatagcctggccaacatggtgaaaccccatctctactaaaaatacaaaaattatccaggcatactggcacgcacctgtaattccagctactagggaggctgaggcaggagaatcgcttgaacccaggaggcgaaggttgcagtgagccaagatcgcgccattgcactccagcctgcgcggtggagcgagactccgtctccaaaaaaaaaaaaaagaatctggaagtcagaaaacatgacatgtggatctgtataatttgaattagtaatataaggttacaaagtacgtctatatgaaaagataataggtaaagttgaggctctctgttttcttacaaagcctttcccatggtctaactgtccattattctttattgtttatctgtctcgtcagatagatgtgagctccaggaagagggtggccaaaccttaaagcaaacagcttgctagagtaagccctcagtgggggtttgttggacaaataatgtctaagtggttgacagtattatttaataatcaaaaattttactgttttgtatgaaatggttctctttaggccattgttttgctacatgcacccatgagcgctacggaatttcatttaaaaaaccccatcatttggggaaaaagcaccataccacaactctaatgagttacaacaaaactttaaacaagctttgtggctgagttccacttgtccattggaaaactcagcttggtttactgagccttcacattaatctgagaaacaaaagacagaattaacttggcagttgcttacacgacaaataaatctgtcaatgttaatacggtgagtactttgatgttcctttgagtcagctcatgtcaacttgatatcctctatcataaaaagagttcaagttgcctgacagcaacccactgcggttctgtgcacattagatgctttctcttctttgaaggtaatctttcatataggagaagatattctaaaatatttctaatactacagaaaacaaagtatatattaaaatgtctttattctttcaccagataataccttttgattccaaaccttgatatatttcctttttcagtagccgatttcattgtcattttcatcattcccacaatcaaaatttgagtccatctttttctgcaatttaaagcaggcttgatgccaaaaggaaatctgggacctgatttgtatctgtttccagtttctgggagtgagtgagtcactgcacttctattacaacacagtctactccagtattttccagagttagtcatctacatatttttgaactttttgaaagacccctagaagatgacaagagggagagcaagaaacaaagatattatattttatttttttgagacagggtcttgctttgacacccaggctggagtgccatggcaagatagatcatggctcactgcagccttgacctcctgagctgaagccatcttcctacctcagactcctgagtagctgggactgtaggcacatgcccccatgccctgctaatttttttttttaagtgaagacgagggcttgctagcttgcccaggttggtcttgaattcctgagctgaagcaatcctcctgcctcggccttccaaaatgttgggattacaggcatgagccactttttttttttttttttttttttgagacaagagtttcattcttgtcaccaaggctagggtgcaatggcacaatctcagctcacgcaacctcctcctcccaggttcaagcgattctcctgcctcaacctcccaagtagctgggataacaggtgcccaccaccacgcccagctaatttttgtatttttaatagagacggagtttcaccacgttggccaggctggtctcaaactcctgaactcaggtgatccacctgcctcggcctcccaaagtgctgggattacagtcatgagccactgtgcctggcctaaaatattttaaaactgcttttgctgtaactttcttgtccatatatttatgaatgaatttaattagctcataatgatgggtgatgcctctcatatgaagaacaactcatagaaatattatcattgtagtagccagcatttattatgctaattgtgttaagtgctttatgtatattatttaaaccttataacagcctaatgacatgattacaatttattatcccatttttatatacaaaacagaaatttatagaaattaagtgtttttctctgagttacagaacagtaaatgatgaagctgtggttttaaactctggcattctaagccaacacagtataatgaaacaaaaggcatttagttaatttatatacatttatagagatgattataaattattctactcattagctttctaaaaatatgagctgggttgcactttgggaggtggaggcaggcggatcacctgaggtcgggagttcgaggccagccgggagttcaagaaaccccgtctctattaacaacacaaaaattagctgggcgtggtggcgcatgcctgtaatcccaggtactcaggaggctggggcgggagaattgcttgaacccgggaggcagaggttgcggtgagccgagatcgcgccattgcactccagcctgggcaacaagagtgaaacttcgtcttaaaaaaaaaaaaaaaaaatatatatatatatataagctgtgttgggagaaatggagaaacagtaaagtgtaagagagctatgccttctccaccatcacaggagctagaggggctccagggccaagatgcagaccctgctctctgctccctcagctaactagtttcaacaacctgaaaatctgcagagacgtttgtactcaaggatgctaaaaatcatactataatttaatatttggtaccctaataaaaatcctgaagataaaagattaaagggccgggcgcggtggctcacccctgtaatcccagaactttgggaggctgaggcaggcggatcacgaggtcaggaggtcgagaccatgctggctaacacggtgaaaccctgtctttactaaaaatacaaaaaattagccgggcgtggtggcaggcgcctgtagtcccagctactcgggaggctgaggcaggagaatggcatgaactcgggaggcagagcttgcagtgagccgagatctagccactgtactccagcctgggcgacacagcgagactccgccttgaaaaaaaaaaaaaaaagattaaaataagtatcctaaggaataagaaatcttatcaggtttcaggttttaaaaaatagaacatctgtaacagatactgcaagaagagtttgtttagagatcatttcatattcagtaacccagataagtaggttatatttgtggtaagatgccattttcatttgtcttatttgacttttttttttttttctgagatggagtcttgctctgtcacccaggctggagtgcagtggcacgatctcagcgcactgcaacctccaactcccgggttcaagcaattctcctgcctcagcctcccgactagctgggattacaggtgcctgccaccacacctggctaatttttgtatttttagtagagacggggtttcaccatgttggccaggctggtcttgaactcctgaccatgtcatgatccacctgcctcagcctcccaaagtgctgggattacaggtgtgagccaccgtgcccagccttatttgactttttaaatcacctttagaaatgaaagaagcctccacttggaagcagaagcagagtgtagggtgtctttcctctgccttcagtggatttccctcttgggagtggattttcttcttttaagtcaggattcactttatttaattcactagaatataaaagcctcactttatcattgtttacctcagttggtgctaaaatgacaggcaacttcatagccatatgtattaactgtatttgcctattttctgtattcttgatgttacggcacctggggccttgctggccctggagacactgctgctccgagggttagctaattcctagaaatcgcaaactacttccctgggcacctctgggagtttacatctcatatacaacacagccaatccagagctcatgccctggtgggcacctctgggagtgcacctctcatatacaacccaaccaatctatttgtgtttttatttatttatgtttgtacagatttatggggtatatgtgaaactttgttatatgtatgtagtgtatagtgatcaattcagggtatgtagggtacgtatcacctgagtatagtacatttttgtttgactaacatcacccaactcttctatcaaacattgaatttatttcttctatctaactgtatgtttataccctttaacccacttgacttcatccttccctttccccctcactcaccttacccagtttttgtcatctacctttccattgtctacctccatgtggtccaattgtttagctcccacatgtaaatgagaacatgcaatattttttctttctgtgcctggcatattttacttaagataatgacctccagttccatccatgttgctataaatgacattatttcattctttttaataaccaaatagtattcaattgtgtatatatatcttttttttatctgttcatctgttgatggacactgaggttgatcctctatatttctattgtgaatagtggtgaaa

SEQ ID NO: 97720 - DNA, 17650 bp, Homo sapiens
taatatattatatatatataaatatatttatatatattttatatttatagataatatatttatatatattttatatttatagataatatatttatatatattatatttatagataatatatttatatgtatattttatatttatatataatatatttatatatttttttatatttatatatataatatatttatatatacatatatatatatggagtgggggtggccgagggggaagagtgtgtgtctgcgggagaaagaggagaatcgcccaagcggcctcggaagccccagggagtggaggctcccgccgtggagccatgtggtgtatgtgtggtaacaccacgtctacgcccctctcactgatgctgccgcggtgtctggagctgagcgggaaacagccgcggttagttttttatatggacttggagacacagggcacagctgggctgacgccctctccaccgtccggctccctcacgtcaagtccatctgtccccatgtgcctaggatccctgtgactctcaacatgaagatggtgacaccttcctgatttgacctgatggggctgagtccagatgccccagaggacgaggctggcatcaagaaggcagcagagaacatcaaggccttgattgagcatgaaatgaagaacgggatccctgccaatcgaatcgtcctgggaggcttttcacagggcggggccctgtccctctacacggccctcacctgcccccacccgctggctggtatcgtagcatcgagctgctggctgcctctgcaccgggccttcccccaggcagctaaaggcagtggcaagggcctgaccatcctccagtgccatggggagctggaccccatggtgcccgtacggtttgggaccctgacggctgttgtcacacctgccagggtccagttcaagacatactcgggtgtcatgcacagctgctgtcctcaggagatggcagctgtgaaggaatttcttgagaagttgctgccttctgtctaactagtcgctggccccagtgcggtgccccagctcatgggggactcagcaagcaagcgtggcaccatcttggatctgagccagtcgagcccctgtccccacccttcctggcctgtccttttcccacaggcctctggggcaggtggcaaggcctggccgggctttccttcctggcctcagccacctggctctgtctgcagcaggggcaggctgctttcttatcccatttccctggaggcaggcctccctggcagcagtattggaggggctacaggaagctagagaaaggggcccagctgctgacccactcactcaggacctcactcactagccccgctttggggcccctcctgtgacctcagggtttggcccatggggcccttccaggcccctgctctaactgattctgcccagataatcgtgtgtctcctgcctccactcagctacttctcagtcatgaaggtggccatggccctgaggtccccttgctgctgtgggctccctgtccctgggcaggagtgctggtgaggaggtggagccttttgaggggggccttccctcagctgtttccccaaactggggggctgggccctgcctccccattaccctccttccctgcaggcctggagcctgtagggctggactgaggttcaggtctcccccaagctgtctcactctgactttgtccccactctagagcagggaaggggtgggggaggagttgtgtctcatcttctgtctccatgtggtttttgggtgcttttcttgttgtgtcctggattctgataaaattaaagaaattgcttcctcaaaaaaaaaaaaaaaaaaaaatatatatatatatatatatatatatgtccaggtgcagtggctcacgcctgtaatcccagcactttgggaggccgaggtgggtggatcacctgaagtcaggagttcgagaccatcctgaacaacatggagaaaccccatccctactaaaactacaaaattagccgggcatggtggcgcatgcctgtaatcccagctactcaggaggctgaggcaggagaatcgcttgaacctgggaggcagaggttgcggtgagctgatatcgcaccattgcactccagcctgggcaacaagagtgaaactccgcctcaaaaataaattaattaattaaaaattagggccaagatcacgccattgcactccagcctgggtgacagagtgagactctgtctcaaaaaaaaaaaatatatatatatgtatatatgtatatatatgtatatatgcgtatacacgtatatatgtatatatgtatatatgcgtatacacgtatatatgtatatatgtatatatgcgtatacacgtatatatgtatatatgtatatatgcgtatatacgtatatatgtatatatgtatatatgcgtatatacgtatatatgtatatatgtatatatgcgtatatacgtatatatgtatatatgtatatatatgtatatatgtatatatatacacacacacatatacatatatatttgtgatttatttatttttcttttagagacggggtctccttatatttccctagctggcctcaaactcccggcctcaaggggatcctcctgtcttagcctccccagtagctgggactacagtcgcctggccctcacctgagagtcacatgcctaagagtggctacgctgggcagttcattcaatgtccctcccccacctgttccaagcaaccactgatgtgctgtctgtaactacagattagtcgcattttctggaatgttctataaatggaatcatacagtgcgtgttttttgtagcttcttttgttcggtgtgcttttgagattagtccctgttttgagagtagcatagtctgttcctttctgttgccaagtttcattccattgtaggggacactttgattcatgttactcatccctcttgttgatggaggttttgggagtgtttttataagagggcagagtccagatcccaattaattacagggtgggttttgtgtaccctggaggaacccttgcatcatagtcagaaggcaggtgaagctgagtgaggtggctcctgcctgtaatcccagcagttttggaggctgaggtgggagaatcacttgagcccaggagttcaagaccagcctgggtaacagcgagactctgtttctacaaaaaatttaaaaattagcctgatatggtggggtaggctttagtcccagctacttgtttttttgttgttgtttttgtttttgtttgtttttttgagatggagtcttgctctgtcgcccaggctggaatgcaatggcgtgatctcggctcactgcaccctctgcctcccaggttcaagcgattctcctacctcagcctcccgagtagttgggattacaggtgcatggccaccatgcccggctaatttgtgtatttttagtagagatgaggtttcaccatgttggccaggctggtctcgaactcctgacctcaagtgatctgggttttgttttttatttttattttttattttttattattttgagatggagtctctctgtcacccaggctggagtgcagtggcatgatctcggctcactgcaacttccgcctcctgggttcaagcgattctcgcgcctcagccttccaagtagctgggactataggcaccacacccagctaatttttttgtatttttagtagagacagagtttcaccctgttgactaggctggtcttgaactcttgtcttcaaattatccacccgcctcggctgatagtcccagctacttgggaggctgaggtgggaggatcactggagcctgggaggtcgaggctgcagtgagctgtgaagctgtgatgatcgtgccactgcacttcagcctgggtgacagagtgagatcctgtctcaaaaataaataaataggagggcagggatctgtgttggtggatgtgatttggaaggaggcactgggtgtgggtgggtagacagggaaccaggctggtgtcatgccacaaggggttcacacgggtgatcattgctagactgagggagaagataaggcctaggatgatccaatctggaggtcaaagcatggcattcagctctgtcatttttctctgccttccatttctgcaacctcaaatgggcgcaacgtccctaccccccaaccccagttcacccgatgccaagttgcattatctgtttcctgtgcatggaggccccctgatttccaggagggagtgaactgtgcatatgagcttgcgatggggttagcagtggggcacagggcgctggtttcctggaatggggtaaaaagtggctgtaagtctggagggatgcgacatccaggcggaaagctcatggaggccatatgaggaggggacttggccgacagaggtgacaaggccagactctttttttgtgcatgtgtgacagagtcttgcactgtcgcccaggctggaatacagtggcacgatttcggctcactgcaagctctgcctcctgggttcacgccattctcagccatactcaggccatactcagcctcccgagtagctgggactacaggcgcccaccaccacgcccgtttaattttttgtatttttagtagagacaaggtttcaccgtgttagccaggatggtctcgatctcctgactttgtgatccgcccacctcggcctcccaaagtactgggattacaggcctgagccaccatgcccggcccagactcttcttataaggagagggagctgaggaatggccatttccaccctcaggctcccaccctcttcatgccacagtcctggagcaccgctctccaccgaggcccctgccctggctgaagtcagcaacaggacacctcccactcgctccggctgggctgggacccttgtaaaggatcttctgcgtccttcatgaacttgtgtttttgtttttttgtttgtttttgtttttgagacagagtctcactctgtcgcccaggctgaagtgcagtggcgcaatctcggctcactgtaacctccgcctcccgggttcaagcgattctcctgcctcagcctctcgagtagctgggattacaggtgctcgccagcatgcccggctaatttttgtattttttggtagagacagggtttcgccatgttggccagactggtctcgaactcctgagctcaagtgatccgcccgcctcagcctcccaaagcagtgggattacaggtgtgagccaccgcgcccggccttatgcacttgttttgacacctgctaggtcgacagaaccttgtcccccggaagcccagctctgccaggaagtctgggctgacttgacatcccgttagctgggagggtgtggagggtgggcgtgctctaccctgcagacggctgggtcacctctcacagaatatactgtgtctcctgtcgctctccctcctattcctttctttatcttccccaaaatctggggtctaccttgcatcctgaaattcccagggcagcattctcttagcagtccctcgaccccccaaccagataaggggtttcctggcgtctggggaacaccttcgggtgtggggcggagggcggctgccccccagagaccctgggcggcctagctttcgcagacgcgaaggactggatagtgccagggccaccgagcggccggattggtgtgtgggccagaggcgcggtggtcccgcctcctggttgccagggcccagcctatccgcgtccaggcggtccttggtgccaggtggttgtggtgggggtcggggcaggtgtatgtgttgggaaggacagtggaggaccccagggatttgctcccccagtcccaaccgttgactatctgggttcctcaggcgcagctggggaaacaggcttcccccggaccgcagagaagccacccttctctccaaagcgcgcttctcccccatccccctcggcgcgcttccgccggccgcgctcccgggtccggatcgagcgcgcgcccccggctctcccgcccgcggccgaggggcgggaccggctcggctcccccggcgccgcagcccgcagccccctcccctcgcctcctcgccgctggcggccaccgcgtcgctccggcccgggccccaccccaggcgactctgtgaggagcggccggaggccggaggcggaggtgagcgcgacgcgagcaggtggagaggctgggcgcgggccaggcccggctgggggaggggtcgggcccgggacgcggctctttgtctcccggagcccgttcgcgggcagcggggccgctctgcctcccggcaggtgcaggcatccctcggggaggccaggggaggccgatgggggctggcggggagacccgggcgtgcgctccgggtctggagggatgcgacatcctgagcccgtggcagtccccygctctcgaggctggcggtctgagtccctgaaggggcaaggggcaggggcgtggagatcggtcctgaattggagccgaggcgggggaggcggtgggctggggcgggcagggcctcttcgctttagggaaaagcggtggggggtgggacttggggacagcgaggagcagtggggctggcgagtgggtgtaggtgcgtgggagccgagcggatggaagccgaggccgaggtttgagtgtccatgggtggcgatgctgcgaaagggcagtgaggtagcagggtccaggtctctggaggcggcgtagctgtccagaacctgggatgcggaccggtttgtctcttcaggtgcaagatggacaacaagagagacaaggcgaaggcaggggccgccgcgcggacgccggctgctcgcgctcctggacttctgacccccaggcccccaggctctcctcgaccccctcccccagtaactcccgcagccctccgagttctgggagctgcgggagcagtggggcgaaagcctctggcagagcgagcggggggcatcggcggggccactattcccgagtctgctccccgagcgggaccaacgcggagtgctgggacaagttcccgaaaccctggtaccccagcctccttcctcagctccgcccccatcttccctcccccttccaatacctgtccagtctcacctccactgccacctctccggggcacctgtgactcggccttctccccgcagcctccaggcccccagcctctgggagaggggagagagctcctcctgccaagaacaccagcccaggccctgtttctagcccagggcgtgccagcgggaccaccaggtaacctgctccctctcccccagtctcctaagccagggttagcgtcacagagtctggaaccttttattttacacgagttggggcgcgggagcacttgcaggtcactgggcacaaattgggtgaaagccattattggtcctcagagagggcacatgcccatttcacagatgggaaaatagagacttgggaagccaaacaaagacctaggcctgagcgtggccccttctgtctccaggccaggccctcttggccagaagggactccggatctcagcggaggaaactgtggccagaggaaaagctacagaggctcccaaaaggagtgccctcagcgctggggcacggagaggtacgtgacctggagaagagtggggttcctgggcagcaaggggagccgcctcagaggtatcggtgacccttggccttctactttttctccagacacttccgggcctaccccaggaaccccgtccccggccatggcccgtcggtcccgggctgcgggcaccgaggtggggctcccccggccagctccgagtgcccggccacggcccccgacagagggcccccggaaatcagtgagcagcgcctcggagcacagtaccaccgagccaagcccggctgccaggaggcggcccagcgccggtgggggtctccagaggccggcctcgcgctccctgagctccagcgccacccctctctcctccccagcccgttctgggccctcagcccgcggaacacccagggctcctgcgcatccctcgcagcccaagccgaaaggactgcaggctctgcgaccccctcaggtcacacccccaaggaaggacgcagccccagcactaggaccgctttcttcctctcctttggccacaccctctccatcgggtaccaaggcaagacccgtaccgcctcccgacaatgcagccactcccctgccagccacgctccctccctctccaccggtaacgccccctccgccagccgctctccaaagtcaggccccgcccaccctgccggccacgccccactcgtcgagccttacctgtcagttggccacgccccttcctctagcccctccttctccctctgctccaccttctctgcagaccctcccctctccaccagccacgcccccctcgcaagttccacccacacagctgattatrtcctttccagaagcaggcgtctcttccctggccacagccgcttttgtggcttcagtctctccatcagtttcatcccctctgcagagtatgccccccacccaagmtaatccagcgttgccctctcttccgactctcctctctcccttggccacacctcctctgtcagccatgtctcctctacaaggccctgtttctccggcaacatctctggggaattcggcttttcccctggccgcactccctcagccaggcctttctgctctgaccacgccccctccgcaggccagtccttccccgtctccgccctctctccaggccacgccccacactctggccactcttcctctgcaggactctcctcttctggccacattgcctctgcaggcctctccctctcctttgaccacagtctctctgcaggatcctcctctagtttctccctctcttttggcctcaccgcctctgcaggctccgccccacccacaggccccaccttctatgactacgccccctatgcaggccccgccctctctccagaccattcccccaatacaggtcccacattctctgacctcaccgtctctgcaggcacctccctctcctctggctttgtcctctctgcaggccacaacttctttgggctcacccactctgcaggccacacattctttcctgacaatgtcccctaggcaaacccaagcttctttgayctcaccttctcggccggcctctactccccctgattcaccccctctgcaggcccctctttcccttcctgcctcaccccctctgcagacttctctctctcctgctgtctcacccctaagctcacccctgaccatacaccctctgcaggcgctatcttctctggcctcccactctcctcaggcacctctctcttccctgatcatgccccctctggagacccaatcttccctagccccaccctctctgcagacacctcctgcttccctgaccacaccccctctggagaacctaccttctctagccccgcctcctctgcagacagcttctgctcccctgaccacaccccatctggagactccaccttgtccagccccatgccctctgcaagcaccaccttcgccattgaccacgccccctccggagacgccctcttccatagccacgcctcctccacaggccccacctgctctggcctcaccccctttgcagggcctgccctctccccctctgtctcctttggccacgccccctccacaggccccacctgcctggccttgcctcctctgcaggcccctccctctccccctgcctcaccccctctgtctcctttggccacaccctctccacaggccccaaatgctctggcagtgcaccttctgcaggcccctttctctccccctccctcacccccagtgcaggcccctttctctccccctgcctcacccccagtgtctccttcggccacgcccccttcacaggccccaccctctctagccgcacctcctctgcaggtcccaccctctccccctgcctctcccccaatgtctccttcagccacgccccctccacaggccccaccccctctcgctgcgcctcctctgcaggtcccaccctctccccctgcctctcccccaatgtctccttcggccacgccccctccacgggtcccaccccttcttgccgctcctcctctgcaggtcccgccctctccccctgcctcactcccaatgtctcctttggctaagccccctccacaggccccacctgctctggccacacctcctctgcaggcccttccctctccgcctgcctcattccctgggcaggcccctttctcaccctctgcctcactcccaatgtctcctttggccacgcctcctccacaggccccacctgttctggcagcgccccttctgcaggtccctccctctccccctgcctcacccaccctgcaggccccacgccgccccccgaccccgggtccggatacctccgtctcgggcccacggctgaccctggcgttggcccccggcccgccgccgccgccctcgcgcagcccgtccagcacgctgagcggcccagacctggccggccacagcagcagcgccacgagcacgccagaggagctgcgtggctacgacagcgggcccgagggcggtgccgcagcctccccgccccccgacgcagagctcgccgcttgccacccggctgcctggagtcgaggccccgctccgccgctggctttccgcggagccccaggtaaggggcaccccagacccggcctggctgtgggcggggtcggaggcgaggcttcgcagctcaggggcgggacagctgggtccggggcggagcttagacaaggaggcgggaccttgaggcaggggcggggcttatcacccccacggcccacctggcgtctctccccgcaggtgcgcccctgccgtggcctcccgctaccggaccgggctctgctgacggtctgtgcaccatctacgagactgaagggcccgagtcggcgacccccgcccctggcgcactggatccggggcccagtcccggcacgagcggtgggaaggcggcggctggggccggggccggggcgtcctcgcggagcccgaagcaggcgcgcctgggcgagctgccactgggggcgctgcaggcgagcgtcgtgcagcacctgctgagccggacgctgctgctggcggctgccgagggtgccgcgggcggcagcggcgggggcccaggaggtgcggagggtggtggcgtcacagggggcgcccgggctgcactcagcgacgccgaactcggccgctgggccgaactactgtctcccctggacgagtcccgtgccagcatcacctcggtcaccagcttctctccggacgacgtggcctccccgcagggtgactggaccgtggtggaggtggagaccttccactgagccagaccacagccccgcctgctacaccccacccctgccttaggatccgcccctccgggtacgccgtttgttttagaccccgcctccactgccctggagccccgctgggtggattagtcttagctccctagagcctgagcctttggcctcggaggctcgggacctacccacagctttgacctaggcccgcccctcgagctccgcccctttggcctaggacacgccccgtttccccgagtcccgccccgtgtgcagtgtattgcccaccccgcacagcctgagtttgcaataaaactgggacactgggacttgcacaccttcgctgtcacagagaggactggggctgggggcctccagcaggctgagcggcgcggggggccaggccagataaggccttgctggcggctgtgctcgaaccggttggagctctggataaagtgcggttttcctcttctgggagagaaggggcaggccaggtggggctagggcggggccatgccgagtcccggccatctggtgccgcgcacccatccacgtgtgtgaacttgggcttcttggtatccgacttctggtggaaacgttcggtgcaggaggggcctggcaggggctgtgcgcccgagtggatgagtcagtgcgtggccgaggtgaaggagcgactggaacccttttctattctattctaattctttttttttttttttgacggagtctccctttgtcgccaggctggagtgcaatggcgcgatctcggctcactgcaaccttcacctcccgggttcaagcgattctcctgcctcagcctcccaagtagttgggactacaggcacatgccaccacgcccaactaatttttgtatttttagtagagacagggtttcaccatgttggccagggtggtctggatctcttgacctcgtaatctaacccccttggcctcccaaagcgctgggattacaggcataagccaccgcgcctggcctgtttttttattattttgagacagaattttgctctctttgcacaggctggagtgcaatagtgctatctcggctcactgcaacctctgcctcccgggtttaagcaattctcctgcctcagtctttcgagtagctgggattacaggtgcgcgccaccacacccggctaatttttgtatttttagtagagacacggtttcaccatgttggctaggctagtcttgaactcctgacctcaggtgatctgccctcagcctcccaaagtcctgggattacaggcgtgagccaccgcgcctggcctgacacacttttcaaactcgatgcggggaactagcactcctggggaacaggtgggaagattggagggcactgaggcaaggatgggggaccccttcccatggcccttcggctggtgcagggtcccgggccaactgccctggtaggggattgcaggaagaagtggcctctcccaggtctaggtgggagatgggggagtcctcacactgcaccctgtctccaagtgtccttacacaagtgccacttggtgcatcccacccccatggcatccttgccctaaccccttcctcaggcgtccttatcagattcccaaacatcttcacaggccccctccaatcagagtttcctgcccttcctcccccaatgaaccctaaccctaacccccagctctggagcctctcaaaccctagccagtctctccctgttcccagtgcccctgcagagagctcccctgctaggcctttcctcccccgggtctcctgcatggcaccaagaatgatggtgacatccccaagtgggtaagaagacagagtaggatctggccttgggccctcagccctgcctctgcccctggacccagtaccctcacaccatcctgtgaccaggttcctgtcagtcacagaccagcaagtcctgcctgtccccatcccagacaaggcacctcctagcctggggtctgaggagaaatgggctctggcctggaggggcactgccacctgcacccctgggaggtggaggaggaggacgccagcacagtccttcggtcagagttttgtggcaaaccatagaggtgtcctctcaagctgggccctggtggggttggggacctgggtgtctttgtttccagactctgggacaagcccaaggccgactcctgacatgctggggagctggggctcaaggccagctgccgggaaggacagggcagaacctcagacaattcctctgcggtcctgccctgacctgggcagccagcgggggtggaattaccatggaagcaggaggcacggacagtgactgtgagggtccccagggttacatctgcaccatgtgtggccaggagagctgtggcatgtgatacgacagtacatgggacttggctgtctcagtacacaagcagtgtcatgtcctttgcttggctgtgaggcatgggggtagggagcactttgtggacccacactgggtgcagagggcaggtcctggctagcatctgcctgaacccaattatgtttctgcctctaggggctgcgcaccgtgtctcccgcctgtaatcccagcactttgggaggccgaggagggcagatcacctgaggtcaggagtttgagaccagcctggccaatatggtgaaacccagtctctacttaaaaaaaaaaatacaaaaattgggccgggcgcagtggctcatgcctgtaatcccagcactttgggaggcgggtggatcacctgaggtcaggggttcaaaactatcctggccaacatggtgaaaccccatctttactaaaaataatacaaaattagccaggtgtggtggcacatgtctgtaatcccagctacttgggagggtgaagcaggagaattgcttgaacctgggaggcagaggttgcagtgagccaaaatcgcaccatcgcactccagcctgggcaacaagagtgaaactccgtctaaaaaaaaaaaaattagccagatgtggtggcaggcgccggtagtcccagctactcaggaggctgaggcaggagaatcacttgaaaccggcaggcagaggttgcagttagccgagatcgtgccactgcactccagcctgggtgacagagtgagactccctctcaaaaaacaaaacgaaacaaattagccaggcacggtcgtaggtgcctacagtttcagctactctcgaggctgaggcaggggaatcactggaacccaggagatggacgtttcagtgagtcgactgccttgagttcctctaggaagctttgctttgccactcctggctctgtcctccaccccgccacccaccgccacccagcagctgggactctgcctcagctctgtggggaaccccacaaaggactatttctgccccctactcactgtcctccctgcactggccccctcacagactctgtggtccatctgatggggctctcttacctaagccctccatgggctcccaatggcccccagttcaaagcctaaactccctcacctgacgtaagcagtcccttcttagtctgaccacgcccaggctttcctgttcctccttcctaggtatggtatgcctcctgttggtctgatctttatgcttttacccctcgaagaggccctgacaccacctcccccaggaagccttccctgatctccctgcacatttgtctattgagcacctaccacattagtgcaggcttccccctgcccagtgcctgtctcctctgctccactggagaccccctcagagccaggcacagggcagagtaccccacattacccctggaggcgtgagcagaatgaatgcaaccgggtcctgtgcttcctgaagcccagcgattcggcatgcctctctccttcaggggaggcccaagttgattcacccaggtgggaaatcatgccctgcccccaaactgaatgcccttctatcctctcccacccccattctatgagactgtggggagctcctaagggcaaggacagccccaccttccctcagcacggtttttggtccctgggctgggcacccaccgctgcttgtgattctcctcccagcccgcaggccagtccgtgactgtgtaaatacactttattttccatttttcccgcctgggcgacatgtgaacaggcagtgtgcaaaatggtggcgggcagtgtagggggcgtgtggagagccccgtgggtgcctgccccggtccccaggcttcgtaacactgaaaagtgggcagctaggaagcggggacggagcaggggtccccacccaggaagcgccagggagattgcttgtgacgctactctactggaggctccgggagcaccgaggggggcagcccccagggtcatgaggcccggggggccgggggaagggaggaaggggcctggggggcatcgttggattttggcaccgttctcagctctgattcagcagagacaacgggaccaccaggaggaagtgaggggaggccgctcgctgggaagctcctgcctgggggcctggctctggctgagggtggggctggaaacacatgaagaaagggaagtagatggagaccgaggacccctgtagagatacccctccatcactggccaggatagggggcgcgagtgtctcccagagaaagatgtggggcactggggagaggggtctcttcacttcctggaagctgctctggccccagagaagcagggaggcttcccgttagccactcagtccccaggcgccccgcacatagtagggggactttggtttccgctgcaggggccacggtgcctgcgccaggcaggagaggccggcctggccatctgtccccagcggcctgactcccctagagatggccaggggctagtcaagggtcacttcatcccgaggagtgttgtggggtgctgatgtccagcccagagctggcgctctccttcctcaggcctcggctacctcctgagcacttcccagcaatgtcgcccctgtcccagaaggaagcctgccaggaggtgggagctgcctgctcattcagtgctgggacctctgggtcgtctgtcccctgccctctgccctcctgttaagagagcagtcagcccctccaggcacccctggaacgccagagggcccggaggggtacagaccaagatgggtaaacactgctggggagagagagcctgccccggggccctgaggagcccaggtcggaccctaccctctgcgctgcctcgccgggcctcgctttaggggtggccgagccacagagggcgcgtagtttgtcaagtgcggcaggtggggagcagaacgcggactgcccgggcgccccccgcggctgcggcctcctgactccgggcgcgctgggcatggcctcagttgtccagaccctggctgtagggcgcggccagctcatcggcgtcgctgtctgagctgccctcgctgtccttggccggccgctccagacggcggaagaagcgcgcatcgcgcggggacagagggtacaatgcgtcctgcagggcagcgcccacgcctacgccaagtagctcctcgtccgacgacggcagcgagtcctcgtccaagtgccgcgccaggctcagcccatcgaaagccagcgggtcctcgaagggcggcgggcccttcagcagccgcacctggggcgggggaccggcgctgcaggcgtggaccggccttctgccccgccctcccagccgcatcctccgcaaggcacctgcgctcggctcgtcccaggccgacgacacccaggcctgtccccggcatccccgcgccggctcacctcggccttcagctcctcgatctggtccttgagctcgcggatgtactgcgatgagtccgagtggttcagctggccctggatgcggccttcctccctctgcggggtgcgccaggtcacgcggggccagtgccatgctgggcctggggtccggccccgctcctgccccgggccctgcccccgcccccgccccccgaccccggccccgccgatcacctggatctccagctcggcaatgcgctgccgcatctcggccaccgcagccatgctgtccgcctcccgcagtcgcacagccatcacctcctccttgctctggggtcgggggattggggggaaaggagggcgggtcagggggcgcggcgcatcagggggcgggaccgcgggcaggggcgaatgaggaggcggggccgcgggcggaggcgggtcaggaggcaggaccgcgggcaggggcgggaccgcgggcaagggaggtgcgggcgggggcgggtcaggaggcgtggccgcgggcgggggcggatcaggaggcgggaccgcgggggggggtggtcaggaggcggggccggatcaggaggcggggtc

SEQ ID NO: 97721 - DNA, 47028 bp, Homo sapiens
gcgctgtgagttagggtccaatctaacaagttattccgaggtcatttttgttttgttttgtttttttgagatggagtctccctctgtggctcaggctggagtgcggtggcgtgatctcggctcactgcaacctctgcctctcgggctcaagctattctcctgcctcagcctcccgagtagctgggaatacaggtgcccaccaccgcgccctgctaatttttgtatttttttagtagagacagggtttcaccatgttggccaggatagtttcgaccctcttgacgtcaggtgatctgccctcctcggcctctcaaagtgctgggattctaggcgtgagccaccgtgcttggcctattctgaggtcattttaaacttcatgactttttctattacagaaagcagaaataaagttcacaccatgtatattaaaagcatgggtaagagaagtaaaacttgcaaacccttagaagaaatagaagatagtgtcactatggccttaaggtaggtggggggaactgaagcagcagtttcatttcctcccatatgcgttacggcattgattgaacctgttctccagtgacctgcctcagtcataccttgcacctctccatacaagtgtctcccctacatgggagcgtgtctactgctgactgttcctattctttcttttgacctctttgcctctcttggtgccaataccacactgtcgtatgtaagacagttttgtaagactttctaagtctttaaaaacaggtacttagtaagaaggcttgccttaatagcagggagaagaagtcctctacccggatcttcttcaaagctgacttgcccattcctgaatcttttctccttcgtatgtatttcaggctcacttcatgcttctgctcttctgggctctttactgcaatcatattgcatttttagtaaggactgaccactttatcaaattgaatttctcatttatgaacatagtatgttttgccatttatttagatttttgtaaaggtccttcattcaagtgtttttgctaaattcacaattagatactcccatggattcttcccattcaaaagggagttgatttttttcccactcaggtgagagctgcagcttgcatgtagaatggagttgctgctacctgttttgcttaccaatttatagtatgtgtgtgatatacgaaaaatgatacatatgagtattttagtatatgcatagcatttaattatataaatatgttaaattttatttaagaaaactcttcctgataggcttttatgttgttctatatttgtttgtagtcaaaaaatgctgcagggaacatttatacttttatatcactgcgcccttgtgagaatgcaactgtgggagaaatttcatgaagtgaaatgtctggtaaaaaagtgcatgcatttacaatttatgtagataatgctgaagtgctttaaaaaaaaggcaagaaaaatatagtgctacccagtagcactatactatactacccagaggatgaaaatacataattaccatcacttcacaaacctcactagcctgtgttttatgaaacagtcttatccaatagataaaataataaatatcccatcattactgtgacttttctttagttataagtaaccctgggttttttccttacatgtgtatacacatttgtaaagttttaaaaaattattaagggtctgagccaagagaaagttaacactttaggctttctataacaacttaaaacacccaaagttaaactaaatttaaggaaagagctgatctccctcaaaggtggaaatcagggaacatacctagaagcaaaagttaaatcacaatcagcctaactaatttgaatttctcaatgggtgattttaaacagaaaacacgttgaaagctgaagtcaatgctgtggctgctgtcacaagtaagacctgagatgataaaattatggaattttagggtggaaagtaaacttgaagaaaatctggcctcatcttttttgacaggtgagtctgtctttgtaagttcaacagaaatatgaaatgttttattcaaactcataagcagcaaagttcagtggctagcaaataggtaacactataatcatttgtggagtgaacaagaatgaaggaatgaatgaatgaatgaacggtactaggattggcacctgggtttccagaaagtaggaggctctttctccttacgctttgccattaatagtcagtgtgctgacattccatacatttctataatcctacatttagaggcactgagctaatcccttgtttttaatttccgacaatcatcacttttaatttatgatgaattcagaaataaagggtttccaaaagcatgtattatgttcatgacatgtaaccttggaaaacaccatatttggttaaatcactgcatatttttctttcagaggtaaaagtgctttgacatctctgtatttgtttgctaaagccagggtaacaaagtactgcaaactgggtagattagaaaaaaagaaatttattatgtcgccgttgtggaagttagaagtccaggatccagatatcgcaggattgctttcttctgagcttgaaggctgagtctgttccatgctgcatcctgaagttatggttattggctggtgacccttagcattccttggcttgtaaaggtttcacccccaatatttgcctttatcttcacctggcattttccctgtgtgtgcatgtctgtctctgcatccaaattttccctttttataaggacatgaaccatcctggagttaggcccacccaatgatgtcattttagcttaattatttctgtaaagaccatctccaaacaaagtcacactctgagatactgggggttaggaccccaacatatctttttgagtagacacaattaaacctttaatacttaatattcacttgattgcccttctaagttccagtcacaatctattctgatttttttttaaattgctttctaatttcgctaaaacaatgaatttcactataacataggatatgtttttgtaacatagcaaattgcatagacaagttcggatttttaatttctgtgttggagtcatttgtgttaatataaactgagactacctgtaggtgttaacattaggttgaatgctattcgaaataattatttgtaaatgtttgggcatttgtttatctaggttatccatcagtgacatttgaatgctatgggaacagactctgaagccttaattattagacttacacagcatctattttcaaagaaataaaaacactataaccttccagtgtttcattttcctggccactcacaatagggttaatgatacccaactgtctcccccaagatcagagatgttatgatgacctattaatatgtatgacccatgaaaggaaaataatatctcgggaacccaaatcagtaagctaaagggaaaaatcaagctgggaactgtgaaacctgcctcccattttatttctaagtaagacagctataaggattttaaaaagccacatacttttctcacaatttgtccacaaggaaattccttgtggaccaaggacaggcagaactcaaagtcatcctcctgaggctcaagggtgagacaaacgcatatctgatcacttcctctgccccattgtttcactgagtcagactaaggcatcagtgactgcttctctaccctcctctcaaatataagttgtgtgttcagtgaaagtctaatcagagactcaaaataatgcaaccatttccttcttatctacctacaacctggaagcccccacttggagttgccctgccatttcggacccaaccaatctacattttacatatattggtggatgtctcatatctccctaaaatgtataaaagcaagttgtggccaggcgcggtggctcacgcctgtaatcccaatactttgggaggcggaggcgggcaaatcacgaggtcaggagttcgagaccagcctgaccaatatggtgaaaccccgtctctactaaaaatacaaaaaaaaaaaaaattagctgggcatagtggtgggtgcctgtaatcccagctactcgggaagctgaagcaggagactcgcttgagcccgggaggctgaggttgcactgagccaagattgcgccactgcaatccagccagggcgacagagtgagacacggtattaaaaaaaaaaaaaaaaaaaaaaaaaagttgtgccacgaccatgttggccacatgtcatctggacctcctggggctgtgtcatgggcatgcccttaaccttggcaaaattaactttctaaattgattgagacctagatcggatattttgtgtgcacacacccaaattctccctagaagacgggtgatgcgcagagcgtgtttgtgtctgtcgctcctattattgcctgtgttctggttcctttgggctcttcaataaggaggtacgtgtttacctgcagcccagaactggctgccctatggagagtttagggtagacacgttgggactttttcccacagtattaccttccacattgcttccaaagttttagcttgttcaagccgactgcagccatctacttaccatttaattttttattttttttttcagagcccattaggagacagagggagatttgagcctgtttgtattcgtgatacaaggggaaaaaaagagggagaaggtgaagggaggaaggaagagaggctctgagaaacccggaaggtcagacttggtgcggacttcctccaagggctaccccaccctctccaagcgtggctaatcccagggccccttctggcccacagtgcagaaccacccactcctacgcgggcctccttcagcctctctgggggttcccagaagggcccttgggcacttgggcaatgtcagggggctcaggtgcatcttcctagacacgaaacgaagaggaaagcggaggcagcagcgggggccacaggctcccatgcagcagctcggagctgtgctgtgcttcgctggcggccatccgtgatacgtgtgacaccgtggggccctggccctgggacctgccatgcagccttgagatctcatccaagaagcccccagaccccaaggttcaggcctggcggggcagcagaacgcctttggagctcagctcagccctacaaacaggaccaacgcccacaccaaggccagagagggctaccaagtttcacctggcccagcttccggcagcccccaaccaggccactaccctcacctgaacaccgcggtccatcaccaagccccacccacttctgccagccctgcccccacaaggacccacctctcgcatgcaagccccgcccccaaggcccagctcacctgcagccccgccccaccaggctccaccccatcgcctgcaagccccatccccaaggcccagctcacttgcatccccgcccactaggctccaccctgtcacctgcaagccccgcccccaaggctcagctcacttgcaatcccctctcccactggtctccactcctcacctgcaaagagccacccctcgctaagcccctcccatcacttgcacagccccacccaacacagcacgccattccaggagcccctcttttcaccagcgcagccccgcccttcaccaggccccactccatctgcatacacacgcctctcgccacgccccacttctcgcctgcccacttccccctcctatcatctgtccacatcctgctgctggccgaaccccgcccctttcggcaagacggccccgcccctttctacccgtaccacgcccctcgccttgcccgcctccttcggcacgtcggccccgcccctcccgcccatctccgtccgcaccgccctcccgcccgtcccagagcagtggagggctacccttttcacctacagcctatcgcagaggacgtcgctgttcgcgttgaccaataggagtggtagctgtcacggcaagccccgccccgcgccctgcgtcgggttaagagggggttcctcgccagccaggtgctcgtcatgcgcaatgtggcgctgcggcgggcggcrgggcctgtgtgtgctgaggcggctgagcggcgggtgagacgctgcgacgggaggcgctcggcgcgctggtacccgggaggggagggtccagggcaggccggaggcgtaggggtcctcgtccctgcgcccggggctggcagctccccaagctgtgggcgtcccgcaccccgagcccttcctggagctcccgcatccgaggctccgaggccggaggacctcggagctccttcctactcccaggggcgatgccccgggctgggggccgggcctgcccgcggcgctcccggcggggccctccattagcgtgggctttaacgggggtagtaaatggggtcggcatttgcggttctcgctgacagctttgctcctagttcatttttgttgggaggccgagtccttaagagacccgaggcgcccacagcccacacttaaagtctcgctgtgttcagagaactgacgcctcccggaattgaactgttttgtttttttaatgactcaatttatggggaaaaaaatgacgaagcagtttagtgttcatggtaatccacgagcccgtgtttaatataaggtaacagttcagcgctgccggcccaggccgggaggcacggggcgtccgtggcatgagttcggcctggccttaccgctcaggagtttcctatcatgtccttgataagtaacttcttaaaacgcttctgtcccataattctgaaatttgctaaatcagtaagcaaatgttggttatagcatatcttcataatattgccagtgactgaataggttttttcttcctgtacatattatctttaaaataaatatttcggtgggatacattaatgtagaaaatcccatacgacatataatacaattggagagaataataattacgtgttttttaagagcagggatcttgctctgtttcccaggctggtttgatccccctcctcagcctctcgcattgcggggttacaggtgtgagccatctcattcaggtgagaataattattagaaataggttgggcgcggtggctcacacctgtaatcccagcatgttgggaggccaaggcgggcagaccacttgaggtcaggagttcaagaccagcctggccgacatggtgaaactgtctctactaaaaatacaaaaattagctgggcgtagtagtgagcacttgtagtcccagccactcaggaggctgagacagaattgcttgaacccgggaggtggaggttgcagtgagtcgagattgcaccgctgcactccagcctgggcaacagagtgagatctgtctcaaaaaagaaaattagtgtccctgtgaccaagttgaagattcccctaactgctcgtaactctctccctccctcttagattatcacggtcatgacatacagaaatgtccttgctttttttttttttaatattttaccatttttatgcgttctgacaatgtcttgttacctatttgaataatacctgtttaggataatactgtatcatgtgtatcttttgtttcacgttatgtgacccatatctttgttacatgccactgtaggcccttatattggtaaggtttttttttttttttttttttttttttttttttttttattgaacgattagtccgcactttatccattctctgtcgatacacctccgggtgagttgagtttgggactgtcagggttcgtgctgacatttttgtctgtgagtgctggggccgcagtgtaaggtgtggacgatagagaccaagaggtgaatggatttccaatcttcagcatttttttcttttttttccgacagtcttgctctgtcacccaggctggagtgcagtggcgtgatctcggcccactgcagcctccacttcccgggttcaagcgattctcctgcctcagcctcccaagtatctgggactacaggcacctgccaccacatcaggctaatttttggccaggctggtctcgaactcctgacctcaggtgatccgcccacccaggcctcccaaagtgctgggattacagacgtaagccaccacgcccggcctcttcagcctttctaaagaatgccaagtgcttttccaaagttattccactttgtactccctgtagcagtgtatgagagttcccggtaatattaggctttttaagttttcaccaattcggtaggcatgtaatgggatttaactgtagtgtgaatttcttggtatactgtgaaggcttttgaggattctgtgaaggaaagaagcccttttgtttaagagttgtctcttaaacaaggggaatttaaactgtaattgtattatagttatttgtgaacaagtgtaaagaaaaggtttccaacattgaagctttagttaagataaagatcattaaaatggaaaggaccttaccagaaatcagttttctggaatgtgcaagactttggaagatgcaatatttaatttttctttaataatctttattacatgagagtattttcactatgtggctgaataatgttagccagatacttttcctgcaactcatctaacttagatgacttttaatctagacatgcacaccacagagcgtggcgatggaacagtaaccgggcttgtgagagggctctgcagtataaactaggagacaagatccatggattcaccgtaaaccaggtatgggtcgtcctcggcacctccttataaatccacatacattgcaggtgcggcttctggcctatgtacggagcccttcagggcggagactagcgtttttgtccttgtgtcccaaggccctggcccagctcctgctgtgtggcagctactcggctgaacagagcttgtgagtgaaatgagccccagtcccttcctggaatcccgcaaagcctggttcttgtgagattttagagagtaacacttccagctgggtctctgtaatcagacacactagcgtttctgcagccaaacctgatgtttcactgagcatgagcatgaagactcactgccctgatctgtttagtcaggttttgccatcaaatagcttgctctaaacgtccgcagaacctttcagttttctgagccattcgggtttcagaatgataaagaagcaattgtggacctgtacttacttgggtctgtattaaaatagattcatttggtttttgttttgttattttgcctaaaccttttgcattgtttctatttagcatggtaactgaaaatgacacgcttcatgtatttggccagctgttggctttgtgctatgcttgatgttatagcaaacgtgaaagacaaacagcttactgtctagaaagactgctgcggctgtgaccggaggcacatggtggacgccacgcggagggccaaggacaagggcaggaggaggagtgggagctgctgctgctgggggcagagggaagagctcctggagagggtggtgtgagaacgtggctgccttcggtcagggctccagcaagggagccagggcagtgactagggtgcgccagacaaggtccaggcatgggactcatgaaaagacttggagcgtttgtgaaatcctgcaaaggccaggcaaagacacttgggtttatggtacaggttactgttaataagggcctcacccacagcggtagattctcctcctttatttctcaaattttatagaaaygtatttacttttgagactgggactcaccctgtcgcccaggctggagtgtggtggtatgatcttggctcactgcagcctcgaactcctgggctcaagcgatcctcttgccaagtagctgggacaaggtgccaccacgcctggctaattgtgtgtgtgtagatggaaactttgttgcctagactggtctcaaactcctgggttcaagcaatccttttgcttgtgtattagtctagtctcacactgctatgaagaaatacccaagactgggtaatttataaagtatgagctaaaaagtgaagaggtttaattgactcacagttctgcatggctggggaggcctcaggaaacacaatcgtggtggaaggcatctcttcacagggcggcaggggagagaatgaggatcaagtgaagggggaagccccttataaaaccgtcagctctcatgagaacgtgctcactgtcacgagaataacatggaggaaaccgccctcttgattcaattacctcccaccaggtccctcccacaacatgtggggattatggaaactacaattcaagatgagatttgggtggggacacagccaaaccatatcaccttggccttccaaagtgctgggattataggtgtgagccactgtgtccagccatagaaacttacgataagtcatgattcttgtttgagaaatagctaccatgaaagctattattattaaagctatatattattagaaagcaaacatctcactgtatctgctgacttcaaaagcattgatcatctgttacaaagtacagtgagcttggaaacagaagtaatttcgcggcggtagatgatgcaggtcatagtggtctgctttatgcatgactgttgcgtggcaggctccctagattgggctgaggagacccgaggtctgaccttggccagcgacttactgtgtgcgcttggccaggtgactcatggcacctggcaggagggggtggtgagtggtgtggtgatcacagggacgtggtgtgtgattgagggagagggccggctggcatgactggaagagaagacagtttctttcataccraggagtatggtcacttaccaggaggcttacctaaagtaggagatgaccttccacgccgccccaggagtggggagtctttcgtctgtcttgtgggcatttctatcctcccggcccctccagctgttctggaagccacagctttgtgcttctagctaccaccgagaacccatcctaaactaagagaagcaaaggctgatcctagagcctctccctgctgtcgcaggctagcccactctagcatttcccctccttgcaggcccgttctgcgcactacaggagatgatatgcacagaaacagacacacagccaacgttggaaggggygctgtgttactgaggcgcagcacacaaaagcaggagacactcagcagacattggaaggggcgctgtgttactgaggcacagcacacaaaagcaggagacactcagcagacattggaaagggcgctctgttacttaggtgcagcatggtaccatgggaagggcagacaccagggtgaatcctggctctgtgatttaggcagcttatttcatcaccctgagcctcggttttttcgtctgtaaatgagtatgagaatacctccctcacaggattatatgtgacatgattagaaaatgcctagccaaaaaaagaataaaaaatttaaaaaataaaaaaatctaaaatacctagccagtagtaagcgcgtgcgctctcrcgctcgctcgctcgctctctctcttttctatacacacacacacatattctcatctgccttttttaggtctgtctttccttgtttgtaggataagggacctggacaagatggttctcttctctccagctctgaaatactgccttcccggcatcatctaatttcaggcagaaaagccagttttctcagtgtgtcgaacataaccatttcaaaggccattttgtctaagtttaactggtcgtgtttttcttgttaactcaggtgacatctgttcccgagctgttcctgactgcagtgaagctcacccatgatgacacaggagccaggtatttacacctggccagagaagacacgaataatctgttcaggtgtgtggtgcattgtaagaacatggtcttgaatgtttttatttaaatcaggaatgtccattcttttggcttccctgtgccacartggaagaagaacaactgtcttaggccacgcataaaatacactaacactaaggacagctgatgagctaaaaataataaataaaggacccctcaatgttttaagaaagtgtatgaatttgtgttgggctgcatttcaagccatcctgagcatgcgggctgcaggctgcgggttggacaagcttgatttaaaacatggctatacattacgtggtttaaaatatcatctcactagtatttttattgacagagcatcttgaaaaataaggaaaagtttacactgacttataatctcatcaaaatacaattttacagtctgagtcaatgatttacattatagttggaaaaccctgtgctggaggattgtggtgtcagaatgatgatttctagtagcctgaggtgatgatgcatctgggaactgtgtccgcagcactaagctgaaccttttgygttctggtcattcgccttccctagcgtgccattcctctctcttccctagcgtgcagttccgtacyactcccatggacagtactggtgttcctcacattcttgagcatacygtcctttgtgggtctcagaaatatccgtgcagagaccctttcttcaaaatgttgaaccggtccctctccacgttcatgaacgccttcacaggtaagaccagcatcctgaacagaaactgcttttgggtttgccaggcacacccactggaattcagttagtttctgagaaggaatgagsggagtgggcaattcatgttctagaaaaatttttacctctctctagttgaaggacattagaaatttaatccttcaggaaagccacatggtagcgagattgtaaaaactagcgttttaagaaaacrtatgtgaacttttcccagaaaagttcaaaacaattttctcttggagatatcgctacaatgccagagttastactaatgttgatgtttgacttttagtaagactgacgatagtggatagggtgacgatgaacagtgcattctgtgggggagtgacattgaagagcgggttaaatccatgctgttacagaatgaggtcatctttgtagatgtatgaaagtctctggagaaacttgagagagtttagatattcgctgaagaaagccctggtgcccgtcgagtgcagatcctgagacgggatgggaaagccrgcacttggggttatgagctgggacagctgctgaggccagggaccagagcatggggccactgccccatcccaagaakagctacagcttactgtcctaggacaaagggggmatgagtcttgagagtcaataattttagtagaaatctgttatattttacaatttcacttttcatttgtacccagctagtgattatactstgtatccattttccacacaaaatcccaaggactttcagaatctcctctcggtgtatttggatgccaccttttycccatgtttacgygagctggatttctggtatgtcatgaatgattaactagttgatacagactttagtatttgagtcactatcagcttataatgatttgtcctcaggcaggaaggatggcggctggaacatgagaatccgagcgacccccagacgcccttggtctttaaaggagtcgtctttaatgagatgaagggagcgtttgtaagttttcttccttttttatgttgtgttcagcttacctttcccatgtacaatatcatgatatagacacatctggaagattttatttaatattctcattataggtgatacattcttgaattagctggggtcagtgctgtgagcagaagtcggggtagcagggccaggctgctgttcttcccagcaggtctcagaccatgtctggggacccctggtatgtgatctgcagcaagtctgtgagataaaagctattttcataccactaccaagacagtgtcttttcattcattcttgcccaagtacacggtgtactttctagaggctgcatggcaaggtgtgtgacacacagcgagctgcatacagagcaaatgggggagtccagcttcacctctgagccagacgctacagagatttgcaaaaaaggcaacacagcaccactctaatcagttttttactttgttatgagaagtatttttcaaaaatatttatatcaacatgtaatgatggcttaccttaatgaataagtattttttaaatgtctcagctttaatttagaatatagaaaaattatataaacacacacaggcacctacacaggcaaaaacgcccacataatcaaaagctgtttgggtcctcattaaaacgcatttatgcctagtgttccattattggcaccctaagcttgtgggagttatttatgtcctacagctcaaggtcatcgccaaggtctgattttttacaaaaaaattgcaacctcaggcataaatgggttaatttttcagagtgtaaaggattcttgagaccattttggattaagagctgctgtcctgggcccatgtcttcatgtccctttgtgacttggacaacctgtctgtcctggtgtccctgaggctcatgggtggcctgctctctgattcccgtagctcctctcggctggtgaactatttcttaccttttcattctcaatttggtggtcttttcttccaaggagtcttcttgaactcaagttggggtgacagcttctccccacttccctcacggctggtgggcagaccgactgatccgtcccgatttacagccctcagctatgcgtttgttgcaccacacatcaaaaaatccattgttcttctcaatccttgggtcctgtgcgtgggtgatgaatgattgaataccttgttaaacaatgcctgcgtgggtgtttttttttttttttttaaaccattagaacagctttatttgcaaagtattacaggtgtatgcaccagaatgtgatcaattggctatattgtaagtaatgtaacgtgtgtattattttacatgtatacttatgatttatttattttacgtttcaagacagacaatgagaggatattctcccagcaccttcagaacagacttcttcccgaccacacgtactcagtggtctccgggggtgacccactgtgcatcccggagcttacatgggagcagcttaagcagtttcatgccactcactatcacccaagcaatgctaggtaatattttgttggaaaagtttgatggtggattgtgaaaagttgacttgtttgtgttcttaacactttatggcatggcttctctcacatttagcaatgcttaagaaatatctaagtctaggtaagattcttggcctaagtttgcctatcttacttggacattgattttggrcatttacaatgatagccctcaggaggctcagcatgttggttacaaacacagcgtttagagtcccccagaggagggtcctggccccgcagcctgttgcctcacatctagcttggttgcgtggaaagtrggggtgcatggatggtgcccaccttgacacggggtgtgaagcttgaagccctctccttggcacggagaagtgctcttccaatagtggatgcagttactgaaccttaattacatcctcactttctgatacattgcttgttcttatgtcactaatacaaggtcattataataataatatagtcatatatcttatataaaacactaattgtatttacatatgaatgctaatgtaaaaacatatttgcaagattattttatgtaaaaataattatgaaaacttgaagcatacagaaaagtagagatactagaataatgagcccctaaacacttatcatgtaatagatatcctttcccttgctgaagtttttggaagtaaattatagacgtcatgatcatttgcccgtaaatgtttgaatttgtgaccytaaaacrtgaggattttttcttacatgagctaatgccattttcagttttaatagaataaaacatactttcttaaaactgcctatttcttattccatattcagattttctagttggccccaaagtgtttgttgcacrgggtcccacaggtcacacctggtcggcccgggtttctcctgggcaccctctaggggacggcagaggagtgtgcaggcccagtttctttctggcgcactcactttccaggtggcctggctgttcccgcctggtgttgggtgccatgttcctgtgtttcctgagcactggaacttagatccaaagacttagtttgagtcaggctgtgcctttgtaagcagagtccctcatggggagctctccatagacggccacatcctaccatcatgtgaggtctgctcgcctccactggggatctcacaccagcggggtccatgctgagagtcagccactgccttgggaagatctgctttttcccttcagccacagaccatctggcgggcttgagtttctggtgtcctgtgataatgagttcctcatcaacctattaatggttttcatattcattgaggattattgcctgaatcaattactttattagagtttgcgaagttttctaattctgtaacttcttcatttgtttgctggacttcttcaaagaagagctccacatcagctgggctatcgggttatcttgaaatatggttctgtggaaaaggcagggccggctgctctccctgggaagtccagtttgaggaggaggggtggtgcaggaactacttttaatggtgacagaagaggctgtcttgtttttttttttttttttttaagacagggtctggttctgtcccccaggctggagtacagtggcatgatcttgtcttactgcagcctcagcctcctgggccacctcagcctcctgagtagctgggactacaggcgcacgccaccatgcccagctagtgcttatatttttttgtagagacagagtctcgccatgttgcccaggctggtcttgaacttctgagttcagtctgcccaccttgacctcccaaagtgctgggattacaggtgtgagccactgcgcccaacatggagaagagagttctttcttttcttcttttttttttttccccagtcttgttttgttttttagtaccactctgacctcacagaaatatttctgtatatgtatatatttgagattatgtgatcagatggaatttattcatttttatgcccacatttgccccagctgtgggcccgttttggtctaacttctttggtttctacgcccccacccccacctccctaatgcacgcacagccgggccctccctgctccagaggttcaactgtctgtttccccagggagctctgatttctgtggctaatggggaagggtctttggagagcagcatctgaacactaggggtggtgattgctcctggattctctcaaccccgagtgtgtaaaatttgtttctaaattctagagtgagaaatttctgaaggttctgtaagatactagtttcccaaaccttaaccatagctcaggctatatagtaaagaaaaagataaattctgtcattgtaacctttttcctctggttgaataaatgtgttatctttataaacgtgtataaccttgaatttgttgccaaaaattgagttttgtgagattgtcagttggattactatattactgtacctagggttataaagtgttttaacaaatacctcatttggtttttgtcacatctagatgaagtttaaaatgtaagatcgatttttggctaggtgtggtggctcatgcctgcaaatccaagcacttacggaggccaagatgggaggattgcttgaggccaggagtttgagaccagcatgggtaacatagaacccacctctaaaacttaaaaattagccggtcaggcacggtggctcacgcctgtaattccagcactttgggaggctgagacgggtggatcacctgaggtcaggagttcgagaccagcctaaccaacatggtgaaaccctatctctactaaaaatacaaaaattagctgggcatggtggtgggcacctgtaatcccagcaacttgggaggctgaggcaggagaatcttttaaacctgggaggcggaggttgcagtgagctgagattgtgccattgcactccagcctggggggacggggcgagactccatctcaaaaaaaaaaaacccccaccaaaaccaagtgtggtggtgtagtcctggtagtcccggctactgaggaggctgaggctggaggattgcttgaggctgcagtgagctgtgacggtgccactgcactccagcagatgcctgaagccaggaatagcaccatgccctgtgaatgaacgttgaatttataaattaggcacagcgagaggttaacaacaataactaataataaaatagaacaattataacaatatactgtaataagttacatgaattttggtctctcgaagtacygtgatatttttggaccttggttgagtaagggtgactgaaaccgaaaggcgagaccttgggtaaggggcactcctgtgctgtgtttcagtgaaacagacagcacttgatctcacatcttttaaactaaaacagactaattatattcccttaaaattttaggttcttcacgtacggtaattttccattagaacagcatctgaaacaaattcacgaggaagcactgagcaaattccagaaaattgaaccaagcaccgtggtgccagctcagacaccctgggacaagcctgtgagtgccccaccgtgtttgtgtccttcctggtaaatatgttgacatgaggacttggactgggtattgatgatgggatttcagatgctgtcatgtttggtacagagtatgggagagcttttcaagctgaaagaatggtaatttgtttgaaaggaaagttaacttagtggaaagcctgtttcgctccatttcgtgtatccagataacctagagtagttgacaaccgtcagacactgtgcctactcacaamgtcacrtcattttacagagggaattccagataacatgtggcccggattcatttgctacagatccctctaaacaaacaaccrtcagcgttagcttcctcttaccggagtaagtatatgctgtcaaagctcatacaagacaaaaacatgaggaaaatgttcctattagaaggttcggaagtgagttctacaattgaatgttaattaatatacggttaggattcaggggttaagtggattttaggaatagagaacaaaatgtcgaagtttttaataacatccaaaatggtttttgaggaaaatcgtttttgatagccctccggaagaaaagtaatttacttattgtatttcaaagctttattcctacagagaaaagactgcctcagaccagcaggtgctcacattttgaggtcacaggtccctttgagtgtgagaatggtactatgaacatgcacctcggcaaaatataycacatacaaaactttgtaattccggtggtttcacgagactaggtcggaaccatgcccgggggtgttcaggaagggaaggcttgggctctgggccctcccgtgctcagcctgcagctccgtggctggcacctctcctggcttgttccttgtctccttaatggtgctgccacagtgcctgtgatttaaatcacgtgtgaaaagtgcttggcaggctgtcccatggtgagcatttcgtgtgcagtgaagttaatttgatggtttgtgccccccttcaaaaatcccggtatttaaggaaaattctcttctgctcataaaattgttaaatgttgaaatgcaagaatttctagaaagatgtgtagtggttttaaataaaatgtgcataagggccagtaattttccctttactcttttcttacctccccgttcctttttttttcaatgcagcatcaccgacacatttgaagccttcacattaagtcttctgtcttcactcttgacttstgggcccaattctcccttttacaaagccttgattgaatctggccttggcacagacttttctcctgatgttgggtgagtttrtgattagattagatcagtagttctmattggttgggggcagttttgctcctccacctccgcaccctgtcccggccccacacttgacartgtctggaacatttttggatttttgattgctataatcggaagatggcggaccaggaagttgctgagtgtctcatggtacacaggatggccgcccccatcagggaactctggatgagatcctggatccagtgccagccatttgtgtccccccaagggggcatttgtccaaaagaaaaacacccagcacaaagacagcttttccagggcctcagaatgtcatgctgttgtctcttacaggtcaggtcattaaatattagaattttttttttagatggagtctctccctgtcgcccaggctggagtgcagtgacgcgatctcggctcactgcaagctccacctcccgggttcacaccattctcctgcctcagcctccagagtggctgggactacaggaatttttaaaattttgtaaatctcagcagttctctgttttgatatttatcctgccataactcaaaagtttaaattttatttttaaaaaatgatgtaaaaatgacatggatgtacacagaaccagttacttgagaacactgctttaatgagcttttcagtggaggggctggagtttaaggcgcttcgttctgatctttaaatcaagcatattacgagggcatgatgaacgtgcccggattccagtgcatcatttctggttttgtcttctagatataatggctacacgagggaggcctactttagtgtcggcctccaagggattgyggagaaagacattgagaccgtcagaagcctcatagacagaacgattgatgaagtagttgagtgagtgtagcttgtttgtaacaatctgctttcgttcctcattcctgtgtgctttttgggagaagctgagcctgatscattgtttcggccttccttctctgtcatataacatgcttttgttcatatttagttgtttaaatattatctctgctaccttctgttactaaaactcttcaacatcttaggtttttgttttgttttgagacagggtctcgctttgtcacccagcctsctgtgcagtggcgtgatctcagctcactgcattttcctcccctaccaggctcaggtgatccttccacctcagcctcccaagtagctggaactagggtgcacaccaccatgcccagctaatttttgtgtagtagagatgggctttctctgtgttgcccaagctggtcttaaatgcctggcctcaagcagtcctcctgccttggcctcccaaagtgctgggattacaagcatgagccattgtgtctggcccatctttgttcttcattgtattctttaggaaaggatttgaagatgatcgaattgaggctttacttcataaaattgaaatacagatgaaacatcagtctaccagctttgggctgatgctgacatcagtaagtgatctctcaacaattttgtttttgttttataatagacattttgtcttgttactagcttaactggcattttgatatttttatgtgaaatagattactttaaatgggtaagggtttataactagtaatctgttggttatttcctaaacattatttcagcctgtgctttttattttattggaacaaaacagggctaaagtaagtttttttgtttctccatccaaagaattacatgacttttgttataaacaatcatctgtggtatatttaaatacagaaactaggattttagtatcaagtctgggctgttggtggaggttgtactgtggtaccagctgcattgtggatgtggaaatcttccttccagtacatagcttcttgctggaaccatgatggggaccctgtggagctcttgaagttgggaaatcagttagctaaattcagacagtgcctgcaggaaaatccaaaatttttgcaagaaaaagtaaaacagtattttaaggtaagaaagttggataattcatttctctaattttgaagttgaattttatactaatgaaaggaatattaggaacataatctatacatttaagtaatttctgttaatgggtgacttaatttctaattaaaaatttaaatgcttacattaacttaattattttccagattgtaatgcaagttgarttttttagataaatgtatatgtgcatttttagtgtgtgaatatatgtatgtttgtgtgtatgaacaaaacatctgcatatattgttcttttattagtagaagaatataaaatatgtgaacagtcacccaaatgtaatgaatcttctggttttcatgagtgaattcttttgatgcttgcgcgtttgttttctcagatttttaggcagttgtgcttggttgcctgttctttgctttgtactcattactatggtagaacttttaaaaagggttcccgtggtgggagagactgttgtctgctgtgaagggaaactctccagtaggttccattgttttagacatgagatatgatttaataatttgacctgcagtttctctcagctgttgtaagttattttccatgaactttctggtgtcttctagttatctcacctgtttgtagtattttataygggagcattttgtgcatgtgtagttttttaattgttgaaacaaggaaaggacatgaaatcacctaatgttcatttttatattaacgtcaacatgtattttgttctaataacttaygaagtattgaatgggaaatgtagttctagccttttagagcttaatagtagaatgaacgctagacaaaaaatagaattctatattatcttcaattagactaaaatccaagatctgtagtacttgaaagtgcaaacctttttacaactaagatgtaatgaaaatgtttagtattgatatgtttaagacttaatgaccataataataataacagtagaataacagcatatatgaattctgtgcttactacataggcaggtatggtggtaagcattttataaggcttgtgtacttgcatcagcaaaacaactcttgaggtgcgttctattattactatttttaaagtgggaaagtggaaccacaggaccaagaacacaccagcagaagcttgttgagtgttaggatatagtaagatcttgttttcacttggcttttgttgttgctgtgattgctgcagaataaccagcataagctgactttatcgatgaggccagatgacaagtatcacgagaagcaggcacasgtggaagccacgaagctcaagcagaaggtcgaggctctgtcccccggagacaggcagcagatctacgagaaaggtcagaggcttccttccgagctggcgagtccctaacctgcactcgggcctagtggacttgttagtgagttagtagttggaggcaggtattatttcaaccaacaggtgtccgctgggcgccaacagagctcacgttcgatgcattgagttcagatattctcagaaaatcgcccrtgtagctcwgtaggaaaygcaggagtcattgaaaagaagtagcttgaaaagatgtatttattttacagattttgtaaatacttttatcaggtgccgtaatatgccagtaccattgttctgctgcagtgcgtgttgcctggcctgtgagcagagtggacagttgagagctgtgtgttgggaagaggcctgtctcaggcataccgggtgtgtgccagccacagagcagcaccaggattctgtgggacaggcgtgaggcacacagggatggtggagcggtgggcatggagggaggacagcgtgtgtgggggagacaggtgtgccctgtggctctggggagggcctgtatggaagrtggggagcacacgggtgcttcatgtattaaggcaggagaactgtcgggtcagtgagcagtgtagctgcagcctcattcaggatagttttgcagaaaaatagagaaattggatggagaaaactgctgagaggcaattagacacctaagcatgacatgacgacctaggccaggatggtgggagtgaaaagaaaagtgagacggggattggcagccgctgggggagcagccgggtggaacgaaggaagggaggaggccacgggagagaaggggacccaaatggattctcaaaggtagtttggcctctgggaaaaaacatttgcaaaaatggtgtctgataaaggcctgtattcagaatatacgaaaaacgaacaattcagtaatgagaacacacaacccaattaacacatgggtaaaagattttgacagatatcatctaagagttcctaatggcaaataggcacataaatcattacatgggaaataatctcattactttcttagggaaatgtatcataattattagaaaaatgcagattaaaactacagtgatatacaattatacacctactagaatgactaacattttaaaaattactgccagcaccaaatgcatcaatcctgagaggcagggggaatgctcacatgctgccaaaggagccaaaatggtgtggccacctaggaaacggggtcacagttctcacagtgccagccaacatgcacggaccaggaaagccccgctcctaacgttccttcaagagaaatgaaaacaggcgtctgcacaaagcttgaaacaacccagatttccatcaacatatacatccttacaaagaaatgccactagctgtgaaggagcgcaacaatgatgcaygcttggtattggtgcatctcgaagcttcccacaaagggaaagaagccgggtgccagatgacatcctgaggccattcatgggaagcctagatgtggcaaagctgcagggacagagagcagatgagaagctgctggaggcccagtcggggtgtggttgactgcagtggggatgggagagttttggggtgctagaaaggcccagtactatgatgtggtggcttcatagcttgccacagttgtcagaactcagttgagtctttaaaattgtgaatattattgcttgtaagttatgtattaagtcttttaaaaatagatgcaacacatacacacatgcacttacttttcctattaaaaaagctaattgggctgggattctgtgagaaattgtcaggcttgtcaggaggtaagagtggacgttaggtggaaagtaagtgactccattttgatcatgctaagtttgaagttacatcatgtaaaagaaaaattaatgtcagtttgtaacctgctcttactcttgctatctgaattcttgtttagagacaactggtttttttttgttgtttttttggttttttttttgagacggagtctcgccttgtcacccaggctggagtgcagtggcacgatctcggctcactgcaagctccccctcccggattcacgtcattttctcgcctcagcctcccaagtagctgagactacagatrcccaccaccaygcccagctgattttttgtatttttagtggagactagagacaactgttttaagctctattttttaaccttactctttttccccccttattaagctctgttttgtgacaagctccaatcttcccgcttttaattgaaattattcatgactacacaagataattccatgagtaggcaacaggttgtacgtttcctaaattacttcatattcgtggcctggcctcagagctgtgctttaagaaaaccccgtatactgtagtccaaaccagtaggttaatgagcagtgctcacactacagatttctcctttacacactcgctgtgtagctctttgaaaggagggcacagtgctagtgcattgaatggttatttcaggtcagtaagtcttcaagtgtgcatggcagtgttagggttctgtgaattaaaagccaatctgtagagaacaacaatgcagaaaaggggaatgggaaactatgtagtaaaagcttgaatcttccgatttctggtcttgtgtgtgtcttaagcactgtgaaggggtaaagcctccaccatcagggagtgtgtgatgtgctgaaagaaaacagagaagagaaagtgccagaggctttttctaccaactgtgagtgagtgcattcagagaaggagccctggatgtcagggtagctgtggcgtgctctagcgcaggtgggcccagggaccacgggggaaaccgggtcagggaagaggcaggagggagctttgtggcaaagccacagattagaaaatctccgagtggcgtgaggtcgggaaagtcaggatgttaggtaggtggcaagcaggcaggggaagcctgcagagcccaggtctgagctccgtgccattgggagcctgggctccacatgctgctgggagcaggggtggttattgatggcagttgcggctccagaggtggacagaagggctggagcccacagtggggcacctgtggagggatgacactgcctgagatgctcactgcgccccaaggtcccgtgtctaagtgcgtggcacgctctcggggaacttcagaaggtggaaatggaacatgggggaggtcagcccagcagacaccaggagtgctgtctgcggggactgagttaaagtgggaactgggcacagccctccccgggagtcrtggaatcatgcatttgtatacttgcttggctcggtgtagcactgtgaagccgcttcactgatggccatcagggcggggagcacgcctgggtcttctggattctccacatgggctgtggctcagtggaggagtctgctgtgaaggtgctgcctccctcattgatgcatgcactgtcaggcccaggaagtgtctttctaagcaccactgtaatttgtgtgatttatgtgcttgtgtaagtcttttgctgaaattagtgaaaatgaaacaatagaaaacaagtatagggccaggtgcagtgactcatgcctggaatcccagcactttgggaggccaaggtgggaggatyacttgaggtcaagagtttgagacagcctgggcaacatggcaaaacctcgtctctacaaaaaaaaaataaaaataaacagaaatcagccaggtatggtggtctgcacccctagtcccagccacgtaggaggctaaggcrgaaggatcacttgagcccaggaggcagaggctgcagtgagctgagatggtgccactgtactccagcctgggtgacagagccagaccctgtctcaaaacaaaaagaagataagtataaagatcactaaatttcagtccatcaagaaatggtttgaaaactctaaaaacaagttgaatctatttaatgtaaactttggaggggtgcaggagaagctgcttgagcaaaccaccacttcctagcagaattccttaataattgaaaatgagaattaggaaaagggctacccactaagcaggttattagtgcgtctaaatatggtcagcctggaaataggagatactttgcaaaccacagtgctcctgtactccccacacttggcgtggacggctaattctggatgttaagataataacataggagacaagttgcatcaaaccttttaattatggccctgaatattcctttttcttgtttcttttttaggtctagaattacggagtcaacaaagcaaacctcaagatgcctcttgtctgccagcgttgaaagtttccgatattgaacccaccatacctgtcacagagttggacgtggtcctgacaggtcactgtgaacgctacgcttttcccrggtctcgggttccttgggggaattaaatgtcactcctcacagaagcagtagagtcatgtcttggaggttttccctgaaacacttgagcagccctgtgcgttcatagtctcgctctacacgattcttctgccttgttcttaactctcggtggtgatagactccttcactcagtaagagcccgtgtgtgtgtgtgttcctgagaggggtttgatagggcgctctgatttcctgcttctagaatcaaatgaggatttgggttacgctgtgactgtgtgaagcgcagttttaaaaatcgaggcgtcctcagagccctttttcctaatgtttaccctgccatcagcatagaggaagcagagggacgagagcccccagaaagctgagtgctgagttgaaaggaagttggagaccaggtttatccccctgccgtgtcctggcatttcgttccttggcacgttttgttccgtgacacgtttcattccatggcaccttttgttccgtggtactttttgtcacgtggtctgtcactgcttttgagttctcagggtgccccctttctctctggctcctggctagtagcaggagaggcacctttggggtaacctcacctgcgacagtgttgatgctgagcttaccagcgggtgtggccggacgtgactgagctgagggcagcatggctctcacttgcaccttgaggacggggatgggatttcaccctgggcatccctgtgtcctgtgaagcgtctccagcccaccttttgtcttctgacagcgcttgtcatgtttgtatctcatttattttcatgtgtgtgtgtgtgtgggcgcatgtgagtggaactcgaggctgacatctctctgatctgttaaccctggcagtttttgtccgtgaatctcattaagtgtttgctaagagtgagaataaatcagtcatccttccgcaccttggtccctccgctggtctagggtgctctgctaggtagggacatatgaagctgaatgtccagccctccccttgaggtcaggatgggtgggtgggggacaccaggagccttgtttggggccctggggcagccttctgttgtggggccagagggtggcagggcctgttggggaagatgagcagcgctgaggacgggtgcgatgtgggcccaggggtctcgggggcacctggtcagagttccctctggttgacggggagaggttgggtaactggaactcgcagttatgagaccagaagttcgtggttccatccttcckttcccattccttggagagcacgggttgctttactattgaagacagttccagtttttagtcatgaaaatatgattgggaaatttatataaactctagtataagtcttaaacctccattcttgaaaaaacaataaatagcattgtttttaaatattacaagtggttagaattttactggcagcaataaaaattaaatcccttttgtttttctagctggagatatccctgttcagtactgcgcccagcccaccaatggcatggtgtatttccgggccttctccagcctgaacacactccccgaggagctgaggccctatgtgcccctcttctgcagcrtcctcaccaagtacgagtcgcaacatacccttgtgtgtcttattaatgtctgctttgtgtgcatatctgtattctaatgcatcagtaggaattaccttcagtgaatcacaacttacaatgttagtgtgtaagtatggtgtacaatatattggtttagaattttttatgaaagtaacattttcttactatattacattgaaatagttatgaatctacggtataatataaggagatacttatagatctccatctcagcctatgaagctttggaaaggattgatggtttaatccgaaartgtaagtaattggatgtgcagtgtggcctggggctgccttaggaacaggtgtgcctgctgcgtgcgtggctcctcctccaagccgaccctgcagttgctgtcgtcctccctaggtggggtgtgcacagatctggaaacacacacacgagtgcacacatcaacacttgactttttgcccagctctgccgtggccgaggttgcaggacaagcagtagacagggctgtgggctcctgttcccatccagaataatagggcgacagggaaccctgcagccagcttcagggaccactgcccaacctgacatgcagctggggtcttccctytgtggagatgaagttgtctgcrtgctgcagaaagctatgtggctgtgacaccttctgcaccctggctgagggtccgctcagatggaaaaatgtcttcagggttttgaaggttccctgcctttctttttaaatatagctgccactgttcatccttttgtagcggtttagaaaacacctcatggtcattcccttgactcaattattgctggcattagcagtgtcactgtgaatgtttctttcaaaagcatgagtgctgagaggaaactgcttttcttaaaaacttaaaaaacctttagtcttcggactcccccgcccaggctaccagacattcgagcaaaacaaaggaagtmtgtatcacggtgatctgggtgaagagagtagggagtagtcataaaacatttattgragagcttacaactggaaatgcctattttagaatggtgttttaagtgcagacactggctgcccaagtgtcttgtgcctctggacgctaacttcctaggygggagaaactggggtctccctggggaagggggcacatgaactctcgagggcgaaggccagagtgcacctgcttatgaccttcgaagtgtagagaggttggcaaagccgcagttattgaattaatggaagcaacttgtaactcaagatgcacgattttaaaaatgattcagtaaagactgacttgtaatcggggcgatgcwtctctgctgtgtcaggctgggctgcggccttcttgactaccgggagcaggctcagcagatagaattgaagaccggagggatgagtgcttctccccacgtgctccccgacgactcacacatggacacctacgagcaggtagcctggtaccgtcagacgactgctgcggtgggaagcttttctccagtgtctgtcactgttcrattcggccctaattcctttcttctgtgttttcyttggttcagggtgtgcttttctcctctctctgcctggatcgaaacctgccagacatgatgcagctatggagtgaaatatttaacaagtaactttatttkcaagagttgtccattcttrgggtgtactagagatctttgtttgaagtactttaaaggagacagttttactcgtgtgtgttgttgttttccaagtctgacttttacttgtagttcatatggacttataaaatttctttggttgttaaagtactstgaaaacttaatcaactttccatgatactgaagggacgtgaggaatgggtctccaggaattttttcttctcctttttccatagcccgtgctttgaagaagaggagcacttcaaggtgctggtgaagatgaccgcccaggagctcgccaatggaattcctgactctgggcacctgtacgcatccatcagggcaggccggaccctcacgcccgcaggggacctgcaggagaccttcagcgggatggatcaggtgggaagcttggaaggaacctctattactccggtttagccacatattccagagttactaatttctttgggaatacattaatttatgtcccagaartgctaactttctaactgactaaatatggggaagaattggttggttggttttgactcatcttcctctttgtaccaccctgcatcccagttccagccctgcccaagccgtgcactcgcacacataacccctgcccaagcagggttctgatgtcacaggtgcttggttcagactcagcgggtctgttgtagcctctgcctctctctgagcgagtttcctctggcttaggtgcggctgatgaagaggattgcagaaatgacagatatcaaacccatcctgaggaagctcccrcgtatcaagaaacacttgttaaatggtgataatatgaggtgcatgtgtgatttgtttctaaatattttatgattcattctattaagtatagtttttaggtatttcttacttgtagaaacttcaagatagagtgcttggtaaaggttatagaatttattgtaaatgtcaartgttctaacaaactaagaaaatattttaagcctattaaaagttgtaggagatggggaagaaagcaggctaattttgtgctagaagtgcaaatagrttgagggcaagtagttatattgcttccaaaagcacatggtccgtaactgaggtatctgtaaaggtgagcttgctgaagaccasagtaaaagtgcagtttcttataaaattatgtgatgctttgaggaaacatctggcagctcagtcctataccttcagttggccttatgccctcagatgtgtgagcatgaataaagtttaaaaatgattgtttattttcagcatcttattgtcagtgacattgatgtattcatcagtacttaacaagaaaatgtttgctgaagtcacttgtccttcttcacagagagtcctgatgcctttccccagtcatgtcctgagaatccctggcagattctacagggcggtctgtgggtggccagaggtgaagcctggcgatcagggtctcttggcattgggctcaggcaggcctggcttctggtgccgccgggtcagcactcacactcgctcccaggcggtcctgggcagctgacccacttgcgtcttctgcttcctcctccataaaaccttcctttgcaggtttatcgtaaggaataaaagaaagaatatctgcaaggcagcatacatgcctgggatatagttagtattaatataatggtacctgctgttactttaactagaataagttcaggatttacagctgaaaggaaaaaatatacactctgtcaatatactgtagagttcaagtagcttttatatgatagtagtatttgcaattctgtggaatttggaagagttctattttcatgtaactttgagagcatggtatttttttgcactttataatgttctgctttaacaaccagttcacattttcaaattgatgacttctggacagtaattttaaaagttgtcagtgttttgatagtgtaattccgaaggcacggttagcagatcttaatagtctctgtattttctttgctcttcagaagaactagagtttagagtcacaggctccgcgtatggacggcttcattagctgccacattgaactgtgcggaaatctcttgataacctgaagcactgmagagcagggaggcggccgtggcatttccacatttggctgctgtttaacactctgaacagtattttctataaaaacaacattattgagttatacaaaatgtgatgaattactaaaactgttttttctaacagtggttttatgtatacrtaatttttcaaacaggtgttcagtgaatgcgactcctcagcagatgcctcagacagaaaaagcggtcgaagacttccttagaagcatcggtcrgagtaaaaaggaacggaggcctgtgcgcccacacacggtcgaggtatgcactggtggtgctggygcccggtgagcgcctggygggtgccagagcagctctcatgttttacacgcattaactcaattctcagagcagtccagcatgtggsggttcatatcccccrtacgcagatgaagaaactgaggttcaggaggattaagtatcttgtgcagtgttgggccagttaagtgagttcagaccctgcggtgtggccttagatcccgcgctcacttctgtgccttgcagtgagtagtctgataggaaaacagactttggctggaatacgctggcagaggaatggcccaaaccgtagcctgaaggctgttcactgctgtttctttgactcatgaatccatggatttgacatggaacagtgatgtcggtgataactaacttagtaaatttgattaacttagagagttgtagtctagttcatggatgtcagtagagaagccgtgctgctccgtggaggaggttgacgctcatgtcttctccgttggtgtctgcgtatccctggttcaattctggatgtggtctctctgttggcccctgggagtggagcctttgggaggtggcctcctgctgctccaggcccctctgcctgcaaccctttcaccttaaatgtcctcttgatttgacagattaatgacaagaaagtgcagaaagaaaggttaaaatattttctttgtaccatataacaaggctaccttttccttgactgtctgaaaatttattttaawattttcttaatttcttttactcactttatttctttttttagtttttgttattttgagacagggtctgtctctggcactcgggctggagtgcagtggtgccattacaactagctgtagccgtgacctcctgggctcaagtgatcctccaatctcagcctcccaagtagctggggctacaggtgtgcaccaccatgcccagctaatttttaaaaattttttgttgagatgggagctcactacattgcccaggctggtctcagactcctggacccaagcaatcctcccacctcagcctccaaagtgctggcattataggcatgagccactgtgcccagcctatttttattttttttaagcgtttattatttaaaacacttacacctgccctaacacttgttattagctgtgtgaattttataaactctgttacttcttatatatttcaagtgagttctggatttttctcttttctcttggaaacttgattttcagaaacctgtgcccagcagctctggtggagatgcccacgttccccatggctcccaggtcattaggaagctggtcatggtaagaaccacagcccatccgggttsccagcgggtgggtgcttccctgcatggctgtgtctgccactgatgttcgaatgttcctccgtccgcctgtctgtggggctggcgtgtccctagagttgygagytcagtgcatcctttgtcactgccaccctgagccttttctctctcagayagtactgagtgaaggccctggtgggggtgtgtcctcctgtgccgaggagggccctggtatggggtgcgtcttccctgtgcccaggaagagggctactgctctgggtggtctcctcccgggcaactcacccttctttgaacgtagctcccgagctgagtcgatgccagtggagcggtctgacagatcctttccgcgactcagcctggtgctgatgctgtttggtttggttccttgtggagtagagtgatttaacacattcctatgatataatatgatatgaaatataaatatgtaactgtgatataaacggcgtagaatgaaatgtttttaattgaacagtatacgttaaggcatcacgtcaagattggaggacttcatgtcagttttacagtgagaaattgtgtggagtgacggaactgcagtgccttgctctcgcgccccagcacctggctgcagagtgtcacggagatgggacccctgagatggctccagtcccagtgccgtgggcrgtgcrtgggagcacagccgcctctgacccctgagtgggtccagtmccagtgccgtgggcggtgcatggcagcacagccgcctctgaccataccgtgtccctcaggaacccaccttcaagccctggcagatgaagactcacttcctgatgcccttcccggtgaattacgtgggtgaatgcatccgaactgtcccctacayggacccagatcatgccaggtaggagggtgtaggtcgggacctctcaggcctgagccttayggaagagcttgtcaaggctgttcgagttcacagggcgtgttttagcacaggaaaagtctgtgctgactctgagtgttggacctggggctgtgtgagtctacgagtgctcctctttaaccagcagtctttgtgaacagagacccagytttagagccagtcatttttgtaaacaatttctattattgaggagtcctatgaacaatacagatacctatgaccttaaacacagactgctttcaacatgccccatgtactcacctcatctctaggtaaaaatcgaatttaggctgagatttccgataaacatggtaggttaagccttcatgaggacagatgcgtgaatgacagcaaaggcagatcaagacacgaagctacaagggaaagagtgggaggtgacccggagagccatgggggctgcaggagaacctcgtgagccagactctgggtgggtggggggtgcctgacctggggccacagagggacagggcagtggggagaaaccaggtggtcctgcagagccctgcagatggcagggctggaggccgcctcacagtccctctaaggagtttgtctcccctgtctccccaccaagtcagaagctcagggaaggaggccctgggttgagcagccgaagccacagccaagagtcagggtcaggcctgttcccaaagtggcgtggggcgagggagtttgcagcctacagactggccctccagccccttcttccgaactctggctgccccttggctgtgttcatcccatctggggaaactggccagaccaggacagactcacagacgtgcacctttggggacccgtcagttgggtgtgtatgacacagatatgtgcaaacatgttatatcccggaaattcacttcctgtgtccttgtcccaggcagctacccccatgagggactaaaccaaggagtgagcctggtagagagggggaaggcaggcttaggcctgggcagcctgtcctgattggagaaggagccgggcctccgaggtgcacgtgtgtcacagagggccacagatggggaggtgtgtaggaggcaggcgggaagaaacgtggggctgcagtgggggcccagaaagagctggctgtagaagtatgtggtcagctgttttgttcatttatttccatatttgtagaagatgaacagatctgtctgctatgccggcagaagagtggtgtctgtttccactatccaacaggaaaatgtagacagaaaacactaaaaatgtggaggttccccctgggcagtgggattccagatctttttttccttgtgttttgtattttataatctttcaaaagtgagcatgtttttaatatacaagtaatagaaatttctcaggaaggataatgtgtggacggatggaacgccatccctgccggtgctggtggagactccgtcccccagggtctgactccagcctcgctagtcccggctgacggcgccccagccacccgagtggcgctgggtttctcctggaggacccacacgagatggtcgtgacttctcccaccacagcccctgggaacacgcccactccttccttgatttcccacctggcctatttgactcccttcatccactttaggaaaaggcctgtctgtggaagcggcgacctggggctgatctcaccacgggcgtcttcaaggagcctgtgtctgtgctgcagaccctcccatcattgtctgccccgccttctgtcggaggtggatgtgttctagaatcagcttgaatgtgatgttaccgttcacagtggaaggcagaggaaattggccctgttcctagaaatgtgctttatcagagagtgtgtgttttcttaagggattcttataaaactcacttcagtttcctttctttccatattctgatgtgagacatttaaataaatgttcatttgctcatttgcctttataatagaaataacctctttctacttcacgagattttaaaaatgccacatgtgcattggaacaagttaagcagtgtggtgctggaagtgttaagattccctccccaccacctctcccttcaaccctgtaatctaagccaactgtttgaaaattgtgcttccttgtgctttttagttttggttaattgaaaagaaaatctcatgcctgtaagctcagcactttgaaggcaggaggatcacttgaagccaggtgtttgagaccagcctgggcaacaaagctagaccctgcctctacaaaaactgtaaaaatagtcaggcgtggtggcacacacctgtaggcccagctactcaggaggctgttgtgggaggatcccttgagcccaggagttcaaagctgcagtgagctgtgattgcactaatgcactccagcctggcgacagagcgagaccccatctcttaaaaaacaagaccaaaatatgggaccataatttatgcagcattattttacaactcgattttcattttcacttaatccaacaattacttcattgtctatgcttttttatcagccacggtattaacttgcattttttaatcatttcagtcttaaaatccttgcacgtttgatgactgccaaattcttgcatacagaaattcgagaaaaaggcggtgcttatggtggaggcgcaaaactcagccacaatgggattttcaccctttactcttacaggtgagttttgctctagttcacacattgggatgcacacgtcgttttagtcttctactcwtgattatyagtgtcattttcttctactgcagtgaattttagacaaaagttgttytgtgtgcttcttttcactccttgggcacttagccacacccagcaatgtcctttctggcgcgaggattagggccagcagcckaaacaggaagcattctgccttcagtaaaccctggcttcagccagcatattttggcagaacacggtagtgcctccatccgtgggtttgccttccayggtttattacccacagtcmccctcggtctgaaaatattaaatggaaaattccagacataaacacttcctaagttttaaattgtacaccattcttctaagcagtgggatgaaagctgacgctgtctacggtacctgcctgttggtcacccagtagccgtctaggtatcagatacgctgtgggtatccaagagcttctgttcacagaacccttgttttacttaatagtagcccatcagcgtaacttttattacagtataattgttgtattttgttaatatcttgctgcacctaatctataaactttatcataggtataggaaaaaaacatagtatccatagtggctgtctgaggttgcagccctgccgtgggggtcctgaaacacaggccccaggtgagggggctgatacagcctgagagcgttcttagctcatttcagttggaggtgcctgatgtggatgcagttctgttagctttcataaacataacaccgttactgtaaagcaatattcttgattttctatggctttgctgcctaagagaacatgtattccaacagtttttaasaaggagccagccrgccgcagtggcaagtgcctgtggtcctagctacaggaggctaaggcgggaggatcccttgagcctggggaggttgaaactgcagtgagcagattgcgccactgyacaccagcctgggcgacagtgagaccctgtcccgtggatgcatagctagattaggtaggtaggcaggcatgtaggtagatacgtaggtagccattgccactctgatgagttctcccccttgctgtgctggaagccatgcttctagacaaggatggggaagcagctcacagccgcccctctgcagctcagggtgaagggagggctgggctctttgcatttacacgaagggaagtctggattggccccctcaggctgattcctgtactaccctgggtgtgtcttcagggagatgaaaggaaaacctttgtttgcttaatttttccatgtaagtctttgtaatttccctgtaatcctgacctgcccctaccctccactgactttcctctcctgatgaggtcacagagaagtgtatttaaataatctagggaggactttgtgcagacagaccttgtctaagagggagaacrtgttgaaaggcttatgtgatcagatttaaatttccattgagagtaattgagcgatttgtcagtgggctgtttggactaaatcagatataaaatagagctgttaacccatagaagatgttgaactgttaagtcgacagaggtttgtcataaayttgtccaytggtaaaatgcttgcccgtttatttctctgggtttcctagggacccaaatacaatagagacgctccagtcttttgggaaggctgtcgactgggctaagtctggaaaattcacacagcaagacatsgacgaagccaaactttctgtcttctcaaccrtagatgctcctgtcgctcyttcagacaaaggtattttgagtataacagtgagaatctcaacccacagcctcacagatgacgttgctgttttccaagttcccggcatgcatgggcaggagcacyagcttctggtgcctccatccttgcttgtgatacgatttccacgtctgacacyctaaacacgcttcctgacatccgggcgagaagagtgcatcctgtcatttgttttactgacctgagacccagtggggccaacccatggcagtgtccgggctctttagggtggaaggaggacgtgggcacggccygggcatggccacgttactctctggagccgcttttgctcacagcatcatcagcctcacgyggcgctgactgcatccctgctgcagaagcaggcgtgggtaggggtcagcgtggcacgtgggagctggagktcggggtgtgatctctgggttgttagacacatccctgtggttgaaacatgcacgtgaaatgacagtgagatgcctgtgtcccctccgggacatgagtgcacagcccacaacgcgagctcccgggcagcggctccatcgtgcctgtggattgtcttctaggaatggaccacttcttgtacggcctctcggatgagatgaagcaggcccayagagagcagctctttgctgtcagccacgacaagctcctggccgtgagcgataggtgagtggggagcgggggagacagcgtctgggactggaagccctcgtgctgactctaacagcgctcacgcagaagccagtcctygctgaccacgcctgccttcctctcagrtacctcggcactgggaaragcacacacrgcctggccatcctcggacccgagaacccgaaaattgccaaggacccatcctggatcatccratgagcagccgtggygctcgactgcacaggagcccgagacaatacacctccragctgaatatgaaaagtcagaaatgctactgctttttccaagaatattatgtcattgagtgtcgccaaagcccttgactggcgagtcaaaaactcagatctatyttaagagtgaccaggaagaggttcattgaaataatcatgcatgaagcgccaaagatgcmccatgtagaattttcmctttgtactggcaggctcgttttacctsattctagaatatttaagaatctaaaaataaagggcaactctgacttaacctctgcttgagtcattattttaagcagcatttagggcctttatttaaaaacagaagtaaaatgaaaaggtgcacaagggtgtcccacgtctgcctgcgctgattcaggaaactccatcacaccgaggccctgggggagtgtccaccagacgggagttcaccgcggcggctgcatggaaaccgtcctgagaagcaagtgggttggggtgagcaagcacttgcttcatcgttacagagccagaaaggaaagcctccgcgctagctctttcttggctgtcggactctgatttcccaaacagagtttgtttttggcctctcctctccctccacccagctctctgcccccatttctgaggcgcagctgttctctcttgcagactagagctaagaggcagaaacgctgtccctacaggaggggggcccaccagggcagcagggctgtcatcccagcagccgtgtctactctggcaggagtcttccggagagttccaacctaggtcccagcgaggactgtggcttggcctggaggagaagctggctatcagatttttgaacccaccgccgccccacccaccccttggtggttttaacatgcagctaggattgcaatcaagaggacaagtaactaagattcatgttttactttcaaaggagagcaggagcctggggtcgaggcccagggtcccggcctgctgctgtggatggaaactgacacatggcagatatggaacggtgagtaaacgtggccttccccttggcctgtgtgaactcctggctttgttctccttgtatgacgtgtgcatagtttgcccacaaaactgagaaaacctttagtagccacccatagattgaggtactaatctcctacttaaaaaactaaaacagaggactgttggagttgtaggcaaatgtttaattaattctgctcatatgcacatctgaaagcatgagacacactccacagacagcacgcactggggctggtggggcagatgggcactcgccgattaggtattaatgtcaataatacgtgcataaagtgctgataaaataacttaagtgttacaaaaacagacagtccacggtggctgcaggcacatgcaggcgggactgggtcagacactccagggctgcacatgttccagctggcctgagtccgacacgtcatagctggccttgtacttggccaggattttcatgaggggccgtagcttgagccaccactgttctttgggaatcctgtgcctgtggaggtaagaggagacagcagtgaggcctgcagtcactggcgggagatgcctccgcctggccagcacagcgagcggtcttgccagaaacacagggtttgtagggtcggctgaatcaactagatgataaagccaatttcaggatcaaatgaaaccattgtttaaaattattcccgaagacccagtggtggagtctctctctgtcgccaggcttgagtacagtggtgcaatctcagctcactgcaacctctgcctcccgggttcaagcgatttctcctgcctcagcctcctgagtagctgggactacaggtgtgcatcaccatgcctggctcatttttgtatttttagtagagatggggtttcaccatatgagccaggttggtctcgatctcttgaccttgtgatccacctgtctcggcctcccacagtgctgggattataggcatgagccaccgcgcccagccaagacctagtatttttttaactgagcttcagaaaagccagttcctcaaacccctgaatgagttgccgacagcaacagcaatggccattcccctgtcccgtactcacattggggtcttattgcctcagggaacccagccaacttactcaaaatccgtttgcttcttcagctctgccacaggttgaaaaataacgtttcttttgcttattcccagcacacaaatggaatcatcggtggtaaatttttttcctataaaagattttaaaaaagattaataacaccctgtcaacatgggcaggtgggggagcagaatcacggggcgagatgagaactgagattcctcagaaccatgctgaacccggcctggaagcccagtgagactgagaacagccgcgcagtggggccagcacctggcctcgtgcagctctgctcctgtgggactgccctgagggcttcctggaaagcagcttttgttttttcctcccagtggagagaatttttcactaaatagtggaatagggaaattagcttaaattacagcaggacactaatttatgctcacacatacacacacagaggcaaaaagcatccatagctaaattagcaaaagaaaatcgctgtagaaagaatcaaagccaaagtcagttcttcaaaaagacaaacccattgaaactattcacatcactggtttttatagactgtcatttttctaagttggacactggcagtgatagtggtttgccggaataaaagcacacatctgctatgactgattaagaaagctgaggggggtgggggtgagaaagatgctggcacaaagagccactcaggaatgagtggggaacagccatgttggaaccattaacaagagtattataaaaaagtcatgtttcttgaaacttcagtttaaagatttcttagaatatgtaacttacaaaactgatttaaggaagaacatgcacagttctacgaacatgcagttctacaaacatgaacaattcattcagcagtcagatcttcctcaaaactggaagttttgatggatagtcacaaggaggttgtcctagcaaacattcaaaaaatagaaggccccacttaaactgtgaggggaaattgctggccaacgttcaggatctctagagcaaaaagcctgcacaaaagaactgcagactgcatctagcagtgataaaagagaacatgtcatacccaagctgatcttatcccaggaatccaaggttggttaaatagcaacactcagagatcaggagtaaaacatcacgtgcagctcagtactgaactgaagaaggaaccagcaccctacttctccccgataggacagcattttcaccaaggcaggacggcctgcatcacgaggctgtggcctccctccccagaccccttacctctgccccgggcctccttgagttttgcagtgatccactccatagctctggcagagattttggttccaaagtttctatcaaatggagagggtgccccaccctgttggtggttagagttatatgaaataccagttatacagtaacactttgctgttaaatagaaatgacaatttctattttgcagaattcatgtttttatttctaggtccttatagttggaacagaacaaaacctgtgattcccgtagcctgaacttggcctgttaagaaaaagtatcaagtgttccccccgctcagtaagatgaggattttaataaactgaacaagtcaactaacaatcttcattattttaaaatcttaaatcaggatttcatgaactcatctgagctggggatgggtcacagctttaatctgataaccgttgtggattctttaagaagatcacacatatgcctactatttcatcatcattgcaggggattcatgggctctggcttaaaagtataagaataggaggtggtgaggaaggagtgtgtgcaagttaggaggcctggaccctgtgtcccaggctcagctcataacacgtgtgtgcctgtgtgcagctcattccaggtcattctgacttggggtgtcaagtatactacatgtctgataatccattttaaatcttagggaagctccagtttttaacttgatgaagtgtttaatttgaataagcatttccaagtaatgggggtatcactgttttcatgaaagctgacagttcccttaaaatccccattactcaaacctcaccaacaaaagaatcctaaagctggtgatgtttggcatcacttaaaagttcagatgttttggctgggcacagtggctcaggcctgtattcccaccactttgggaggctgaggtgggtgaatcacctgaggtcaggagtttgagaccagcctggccaacgtggtgaaaccccatctctactaaaaatacaaaaattagctgggcgtggtggtgggtgcctgtactgccatctcctcgggaggctgatgcaggagaatcacttgaacctggaaggtggaggttgcagtgagccaagcttgtaccactgcactccagcctgggcaacagagcaagactctgtctcaaaaagttcagatgttttttatcatcttggaatttacttatacatttttccccacaatggctaaaataagacactaatcttttaaaagtcacatgacagtggctttgtggcccctcatgcagtctcgggcctacctgctgcatgtgacccagcacgttcttcctgcagtcaaacacgcctttgccctcttctgaatacagctggtaaatgaagtcggtggtgtagttttcactgcagctctcatttctgaaacgagcgagaaggagtcactttgtttagcgtgcagtgggcacgtggctccctgcttggggagatggccctgggaggctggactcccgcatcccccaaccctatggtgattctacatcaacaccagtccctccagttcacggttttgctttctgcagtttgttacccatggtccagtggtcaactgaggcccacaaatattaaatggaaaattccagaaataaatatgtaagttttaaattgcacaccattctgagtagcgtgatgaaatctcgtgctctcttgtctgtcccacccagaacgtgaatcatccctgtgccctgcgtctccatgctgtctgtgcctcctgcccgagtcactcagtagccaccttggttatcagatggaagcaacctcgtgtatacagggggcgggtactatccccaggttcagacacccactgcagtcttgggacacagtccctgaggctaagagggatgactgtatttccttctttcttcataaacatcaggtgctaattagggaaatgattgcaagatatcaaagaataagagactataaagcaaaaatattagttgtctaaatgcaggcaagcctttagagcaatgcaccacagctgtcttctgcacctgctcagtgtgtgtagtgcactctagcggcaaagaaatgaccactcatccagcccaagtcacagactagaatctaagaaccagggtgtggcggtgagggtaagatcagcccctggtctctctctctcacctgagcacaaggcctctctggatggtggtcttcattttctccgtcaggtgctccacgttggactggaagagagtattttgttaatcagacaataaacttctactaagtacctactgtgtgccaggcactgcaggctgggaagtgccaaccaagtgtggcagtgagcgtggccaaggaggctgcagctctcgcggcttgggtcttggggagcctcctcccagatagggaggacacgtctgcagcgatgaacgctgaggacagggcacggtgagcagccctcacggcggccactagcaacaccttccagagtcaacagggtccctctgaaaatggtaattccgtgctttgcctagtgatcattcatggctctattgctccttgtttatttgcatgacgatgttctcggtgctctcagaggaaagagtgacctgtggcctttctatggaatctcatgtgacggcctgatgagcagtgtctgaccaaagaattttgtagactcacattcatacacagatttcttaaggaaaagatggtcttagagtaagaacatccccatttcagatcatgttaggaggattacaagagggaggtaattctctaatgattcatcctaagaaaatggaggtttttacatctaatcaaatctgtcactgggcgcaatggcagaatttcacaaagtaggaggccaggcatggtggctcatgcctgtagtcccagcactttgggaggccaaggcggatagattg

SEQ ID NO: 97722 - DNA, 116552 bp, Homo sapiens
ttgttgttgcaggctgtggtgagattttgctgggaacagggactctgcttgggccagtcctcaggacccagtggatgcagtggtgggccaagtgttcctgtccttgggtctctggttagcccacatggacatcaatgttagcaggtgcaaacaggctaatttgggggctttcaagcaactctcctcaggtagtggcagagataatattgggcaaggcaggtgggtgggcttttagtcccctgggaatcatgtgtggcatgggcaatggcagtagcagtagtgagacaatccttaggcttcaaaatagtatacactggtgttaggaggagctacatcatactaggtgggccagttcccatgccctcaggtggcaaatgcaagtagttactggctatggcaatgttagcagggtgggagtcattaagccagagcaggatcatagtgaattaatgattgattttgtttccaacagatagtggtggaacagatgctttccatgctttaacatagtgagagccttgtttatcagacatgagagacatttatcactctgttgttagttttcaatgatttgatttgtattcctgatcagatatgtaggagttagtcttctttggtctagccatctctagctttgaatcatgaatacagatggagtgataaatacatagaaagacaaaagaaggtatgccatcttaatttgtaattttaaaattacattgtgatttaacatttattacatcattgttttcctttgcacttaaaattcgatgaaatacatattctccattgactatatgggctttaatttgtatagtctacattaagtacctgccccttgtaactatatttatcaagtacatagactgttttcttagaaatattccctagttgttgagatttttttcattagagaaaaagcaatagaatttcatttttattctggtcagagaacaactttttgtaatttgagaatgtctaacactagatggcaggatgacactatagattcctcaaaactgtaaaaagaaagatgtgacactttctcaaaggtgttaagggttcctaggcaaatccatcatacatttcaatatatgcattacatacagttccatagtcattaatgtttaaagtctcactgtatgttattgactaacattaaatatgaataagcttttaaagaaaataaaaatataagttgctaatgtttttacaagttatataaatatgatgatagctgaagaaaatagttcgttataactggaaagacatgaatactatttggcatctttagaacttaatgattaaattatttatgtaaaatatagggattggtcatttaatcaaatactacttaagtcgaaatgcctaaatacaaatataaataaaccttttattttcacaatcaagattgatatttagcaaataagaggcatttcagaataaatccacattaaatgcatatccagaattaaaaagggcatcttttttgatgctaactaaaaccatcctagaaatagtaagaactattttaaactcttctggaaagaagatttgggtttcccaaataaattactcacacactcttagtatttatgtgctacttgtcattgctctattgataagtatggctaagttcaccatatactgaataatatttttttcttcaaaccagagcatttttgagcctgaaattatgaattgggactgccccagaaaactaggacatatgatcactctattgaaggtatttcccctcagaaagttcattgtgtactcccatttaaagtaagcatttataattttgttggatttaaaaatccatttgaattagtccatgacatagctcactagccagtactagcactttattctagcaatagccacccctccaacactcatgaatatctgtaagaaaatactaagttcgcaggaagatctaaatccatcaggatataagaatttttaaaataggcaaatgtttggccaattattttttatgttacttggctttcttgagaaaatacattattaaatactgaaagaaactctacatataggctataaaatagttttatttatctgtatattaacctggtatacatttctgtatatctgacctgatatatatactgttcatttcaaacatagttttctgcaccttccaaattcttattcatagtaactatttttaaaataatattgtaatcttctttaaaatgatagctatgtgcccaattaaagtgaaaaacggccctttggttttagtaatagataatagcatattcactctcatgtcccagacattgtacccagattcttttactaaatgcaatttatttttgttttgaaaagcaacttgaaaagtgctaacagcaattgctaggtaaaataataaaaggttgggtcaacttatttccttgctagaagtagttttttaatgtaaagcttttaaacatataagcttctgatgtaaagtttatgtgtttctcctcaaattattggtgcatttatcataaggcaagttatatataatattgctgactgcataaattatcaccaagtataagtaattgctttcagacaattaagaacacagaagaattattaacataaaataataacttttaaaacttcagaataattattttaaaagtctttcttttgacttgttcttgcactctcactagggaaagtctgtccttaatatatttcctgtaaaagtgttctgctttattttgtttgttcttgtggcaagaattatgctccaaggcagtatccatacaaattcaaaataagtggtcagtttggtcagtagaaaattaaatttgtcaaaccacattttggtctggtttaactaacatattcaatataaacagtagcccagaaacttggagttagcctactcctaattttgagtcaacttgcatttgacatagtaactagtatcccctattggaagaaaaggtcgcttgtgagccttatgtgtgagcacaaataaaagcacaaatcctgcatgtaggatgctaaaatgaaaatgtgtgactgtccatcattacatgtatatatttctacacttatacaccactcctcacttctacagaaaaccttattgcagtgctctgcatcattacctctagattctatgttagcagcatcagttgctaatttcacagaatttggcccttgacttctcatgtgctagtcaatctgttcattaaaggactagatagcagggaacattctatttttacttatctcactaaaacacagttagcacattacctagctcaaaatacaaatttggtcactactaattaaattattgcaagtggctttaatgtcttctgaagaaagattataatatataaatccatataatgccacgttggctcaaaattgcttcattgattattgaaatgttttcatttagctctgctacagttttccaaacatttgccttcatgtttcagtaggtattagagaagtttttatgatctatcttatcacttgctcctacataacttagaataccctgaatgccttcctggaagtccttgtaccatttattttttctgaagtttataaaatggcagctcttgaggattactaggatgcaattttcctgttatgtctaaataagaattaaagatgatattaataaaatttatcaaggagtcttcatggactacagccatgggcccatgtgtacgtcaacttaaatataaatgatacaacttctactagacaccccataaagtatagcacttgatagagagtagaagagaaagagcattggattaagggtcttatgacatgagctcaaaacatgaatttttttccttcagtagaccttactagtattgggcaaatgaaatcaatgaatctcaccaggcgcaggggctcatgtctgtaatcccagcactttgggagaccaaggtgggcgggtcaccttaggtcaggagtttcagaccagtctggccaacatagtgaaaccctgtctctacaaaaaaatacaaaatgttagctgggtgtggtggcgggcgcctgtaatcccagctacttgggaggttgaggcaggagaattgcttgaacccgggaggtggaggttgcagtgagctgagattgcgtcattgcactccagcctgtgcaacaagagcaaaaactccatcaagaaagaaagaaggaaggaaggaaggaaggaaagaaagaaaaatgaatctttggaaagacgaaaatatcaatgcttttataaacatattgggaaaagttttagttttccatgatttaattaaattcaaaaactatatattaatctctttataggattcatatattacacttagcatggaagatgagaagacatgacccattattactttcatattaaatctagtatttgtttttctctgaatttcaagatgggaacatgaagcctaaaaagctttgtcaagatcacaccagacagtatcagaaccggttcaccagtgtaactcagtttcttacaagtcttttctattaaccataattatagagatgaaagtatatctattttttatatgtctgtattttgtaatcaatattgatctcactggtcttaaaatcaaagattgtataaacattttcttccactaattcagacaataaaaatgtcaacatgagcaccctgctttaaaaacatgatattcctgaatttattttgcctttacctcctttgtctgcctacaaggtgtatggcacctcattttatcctggaattgcactaacaatttactaagagttgaatgatcctcaccgtatcttatctatttcaaaatgttatgaaatttgtcgattcaaagccttagacataaaatctatctcttctagtttatagatgagaaaatttatgccctgataaattaagtgacttttagtgctgtttaggttatagggattataattattgcttcatatcgaacatttaccaaattataaaaatgataaaagcattttaaatttacattttcccctgatcatatccaatgatgtattaaacatattcaggaaaaactatgctttgagatgaaattttgtctaagaaataaagtatcctttgtatttatattattttataatattatgtttacaacatctatattttctttaagattatattgacttacaaatattgtggtataaattattttatattataaataacataattataccaaatatttttaaatgtgtgcaataattttaaaattatgaattattcaaaaggctattttgtcaaatatatatacttatatattataaaagaaacactctatacacacacatacacaacttgaatttataacacatacactcatgttcttatgaagaaggtaaaggaaaaaataaaagatttaaaaactgcaggataaagtttcttgatctaattaactgattaggaactgcacttaggaactgatggaggaacagcacccaattagcagagctccaaattaagaagagccaaatcacaaaaccagttatgatgaatacagttaatttttttttctgtgttgtgctatgaacacagatttgttagattttttttcctggatactttgtaagctataattcaacacacacacacacacacacacacacacacacacacacacgcctaactcctttgattctttgagcagaatactatattcagatttccttcaaatcacaagtagcttgtttggcaagttctaacagaactcagtcaaggtgaaagccagccagctttttactggtaacaatgtattcacacagcctatgatctctctctgttcaggctgcttcttgctcttgtctcacaataagaaaggagtgctgctttcctggggtatgctatttgagaaagaaagtaacctaacactaactgcaggcggggtcagagtgatgtaacaggaagctctgatgtttcccttctgctgctgatcacttacaatctgacaacacttacaatctactcagaacaacctctctctctccagcagagagtgtcacctcctgctttaggaccatcaagctctgctaactgaatctcatcctaattgcaggatcacattgcaaagctttcactctttcccaccttgcttgtgggtaaatctcttctgcggaatctcagaaagtaaagttccatcctgagaatatttcacaaagaatttccttaagagctggactgggtaagtgcacattcaaaataaatatatttattctaagtagtattctcatatagtttggcaatgtttctattatagaatttagtagatagcactgaaataatgttgaaacatagtctcacttatttcacatgctagagaaaatacagcctactaccccaacatgaatacaaaatctaatactactagataatattgtttaccatggtattctagaaaataaatttagcaagtattaaaaatctaaatggattaaaagacatatttctgaacaaataccttaatcacagaacaatgtcttttaaaattagctctaatattagctaagcttgaatcttgacaactggaaaacatttctccccccggaagggtctttaaactttccatgttatcagctgtaagaaagaggtgaaagaataactacttaatgggtctcggagtctcacttactctgtggttgatcataatgcagagttttgaaaagtaatcactttgtatttattacatttgcttttatttgcctttcacctttatttacacatatatctgtaactactgaactaatttttgtgttcattgttgccagatgtgtttaaatctctcttctgctaaccctgaactgtttgctctttatttggatcatggtgtcggctacaaagaaaaaaaaaaacctagagtttaggaaatgtagatttttaaaacaattcttaattttgaaatctttaagagaatacttcaacttgactggttcccctctgcaagcttttggaggggggtgtgataccacgatatctgtggataaagaaacgtgacagctttcccaaagaagtatattagacgattaaacaaagaaattaaagtatttattaaaaaagaatttccaggatggaacttactgaaatgttggataaaacatctgttaatgctcattccgatagtacagactgtcctgaacaatttaagaaactaatgtctgcttaataaattgtttgtgtagatatatcacaaatttgttgctggagaaagtttgatgtcaaattttaaatgatgttgatagatatgatttttaagttatatattttcttacctaaatgcaattatactttccaagatgtcctgcattggaagcatcctgtacttaatcacttatatctggcacattaataatagactacaaacatcctgagtaactcctcagtaatttacaactcaatttttccacaaattcctcaatataatgaaaatttaaattaattcttagatttgtgattctttaagagtatcatggctgatttctctctcttttcaatcttcagttgtactgagttccctgacacatgtgtagaaatgggaaaagtgtttttagaatgtgactttagccattatataaatgggggagaaagtggaaacaacacatttactaacccaatgacgtgggttagtaacaaaaattaaaacaacattatttttaattcagattattttcttaggaggtattatattatgatcatattttataatgagaaactctccaaacttccttaatttttgtttaattgctagtcccaaacccataattttcttgtataatttgattaaatttttatgagtttactaacagtatggtttataatctttgttttccaaaaatacttttgaaaaacactaggcgatgaacattgaaggtcattagccaaaggaaatatttgaggacataactggaagtttgaaataaaaattcatattattgtattcaaaatgtgctttctttaatgataagaaaatatcagaatatcaatgcatgcttttagccataaagaaatgaatttactttgctagaagatgtttccttgtagcatcataaaatcaatgcattgagcctacagtcaatgctaaatatgtaaaatgaaacatagaattgaaatagtatgtgaataatgtgagctgaaatatgttttacctgaaatattctatttcttaaagagataatgtttttgattattgttacaagattttttttctatcttacataccaaagcattatactaaaagttaaaatatgtagatttttataatatatgaaactgttcattcactttgaaaaattggaataacaaaaacattgtttaaaataatactgggtctgtaattttaaaaattattttaaatgaatgggcaagattcatatggttttctcactggtgactccgaacatgtaatgaattttaaatgaagacaatacttagcatatttgtaagaatatttatgttcacctgcacatattatactattttttcatgcataacagaaataaaatttcataaaaaattgaaaataatataaaggtaaaatgattaccttgtttgctttacagattaatgtggacaaagtatttgataaacacataaacactaactgaatttcagttaatagcatcattatatatttctaactagatcatatytggaaacattgtaaaaatattttgctaccaattttatctacatggcaaaagtttgatagtaacttaattttaaaagattgttctagatctttatagaaaaaatataataatctttaaaggatcaaaaacttattcactaaacaaaatttatttcatactctatatatgacttttaatacagctttawcaaataattctggttttggagatataatgattacagtatcgacttttcacaatacaaatatgttcaagaaatagtatttaaaatcttttgctttattgcgtatcttatgcttggcattcagagaagctattaaaccataaacacaagcgctatcattgcaagggtgttaatgaaagacgctcttatgagagtcaagtgtgtaacgtatcttagttttgacttaatcagaatattggagaataygcttaagatagacaaatggtacacagctatttaaaacatttatctgtatctggttttcaaatccatgggtaaactataaacattcataatttctcaggtatgttctatttttctgacaaagtacatgtaccatactggattacaaattatttcaagacatcttctcgtttaatatacaaaaatattatgatgcaaataggtggaaaataaaaacttaccagaaatacaagtctacattctaaccagatggatctatccttttcccatatattcacatggaccatgtaaattagattaggtcaattaatctctgcatttttccttatttgaataatcttaaaatcaaattaatttaattataataagctatattacaaaaaagagaagaaatgtattcaatttttaaggacataataaggtcttacttcttcttacaaaaatataaaatagtatcactgcctgtgaactgagttagggtctatgtttcctaggttactagaattattatcaggtaataagttgcaaatattttcctaaaacacatttcttccatttttttcttcaattagtttgtttacttaagagacagtattattcaaaactaatacaccaaaatattattgtttgcaaaaatggcccaaatagtgtatttacttttgaaatgttaagcaagttttattttttaatgttttcatggtttaaattaaatgtgttatacaccttttccattactaaaaattaaaaagacaaaaatcccaacccagttcaatctagcataagccaaaatgaatacataaataacccctatggtattggggctatagttttatattttattaacactgctggatggagcccaattttcagacaaatcttatttcccttaacatggaacatatctttttgaattaaaaagtgttaatatgacataaacttttgtataaaactgtagttatttctctattcaggcttaggctaacctaagctcatttatgtttctcatgaaattatggtgaattttgagcatatcatttggtatgttaaattgcaatgatttacttacatagcaactagatggtttataagtgcccatctccttacagtgcagtcacatggaggatcaatagcatattcgtgagcacacaggtttggttttattaaccaaaatgaagataaatttttcttgtatccaactaccaaattcataaattttacaaatgagtgttaatttgaayccgcattcactaattaaactgagaccaatgattacrcagatattttgcatatgcacctcaattttgcctttcttccaaggataatttgaaggaaaaatagaaactttggtaagtatcagagagcaataaataacattataatagacaaagagagttaaaaccatgggaaaagaatgtcatcaatacaaaactgtgatttttattttgtacttagtaatggaaacaatattagagtaacatgtttattgttttattagtcaatgtgcatatgtctttaaaattttacttttaatgatgtatttgtttctgtcttttctacaaatataccaatgtactttataaattaagaaaaaatatgcatttattttagaaatttaggtatatggtatttatagaagtrcactgtgatgcgctttggatttagatcatccacataagaacccaaaatttaccacttattagttcccctttctcatccataaagtggaagtgataatcatattgctttataaggttttgtaagtaatccatgaattaacacgtggaaattttttagcacttggcatttagtacatattcaataaattttcatgttcaccttaagtctgttgtgaatgagactgaggacataatttgtttctatgcaaaattttattccaaacaatcaacacccatacrgataaacagaatgcaatctatctgtaagacaggaagagtgaacaagtgtgatttataattacagttgttacagtgaccatccttttgccattatacaatacatgccagaacctaataaaattgatattgataattactatctccatagaacttgagcactttaaaatacctgcatattaacaatttaaaaaggtatattaaacaaaaattattgygtttctttacatgtgaaactcagtgaaacccaaagttgcacaatcctcgttgacaaaactctggttttatcctacatatattatgaatctacatcctaaatatttcattatactattgtgtattatctattattagacctctcattactgaagttgtgcaaagttgaatagtgatatgattcaccaaatccaaactgaatctcttctaacacaagataataaaagtaaatttatttacacaaatttgtttgctacttgtgtgactatactacagtagagataaatgtagacatctgtcggaaaattttagttttgattactatagcagctccacaatctcaaaatgagaacattaagaaggatccaataaattcagcttttaggattccaagttgtttttgaccattttttttaaagttcttattataggaacttattactgccacctaatggaagacacttatattttcttatttattatatttcaaaaatacaaagaaagagtgcctgtgcaataggatggcaaaaaaaatttaggttttggcttaacataattcattttaagaatttatcattgaatattttataaattaagacccacattgagaatgtaatgaaaccaaaacctttttttccataaattaaaaaaaaatacattcaaagggattctcattttgcttacagttgcatgagtttcataggatctcctttttgttagctatgttaagagttcttcaactctcagtttaaacacccatgttgcaggtaattcacgtgacagttactcttataaaataaggtaaaatatatatatacgtatatgtatacatatatacacacatatatgtgtgcgtatatatgtgtgtgtatgtatgtgtgtgtgtatgtatgtatatgtatatgtgtgtgtatgtatatatatatatatatatatatatatatatatataatgtttttaagccacctcagatacttttatagatcaaggagtaaggaacagaattcaaaagacagacatggacatcagaaacaaatggccaagagttttcccagcagacagacagcatgagttgcagggcgttaggaaaaactatacagtaagtacaatctgcagttggtaattttccatctgtcttttggtatccctctccttccactaagttttctcacttagcctgtctaacgttcacttttttccaaaccataggcccaatagctgcattctggcctcaagtggtcaagagtagcatattttcctgtatgctaaaattgctctttttctaaacaaattaaaatctggtaatattgcagtatatttcatttgggggaaggaagcagactgatttttcatcccagagtttatttctgtcaaagaatatttatattttaactcatatgactatacatttatttcctttaggggatactaggattaaacaatatggtccatagaagtacctcataagaggtacttatgaggtgcctggccctatgctaggtgtcgaaggccaacaagayaggtctcctgctctggacaacaacaccaccacttccatgttatgtaaagacaattccaatcaaagtgtawagtcttaatccatactggctgccactctatttttcatcttgtcacaagatcaagactcaatatcttaactagagtgttttctaaaatgacaaaacctggtaaatcagatctcttaatgtctgaaaaattagataaatcaaatacatataataaatatgtatatatttattatcgtagcaaaccttcagttattgatgaaacatcaaaaaacctgaaataaacaacaaccagattcactgtgttcgcaattttatgttttccttggttaagatattctgaaatatctccctttcaattgcttctaatataattttttacctttcttactttgacaaaaaatatttttttgtgtctaattccattgcaaataccaaggttaaagaaagtgatattcctaagaataaagctttgatgaatatttgtcttcattaatttggataggaaggccttcaaatgagatatgagcaaatattaaggtctggaacaacctggcaggagtgaaattcatataatgattttcctaaatattgtttaattttttaattaattgaatttctaacaatagctaacttccttaattatgcactttccaaaaggatttcctgttctatgttccatgttatcagtgtgaaagtcgttttgatcataaaattaatatatgtttatatttaatgaaccaaattccagtctacttccttcaaagtaaatacacaccaaaattaacaaagactttatatttgagtttagatataacacaagcattcttcaaaaacatccattaaatgtgtaattttccatactaatcctgaaagctaagttcgttcagcaagttctcaactttcctgactccagtaccataaaagactgcatatgttcaaaaccttaaatataacttgtggcttcctaagctagaggtctgaataagttaaataaatttagttaatggattcctaacttagaaaagggagactccatctcaatgtttcattaaatctaactatgatgtaggtcttgaaatggcatgtgcttttttaaaagaaataaaagatgttagatgtttacactctgacaacattctacccctaattactcaaaatagtttagacttcaaggcttgtcctacattctggtctacatttttccttacagaaatagttgcgtgatgttatcaacatggaagggaaacagtctttataacagacatgcttttttttttcgtctggacattttagttcaacctaatatgcatatggacatcagttactacagtatatccattccagtttaaaaactatttgcaatgaaattaaattttgggtaaggaacaaagatcattgtgcatcatataattttattgatataagattataatagtaatataataatagtatgagggagtatttatttgaataatttctaagtttattatttgtctttttctctacattacataagcatcacattatcatctgagtatgaaaagaatgctaatcttccttacttatggacctatagatcttgtattccagctttaaatgtctcttcttccatttatcaagtccttcacctctagacaagtttacttactgccagtacttctgatttcatttgccaccaatttaaagaaagagacgcacattttctaaaggagaattaagaattacctgtgggtttctttcaactagcataaaatgttcttattccagatatccrtatacctaagtccctcaccaccctgccatcttgctccaatgtgaactcttctaaagagcttacatcgatgattatttaaaatcaacctacgtctatactaccacagacctcttttcttttttatctattttagtttgtccttttttcctgtaatactaatcatcttgcaccaatctactataatttacatatttactgtttttttgttggttttttgtttgtttgtttgttttgttttgtttagtatttagttagttagttatttgaaacacagtcttgctctgttgcccaggctggagtgcaggggcatgatcttggctcactgcaatctctgtctcctgggtgtgagcaattctcctacctcagcgtgaccacacccagctaatttttgtatttttagtagagatgggatttcgccatgttggccaggctggtctcaaactcctggcctcaagtgatccgcccagtctggcctcccaaaatgctgggattacaggtgtgagccactgcacccaaccttgctattattttttattttccagccacccactaacacgtaagctccagtgcaaggatttctgcctgattttcatttcactaatatatatgaagcacctagataagtgcctgtatattaggtgccccaaaactgtttactaaatatttaaatgaataaatgaatgaatgtttctttatactagagtctaaatcacagaaaactggatattggcttcatgtgagtttatatattattcaagagatgccagagtaaaattactgaaggtgttagaatcactgtatatttccaaaaagaaaatattcaaaaattagttttcatttttttattcttacttcaacctaatatgtatttcttcactgactttgaaaggaaaaaagttagtaaagatgcttcctgtaatatacttagtgttcagattttactaaattccaaggaatgacctttcacattagggtaaatgagaagattgctcagtattttaacataaaatgttgaagcctttccccaagtggccacacaatggctaaaactggcagaattcttgttgaaactggctgacttgccaactcttgcctcccaacaaaagccttattccgttacttattgcctttctggacaatagcactaaagagcctatacaaggaggaaaaaaaaaacaacttagcaatgaaattgagggaaagaaaattaatcttttctaaaaacatctatagcagaatacaaattctgtttaattgccaaaaagttttacgtctgtttggtaaacagacatgtttgtcagtctgtaatttattaagcttttcagtgttgatgtataaatacagataactctaaaaacaatgccaactgtcaatgaccttacctcattgtattgttatggaagttttctaaacttacagccaaaggactcttttataaattgaaatacatatttgtgattaaataaatcataatttgtttgaaagcctcattatggatctttacacaagttatattatgaatggacccaactcatattataataatacatcttttattttcccatttagattccccatttgtttgagattcagtgttaactttattgttttcttttaaaacagaattctaattattcatttaccagaaatgtcactattaaggttttctttcttcygagttcaaatatgtatgtcattcagtaaaacaataactttactttgagaaaaatactgattgtcaacatacatccatagtattcagataaaatatgtatataaaatgtgtcaaagttgtaattttactgtttttcwacatattctcttatcacactactgactggattttaaatcataagcagcacactggtttggattaaataactctctgtcttagatgaactattactcaaaacatttttaaaaattgtcaaatggcttcttcctaccactatcctttcctgtttcttaactcttatccctaaactttctgactttatttgatacagtcattatcaaacaacatatttttgataaagttattattacaaaacataaactatattttgtttttaaaattagtcaatttgttctgataagtttatatatggcaagataactcagtattctacaacacattttctttattctaaggagcttaaaatagaaaaaaaaatagggctgtctttacaaagacaagagagtggaaatttctaatctgaataggcttgatgaaataatgtaaaaggcacttaagataaactttacataaataaaagccttgaaagaaaccccgtctctactatatgccgccatcacgcccggctaattttttgtatttttaatagagactgggtttcactgtattagccaggatggtcttgatttcctgatcctcgtgatcagcctgcctcggcctcccaaagtgctgcgattacaggcgtgagccacagtgcccggcctatatgtatctgagttttaaatatgtttttaaaattgaatttaacattttaaaatgttgcacatcctaaactttgctctttttgagtaaatccagagcaatgcattttgtttcaggtctggtgacagtggcttttacaaatgcaatgtgaaggcttgggagattgacccaaaaattaatgaaatttgaaatggaaggaacaagattaaagagtgaaaagccaaccagaacaaagtatatccaaacaaaattctcatctaaagaatagaaagatatgactttaagaacaaaattaacttagtaattattgctcaccaagttaaaagatcagagggaggcttgaaatttgaaagtaagagaaaccttaaaagaaaaggggagcacatagaataaagacaagaaaagaaagagaagataaaaggagaggctgtaaaagaagacaaattagtccaataagacatttgatttgctagatttatataatttgttagattataaaaatccagtgctgaatcacataaattgagatgctttggcctacatggccatggacaatgggcatgtcagtgggtaccattttcagttgacatgcaaatatcttccaggtgcttggtgtaaacttttggatggtaaagccttatctgccttttcgactgggacaatggtaagtgttaagtctcagggttattacttctgatcagagctgaaaagtatttatttaaaaaattgtgaaaagtaaataccacctcctgggtggtaataactgacttgtgtttcaggattgaacccaattggtcgagataattactctgcttttaagtggaggggtcataaaatctgtctcagtctctcaggacctctacaggttgggctacactgatcataccacatttaaagcagcagtgctgtttggtaaagtgaaaatctctctacttattctgaacctaccaaatgagtctgggatggctcaatggacagatggagatgatgcttaaatgatgcatgtgtgccctgacatagtgttctcttttctgtattttggatgttgtatgaatagggcataataacacaatagagtcaaactaacaataacaaaataagtcagtaagtaggacgcatgtttaaatcaagtgattgtctttacaaataactaaataataactataaatatatattgaactaccaataaataacaagaagtatgtaatacttcccattttaattctgggctgagaatgattagttctgtgagttggtggcacatttttcctgtctgaatcattctaacttaaaaatcttaggaacttggtaataatccaaattacaaatttgtagacgcttttcaccatcagattcaggggtaaatacacacacacacacacacacacacacacacacrcacgcacaaacacacacaccttgattcaaggattagtcattattgctgttccaaaattcctttgtgtatataataataaacttgaaatcatatataatttatacatttaaatcacataataaactttcaaataggatcagtactgtataaggcagctccatctccgatccagatcccttgacctttccctaataaattgcatttcatatattttgatacatagattcataacaaatacatcattccttaggagggaattatactctgcatacttttctacaaaaacctttataattaagaacatttcttgtatgtagaatattatgtataccatactgatatagtttggatgtttgtcctctccaaatctcatatgaaggttgaatattgaaatgtgattccccagtgttggaggtgggacctggtggaaaggagactgaatcatggggatggctccctcatgaatgacctagcaccatccccttggtgataagtgagttctcgcttagttagttcacacaaagtctggttgtttgaaagagtataggacctttctgctccctctcttgctccctctgttgccacgagataggagatatgaggatatgtcagctccccttttgtcatgattgtagacttcctgaggctctgccagaaacagatgctggagccatgcttatacagcctgcagaaccgtgagccaattcaacctattttctttataaattacccagcctcaggtatttctttatagcaaaacaaggacattaacacatacacatatactgtttaaataaataaactcctgtatgcctagacccaagattgtccatcatgttcttccctgattgactcacatggacattctcagaagtaaacctttatcctaagcttgtactaatcatttccttgttttactttatgactttaccacatatggtttctgggcaaactattactttatttttctgcttttatttttactttaatgaaagtggagttatcttgaatacattctttgaagacttgcttcttccattcagcattatgttcttgagataaatcattgttaatgggtatagctgtggttctttcctttcactattacagtgttccattgtatgaatgtaacacaatgtatttatcctttttcctgctgaggaacatctggattgcttccacagttttgmtattacaaacaatgaggctatgaacattttgttaacatatctcctggtacacatatgtccatgattttttgaggatatatttttcagtgagatttcaggatcctagcagttcaaaatgcttatgccaatttatactcccaccaacagtgtatgaggtttccattgcgtcatatcttttctaatgctgtgtattattgtcaaactttttaattgttgctagtctgctgagtgtaacatagcatctcattgtggttttaatctgcattttccttattatgagtcacaatgaatttgtaagctaaatgaattaaaattttcctctgaaacatttgtttctaattgaatggcagtgacttaatgttgcagggttataattaagtcactttttgcttgtaactatttaagagaaggattaagtatctctctttggttaggtggtccagggaaagcaaaaatatgttttattgcttttaaaattggatatgtatgaataacatttctcatgaacaagaacacagatagaaaatgtcttgaatcttagctctaactttctatttctctttattcaaaaactttatctaatatctatcaaaatctcctttgaaaaataaagagaggaagaaaatgaataattctattcagggtgtgtatgtcttcttttttaaaaattggttgcacatttacaataatttatgaagcttacatatctcctgagagtgattgtgtctctctacctattgtaaaaaattatttcttaggcgtcamaacatcatagaaagcattgaagtttgtgtttttcacataattcctcattttttaattcacttgattgcctttataggcatcagctgaatttaaccagtatatttcttcaaggttctgattttctcttcataaatatacttaggtttatatattttttcttcagataagttgttatatttcaccatggcaacattatatcaagaaagtataggtgttatccctatttgctgtatttcttttctgtgttttccagatttagttgattaggattttattgtccaaccatttcagccagttttgctacttgaacaaaattagctctttcttttgagttttctctaggtatttttatctttcacattggggcttaataatgttttctttttgtcctttcttcttgcctattaatccattttagtacataatttaataccacagataaccgatatttttcagaagaggtagtaaatacatgttcacacatacattgtaattttattaatatatgcaacatgtttattaaccaaaattaactcatcaatacattttctgatagccagaagtgaccatttacatgtcccaaacaccaaaaagctggaaagattctttcatagcatttttggctgggatgaaaaaagaaccatgcagaaaaaaaataatgcttctgagtatttctacttctagtggtattttctagcaagttgggaaaatactcaaaataaacttcaactttgaacctggtaaatttcatatgtatgccaataaaggctgagactaataggaacttttattttttctgaaatagcttttagaaatccagattctaaatacagtcaggtgtcacttaaggattgggatatgtcctgagaaatgtgtcattaggcaagtttgtcattgtgcgaacattacagagggtacttacagaaacctagataggatagcctactacacatctaggctgtatggtgaagcttattgctcctagaatgcgaatctgtatcactgtactaaatattttaggcaactgtaacacactcgtaagtctttgtgtatttaaacacaccaaaacatagaaagtacagtaaaaatacagtatgaaaatcttatggtaccacagttatatatgtggaccatctttgactgcaacatcctaatgcagtgtgttgactgtatatgcagactttttgccaatgtacaaatacacatctaattaatatgaccacatgattctaattataaaatgtgttagttaatttttagtgatatataatatgttttaaaaacacatgaaggagtaaacatttacaaggtaatttttcaaaataattggaagtgatttttgatttacaaaagattcagttgcagagattacttttaataataagctttctgaatatttttgagggtttacattttgagggtcaacatctctgttgactttaaagaaattattggcaatagatctgattattgttgggtatagtagaaaattgatgctccataagcamaaggtcattaaaagcctttcaaatgtcattatgacttaattaagataaataattcacaaaatgcaattctgacatttttcaagttcttaaaattcaaacagtgtgtaaatgcaaagcaaggtaaactagctatgtcttgctttcaacattagtttgagcctgaaaggatgtatgtaaactacatttatgtaacttccatatttgtttgacagggaatgaatttaacttgttagtaacatcctgtttatggagatttaaaactcattactgacaagatttggcctctggttccctctttgacccagttcttgaatgctctttgccctcattcactccactatgaccatattgactctctttctgtactttgaactagccaagtcattcctgccttagaaccattgactcagtcatcctttcttctaaaaatgaccattctcctgaacattccttggtatgctctcttacttcaggtccactgctcatataccacctcttcagagatgctttttgtgactattctatctagtgtaccaccatcatacatttctcatttctccctattctcccttagcttgctttactatccttcataccacttatcaaaactggccattttaatatttatttgtttcttttttttttctccttataatataagctccatgagagcagggactaccatatccccagcctgtagaccagagccattcatacatagattacacatcttcctagggccaagaccttaaagaacaggcactatctgcctccatgtttgtgcctgttggagttcctattcttaggacatatgatgccaagaacaaagttactgattactttcaggttagcatggtgacaacctcaatatacctggtatgtctcctcccaactttccattgaaaagtatcatttgaaatatatatgtttatggttttaacaaagaaacacactagtatttaacttgaggttaaattctgagaaatcccaccatccactcataatattaccaaattcacaggaatgttctcttgtcatctagggtcctacgatgatacaccaaccacttgtgctaccatctgtcaaaactttggatggccctactttcaggtattgcatatattacaaaacaacattcatgacctaataaaagtaacatgttgcatttccagtaaagctgaggataagaccatgttaacaatagtaagaaatatttcacggaaaggcatatagttaactttagaataaaagagaaccttgaaaggcaatctaacaaaatattaataaagatggaattatggacatctgtcaaacttacaaaattatttccttggcaccttggcagtggacttagtctccatattgctgttctcttggccagactaccgggagtgttaaattaatttgaatgtgtcctattagatttattaatattagttattttgtaaaattagccacagacatcatatattatatgtatatatactgtataaaacatataaccataattatatggatatatacaaaaaattatgtttaacattataaaatagggctaatttgctcatttgaactaagttccttttctctatagagttcyttattttctattcacattgtcactgttatattcctatgaatggatgtaaaactttttcataattggaacataagatgataaccttatttataagcgaagaaaaaactttaaatgactctaaatattatttttagaactccctggccactctgagagtctcattttcaatcctgggcattaactacaggcttttggggcattggtgcttccagaaagactgctgttccagatgtgtttgtcttgttatttatgtttggcattatagtaccatggcaaataaaatattaattatgcaattaatgttacacctcatagctgcctttcctacaaaattaaatgtcctgcattaacttgtttttagactgcaaacgtttgacaattcaataatgtatcatcgtaataaatggcaataacctaaattaaaactaaaggctactaaattattttctcctaaatttaaagctgggtgacatcattcctccttctgtacttaagctgtgatttttaaattcccagttcatactgctggacccaaaaatagatcctctataattgttctttctcccacagcatgtctttgggaactcatcattgttgttctgtcctttcatgtgtcagcttcctttgcacatttcatttcacatgactcactgttccttagagcaaggtttgaatgctcaaaatgcctacttatatctgacagatggatttttcttcctgatggtttttatgtgaagtaatatcagatcaactttcaaaaggcccaaagtttgcttaataaaggtatataggaaagagagcacaatgggagaaaattcacttactagggaagaactggatttggcctccactatctgtgtgtatcagtcatgtcttcatgtgaacactgagaggaatacactatattttttccaagtgtgtttttcaacttataamatgtttgagagtttgaagaagataaattggaagtagctgataatgaaaggtccaagtttaaaggtgcattctcttcattagcctggtctcacagaacttgtagagcattgcaaagattttctgtgagaagttaatggctgccttttgagttgtttttgttctaatagtgcagtttaaggtgtaaattcacttcaattctagcaagaaagaggtagaaaaaattatctttatggagattaaaaatgtaaatgagaactatgattgcagtttgccatcatattagtttgaattatgtatgtttccattttaacataataaaaggagtacagaacagacacttaggagagggggctcccagtcttagctcatctaccactgccgtggaatataaagcacatcacaaaaccctcctgaactcctaatttctgtctctaaactgagaagatttttctgtgagatttctcaggtccatcccagctctgaagttctgaaatagctgcctgtaactctctgacctaaagataatagctagaaataaaataccatctgaagttctttgtaaccaactatgtgatttataatagttcaattcctctaactacaagggttttttttttgtatggttttatttatgtaatcatacagctgaccaaaacttgacagatgggtaagaagtgggaaataaaaaaaatataaagggaaatgtctctggctagtttgaattttggcaacagaagcatctatttctagttatcagtaaagtttagtaatcttgtggaaagttctttcagactccaaaatagtaaagatattaacttataaatttctaatcatttaatagatcaatttttgcatttaaattttaatccagctaaaattgaagcaatatttatattatataaactaaaaatatatttgtaaattatatgaaaatactccagaaaagttatgcttacagtaatttttttttttttttttgaggcggagtcttgctctgtcgcccaggctggagtgcagtggcgcgaccttggctcactgcaagctccacctcccgtgttcacgccattctcctgcctcagcctcccgagtagctgggactacaggcacccaccaccacgcccagctaattgtttgtatttttagtagagatggggtttctccgtgttagccaggatggtctcaatctcccgacctcgtgatccacccrccttggcctcccaaaatgctgggattacaggcgtgagccactgtacctggctgcttatagtattttgaagtgttgcttaatgaatcaattttatgaatgatcatcttatcatctctttaaaattttatagcacactgtcctatttctcagagttcaaattaggtatactcccatgtgtatgagagacacaattaatgacttgtaggtcataattaaagattcaaaagattcatttttgttaatagaatgtttacaaatacttattctcattttgctgtataatgagcagtgtctccaattaaagtaattaaaattcaaccaaatgaggtcagtgtgacttgtcatttatgttaacttacatgttccacagcaaaataaagctgggacttaaatatgacactggcttaaataagtaagtactggtaatcatccttgatcatgtgccttgagggtctcatcttaagtgccatgaaagtctaccagtacttcttcatcactaaaagattttcatattattattatttctgtaaaatggtggaatccctcatgaatatgcttccctgcaatgtccttgttaatttgcccttaatcagactcttctttagtgtatatagttgttctgctttgcattgatccctgaaacagccctggtgttgatctctgtaaaaaatttcactcacacagacagtagacttcattaaagatttacatgatagcagatatgggagaggttcacatactaccaatgcaaacaacttcaaatcaaatagtagaaatgaccatttttagatgtcacttatttctcccaataatctattttggcctctctctttttgacttcattgtgtctttaccccattctttctttttgtcactcattttccagcttctgttgcatgagtaaaagtaatgcattttctaatttgattcatrgagaggagaattcttcccctgatatttgagcacctgataacatttatgaccaagagtctgctctactctaagtggatttttaatttcttttatcagaaagaacagttcctctcataagaggaattatgataccaatgtaatagcaattatttaatatggtaggtaaacataaactgccattgaaatttagtagaaagcatattatatgcagtgacgataataccttcatgaaattctttacttatcattttttcttttcaaatttgttttacattaaagtaggatgaatgtcttatcctttttactacattgcccaccataatggttctcaaatgcaacaacattttcatttttgatagaactgagtttcatcatttactttgtgttacacttttccctagaccaaggacctatgaagtgagttatccatacccttaccacataggcagaaacagcttcttttacagaaatcaatttcctgattctcaaactcgatttgatctccttcctaaaactgatctgccagagaaaacttcgaagctacaagcttccagctagttatccttttccacttctcttttcacaatcttccttttcctcttttacctacgtctccctccccacacaaaaaacacaagtgttgtatcacccattctgaatcttactagagagcatttttggaaggtgtaacaatctcttaggccacaaacaaggggacagggatggtggatacaytgatgtttgccaagcctcctttcaaaaggacatgtgagcttcccctttcttcatctcattaaataatatagggtaaataaaattttacttttgtttaagatgaattatgaatcaaaatatatatcaaagtctataataatgcattttgatcttgagtgtaaactttaaaaccagcctgcctgattcaactcttgaattaatcaatttttaatcacatgttaaagttaataaactgactgagcttcaggtccctcataggtaagctgggttaagcatagtacctaccttacatgattgttgtaaggtgatcataactctagaaaatcaaatattactttttgaaagtattacaatctaatatatatcagtgaatcatttattatatatcgtttgtgtttccagacctggtggacactctatataaatagatagctacaagtagaggtataaataggtaatgtatagattcgtgcttgaagcttagtaagccttccagacgtgttagccactattattatcaacatgataattattgccattattttttataaaagttgtagtgataatgcaatctggaagaactttttaaaaacattcatttgccgccatttggacaggattctttcaaaataaaatgttaatctgtgtacaaattttgttgcaaaacattttagagcagggtaaagattttcacgagaaaagattagaagagatttacatcacagcaatgcacacgtctgcaaaaaaaaaaaataataaatgacagacaccataacttcacagattttaaagtgttacgtgctcatctaatgatctatttccctgtcactttatcttctttcttgctccgtgctacctttattcctttttttttctatataatgagttttcctggctctctttcagggtatcactaaaaataatttaaagtataaaaatamattttaatagaataaaattctataacaggaagggtgggtagtggactgggatatgatttcaaggagagaaagaaatgaagtaccatttccaaccgctgtgaagaactcatttattttaaatgaatgtggtagatattgaattgcttttatatttatgtttcattgtgaatttttaaaaatgatataacagttatagtttagaatgtcaacatttaaaatgtgccaaaagttacatgctttacaactgatctgtcagttgaaatggctgaagttctttcaaaattattttacacaaggtgtcaacagaaaaacttgaagcacactgctctttactagagtgtttcattcatctttgcacttcccgcactataaggaatacacttaaaatacgtttatcaataaatatgcatacttttttcttatcatgaaaatatagtgagttataatgccatgcttttcattgtacaatgcatttgtgactagaacaactaaccttatttcataaacttcacttacagaaggaaaaattggatctagaataatgcaacctaatattacatgtatcagatggaaatgtactactaataagcaaataaatataagactttcaagctatgggtggaagataccaaatgggtttctcttgtgttttaaaaggataataaattataaggaagttaagaaaggtccattgcaactgggtctgtataattctatgtataataattatatttgtgacatgactattagcaaatagcttgcttttgtttttgtttttgataatgaataacactatacattaacaaaaacataagttrtcaacatttatgttgtcataaaatgtgagaaaaatctataatctttttccaaaatgaattgacctttgaaacaagcaatcagttaaatagagagtatctgaagagattttattagattccaaaacattgttctttgagacaaattcaggtctaccattaataatctgayccctcagtccaaatttcaggaatagtccattagacccccaaactaattctaatagtcaatgcagtgttgatttcccttatgtagacattataaaaaactttattttttaaaaaatgacattataaaaaaccttattgcacttaaatattattattgttacatttgttgtccattttgtctcccaggccttccttaagcttccctgcaaagtatgttagttatattttatgggatatatcagttttgacaaaatatttcttcttcccaaattatgtagactccagtatgaatatgatgaagtaaaatttttaatcaggccataccacaattcatttatacctatcacsgtttcaaatctgccatttctccttaattttcagccagctctttgtaaactgcacatcttcatacttttccaaggttatccaatttttttgtctatattactccatcagtcacaatacttaggaatggccagatgccttttgacttgttgcattaagctatagggtcctgctaatataattaacaatatattactgctatttctactagttaatgaaaacaaatgaaataatatttgcatttattgatttttgttaaagtgaacacatttctatgwaaagtatttgagaaatgcctaggaagggtgtggcttataagaaaagcacagtcatttactgtgattttatgggaagttcctgctgtggctaaatgtactcgctctctcacattgctgtagatagctcacaaaggaaaacccaacacaaatatttgcagcttttaatatgctgaatctaaaacattcctgccaaggaaaaacagacccctcatttaaaggagggtaaagcttgattcaataagcctggcaaatggacctgccaaccattagttaactcaagcaagccttttaaaccattcttattttttttaggctgttttatatgacacctatctccagatgggaatttgaaactccttccaaatgttttgtctatatggcatcaaatatccattaaactttaaataaaagaaattgggtaaccaacacctaaccagcgattcccattgtgaagaactacctcattgggcatatctatattttgaaatcagatgtggctatgttaatcagactttaagcatgagagccccttatctataaagaaaaaattatggtcatgctgcagttttttattttttgtatcacacagggtaaacttgtttatcacatttactgtataactaataataaagtctaacttcaaatcatttgggattctattgcatggagtaatcttagttatttatttctgaaaaagttcattattctctatttatcctaagttttttcccaagcctttggatatgccaataaatgatccagaaaacaatgccttgacacataggtttccaggatacataggtttccctgtcacttcaaacactatcacacacacaattgcaaaatactttagagtaaattttgccatccaagagtaagttttctaaatcttgggaaaccttagaatttataaccagataattaaaatattcctcaataatatcctattaaggtcaattttgtgtttcctttatgaggaaaatatgattttgaatgcttttataacayctcagattctacatatttgataccatatttggtgggaaattgtagacatatgtacagttggtaaaaaaaaaaaaaccatacatacatgtaactttgaagcacattggtttaacttcaaaggcattccaagtaaaaatttatgcaatgaaaatgaggaagaagtatgcttgttcacatagatatattaaattaaaaacaatatagaccatacattctggtttgcattttgaagtgactgttgggaaaggtctatttctttgcagtcagaacaatttttctattatgttctattgttattgttcagacatatctttgaaggtcaaatttgtctgaaattttaaacgagaaataaggaagagctatttatttctcttacagtcctatctaaatactgtaatgtgaattgtaattccttttctctattggaactttattactttgatgccatttctgaacacagagctttcaaaatccctatatttatatcttctagtagactatcttcctagctccttaggattacaaagatccttttatctttttaatatacccccctcatattttacactaaaaattgagaagcaagaaagttaaaagaaacagaatagtaatctagtgtcacaatcagaattataccatttctcttcaatacatttgtactgactattccataaatgtccacaaacaacctaatcttgtctcttagaarttatcagcaacacaatgttgctgataatttctaaaagacaagattaggtaatgtcttctggacattaatgtgttcttctggacattttcttatgtgttgaacttcaaatttaacaaagcattctgtgatatttactataagagcctcactattattagacaaatttgagaaaccttctcttgcacaatgccccaaagcaaattgccacatacagttaagtctgggcttcaggaaactgcctcattttagattcatatccaatccattgtccattgaattagtcaagttattttctaatttaagaaactgagcagatagtaaatggaaatgaattcagaaaaaatatattctattgtactagatgaagctggatttgttagcagggctatcaagccagacttgttattagagacatcgagctggcacattagtaaagcaaaaacaaaccataaatcactctgttcattaaatgtaatttttaaaactcattgattttttaatctgcctgaacacagatataaatatctattttctagaaacactaattttttattggaattttagtaataaaaacacttgccctgtggatacaattgggtgtcagtcctttatcttatttcctgctagctacctttgatctcttggtaatagattttttaatgctacatcagtgaattcctgacaatgtctactttccttttattcataaggtggagccaggataaaatacttggtccaaatatctttccttttgtccacttcctattacactcccaccagcatctgtatgcttgaaataatgtgccaagaagctttgaattttgttgaagagggaaaagaaagttggatggttttcttttgtttgggagatccaacttgcgacgatgagaatgtaaaggctcaaagggtggcatggtgtctatgcttactggacactgaactggtttggagcttctagacagctgaagatgaaaatggtgtttttatgagggaattaataaaacacttgacaggaattgtgctgccgtagggcccagatggcaacacagcagagggtaaaattgaaggccatttttcaccagttgtgcacagaatgtagcaggactctggcagcccaagagttgatgactttgagagcatcaggagatagtgtcagcataaaatagtacatagtagcaagagtaaaggcattccagttgactataaaggcagaagtcatggacaaattaaatcggactsttagagaaagaatggcctatggtggtcctatgaaagagactggcttgcaaaccatccctttagagagtttaagaaacaccttgaactttccaggatgctggaagtctcatgttctgaggtgcaaataaaagtaggaatttatgagttattttgatatcgagaggcttctgaggcctaacaaggtttcaatcacaagagtaattatggaagagattatttagatataattaagataaacatttacttaccaacagtaagtttcaaagtgtttgaaaatagtgcatgaactataggattatgtagctgatttcagttatcttgtactttcctatgagtcacctggctggcaataagaagatatgtgatattttctaataaagttattttcagatgacaaagatgaatataggtacttccacgtgggaggtcttgctgctgatctatgtaaccataaggattaatctattcctggcacatacagttccagctaagaaaggcaacacgtamattattgtaaatcagccatgatataataagccagtattcacagataccctttagtgtgttcaaaggaaattctcaaatggctttgaaacctttaactcaatcttttcacaaaactcatgcaaagtatccaatattcagatatgttaaatctatttgaaagtaaaactctagatatggattattactgtatttgtgtatcaataaaccaagactagatattaaaaatttactctttcttcctctgttctgaacctagtgttccctacacctctactctcagaagagtacatctcttacatgcatatttcaaaattattattttttcactcacaatgcacttgaacatatatttttctgaaatgtaaattcatattataatatttaccatcaattttggacttccaaataagttgcatgaggccctactgatttattgtttttcctggcagtagtggacaagaatttataactggttttaatgcattcttttaaaaaacttaaaaaaaatttttttcttttgaaaaaaaaatcaaagaagaagaaatctaagtataactattagcctatataagttataccttcgatgagctttatcataatgtttttcctattctttgaaaataaatagtggttcagtaaataagagatttttctaagatattattatgtcataatcttataaaagacctttgacttcttccagatctagttcattaaatgattattttaatcaaaataatacttgatatgaaagacagaaacctctcttttaaagatactcactggctgggaaagctgtgatcgcttaagcacatgaaataccagcagatttgatttacttcaagcactacatgaaaatgattttttaatgttcttgtcctgaaggctttcttgaaatgttagcatctgtttcatttcctaggttttggagtaatttctgttaggaatttgtagttcaatgtgacaatagcaactaggggttgaattattagtagggcaaacagaggttgtcagtatatgagccagcttctgcttccacaaagattagcatatgactccagaactaacagttattaatcatatcacttaaaactgctatttataatggcataatatgctatttatattcattttgctatcacagaatgtttagagacagatttatgcttctagctaaaataatttaagggaggctcttttaacacattttactttaacttcatattcagtaagcattttcttcagttaacataagttgctcttctgcaaattaaaatatatttctttgtttttatctttgaaaaaaatgaaatggcctactcaataataaggaagtgtttaaaattagataatttaaaaaattccacttataaaattttcgaaatttttgccagctttcactttggtgttaagttctgtgagctggcccaagctaactgtattaatttgcaagggctgccataatgaaagccatagactagaaggttagacaactgaaatttattttgtaacagttctggaaactggaagtccaagatcaaggtgttggcaggtgtggattctcctcaggcctctcttctctrtttgcagagggtcaccttcttattgcatcctcacaggggtgtttgcatatccctgacatctcttcctcttcttgggaagacatcagtcatattagattagggatacgcatttattacttcattaaccgtaatcactttttaaaggtgtcatgcccaaatataaccagattgagggttagaacttaaatatataatttgggggcagacacaatttagtccatagtatcagcagggcctggtggctcatgcctgtaatcccagcactttggaagtccgaggcgggtggatcatgaggtcaggagattgagaccatcctggccaacatggtgaaacccgtctctactaaaataccaaaaaaaaaaaaaaaaaaaaaaattagccagacgtggtggtgcgtgcctgtaatcccacctacttgggaggctgaggcaggggaaatagctcgaacctgggaggcggaggttgcagtgagccgagatcacgccactgcaccccagcctggtgacagagcaagactccatctaaaaaaaaaaaaaaaagaaaaaaagaaaaaaaaacacaagtttctaagaaattattatgaagaaggtgaaattttctagaatataggaaaagctgaataaagataaagaacacatctcagaaccttaatattatgtaatattgacagaatacacaaatataattcagctttgcaaaggttggtaaattacttaaacaattgtattctaggtcatttaaatagcaatttaaccaatcttccaatgtctactatgagctgtcttaaatgctaaaacagaaggtaaggtaagaatgaataaaccttgacctatacccttaggaagattcaaaataacaatagaagtcgatatttaagacacgattagttttatttactctcatgaagaatatataggctaatgaaagaaaaaagacaaaatcaacatgatacagtgtcattaagtagatatgggaatgtacacagaaaaataaatattttatattgacttatagatccagtaaaaacaggttaaattttacatgattctcaattctttttagaaygctctatttttataaaattatatgcccaattgawtatttttaagcttcagctgcatctctaaatataggtgtgaagaataacttttgaaattgatgcagagaatgatatacacaattttttttcttttaatgaccagaattccaggattagcatggataattccacatttttagtgaatagaagtcctgggggtgtgggtgaaaggtcagaacaaaggcttctgcaggaggactctgagaacagaaaacgtcaaagctttttacatttaacctcaaactaagctgggtagtaacttgactgcatggaaatacacttggttacagtgggaattgggcaaagatgttaaataatgaaaatgtaggcgatattgatgaagaagtaaacacttgacactttgtaaatgtgaaaaatcctatactgtgggttactttttattgtataaactgttacatyaacaagtaactgttgaaacattatcctctttcctgtggtggttttatagttcatacctttaaattaacttttatcacaaaatctaaatttaaatacaattatttcaatataaaaatatttccataaaacaaaatattgaagagaaaagtatttagaccttttgtcttccctgactcccatggcctatttaaatagctttaataatgtagtttacattatttttaaatcaatattttaccacaaatattacttatgttactactgaatctttaatcawctttcaggttctgtagttgttcattacaggtcaaaggcatgttaaaattgttttaaaaattattaagagttatgcttaaattggaaaataaataagcatatattatctgtaacacaggcatatatttcatcaaatattttaaatctatatttgatttggattgaaatcaattgaagtctatacaataataaacctcaccagcataaatgtcacaagatgtttattctggaagctattccaaaagtagcttttctgggttccattgatgcttttagtatttcttttctttcctttggtgtgtttatgggtttgttttttgtttgtttgcttgttttttgtttttttgtcatagttgtagttgttaactatgctactctgagtatatctttgaaacatcaattagttttttcatctatatattagttttgaaaaacgttgtcttgggaatacattttaaaattcacttgagtatagaaagtaaatggcctttattttcagacacaaaaagctttcaatcttattccagtaagagagcttcaccctcattattcgtcaagaattgtatttatcaaatatatatttactaaaaatccctttcaagagaaagaatatatagtcagggttactcaaaggatatttagtgcatttattttttcagataattcaaagtctattcctaggtgaagtcaaatcaacagattgaaggaccacattatatttaattgctatagaatacttttttatgcctgattataggtctttattgatgaacataagaaacagccctttgcaacttgccacattttttattattgtaattcacgtgagaaacatatacattgaattacagaatgttctctttgagagaatcctacattttctgtttgcatttagttcagagtataatagcatttcttcctagaaattgattaatttcataccacagaccatacacttggtaacttgatctactagaaggatcagactcaaaattttagaccatcccgcattcacaagagtttttaataaaatacaaggccttttaatgtcttatttctagctcttctttacatttcccaatatttttattttttctcctttttcatgtatgtaatattatctgtgtttaataagttttatttaggtgtaagaaacagggccactcttgtatctatttggatctattactaggataacagggaaattaggagtacagaagatattctatgtcattcagtatgacgtggtaactctgtatcattcaagatgaaaaattttagatatttacacacagaaattataagtgctgaatgtcctgcttaaacattactttattagattaccattagtaaatttgtttatttttaattgacagataaaattatacacatttatcatgtacaacataaggttttgatttatctatagattgtgaaatgactaagtctatccaattaatatatgcgttacctagtagagttgcattttgtgctacaaacaacatccactctcttagcatttttcaataatactttatacctgtattattattattggctgagcacaagggactttgttgatggtacatgacgaggtcaggctccctaggcccctccgtcttcagggggtctgcatggaaactgtgaagaggggagattcttagtgtggtgggggactgagtgtggcagggactccccagcaatgaggtcctctctcttcctctcgtgctcttgctggggctggtggtccaggggtcttactttctggaggccatgtggaccatgatccaccaccctgttggtgtagccaaattcattgtcatacaaggaaatgagcttgacaaagtggtcgttgagagcaatgccagccccctcactgaaggtggaagagtgggtgtcactgttgaagtcggaggagacaacctggtgctcagtgtagcccagaatgtccttgagggggccctccgatgcctggttcaccaccttcttgacgtcatcataattggcaggtttttccagacggcaggtcaggtccaccactgacacattggcagagtttcctgtcccaaacattgttagataccacaaaagtttatataacatttcaatattattaagtacacttcagatgtatatttttcctctgattcctttgtgtcttgatatttttcaagcatgccaccttttaaatctgtttgttttattttgtttgctaatcatggcctgaagacaaatctgcttgcccacagacacattttgtgaattgccttggctgtgctcactattcgctaatgttctttcaaaacccgttttcatgtgagaagttcaaaagcaggcatataagcacagcttttagcaaaagtcctaacatttaggaagcatttgtctaagcatttacttagtgtggacttttcatatattctatatcccttttatcttatcatctggagctctcacacttttaccagtaggatgcatagaaaactcttcctgcaggaaccttaacatattgctactttattccttgcctatctggctttgacttgtgggattaacatttaaccacagagattattgtgacagcaccagtgaccacacctaaccaactaaatcaatcaacaaagaaaatgtatttcttgttttctgggaaattcattttctggatggatgggggaaaaacatttgaaaaaaaaagagactacctttttttttaaaaaaaaaaaaataattttctggtggcacagctcagttctctgagattcaaagaaaatagtaaatttgggatgatgtgtgtgccaatgtttgtctggtgggtagacactggttgtttcttagtccagtttcacattaataagaatgcctctacagtcctaggaaaatytgtcttcaatgtcagtatttccataagtttttcttcaacttctgtgtatcactgtatatttggcataaagatagaagatggcatatcatgaataggatgccagtcagatgtcattttttagccaagattcacatatatactttgagtttaggcattattatattatggaaaaagaaaggttatgttttcaatctcttccaggcttggcagctaataattacaactcctcttaatgcaaagtgaattttaaataaattcaggatgacatgctgctgcctacattaagacgtgtgagtgatgggtttaaaatgtggccatgcatttatactttttaaatttaaagttatttttataattaagaatggagtagggttgactactattgagaaattcagaaactttcttagataaaaatttgcaaattaactttcttaggcaactctaattacatgcctttcccatactcacatcctaataaaacatgatagacagaagcttccggcctacaaataaaatatgtacataaataaaatatttattatgttgctgtcccaatttagatatgatgctttcctttcctcctgttagatgacaggtaatgatatccaatatgaaattttcattatagtaatgcctaacatttattgagtgttgtgtgccagaaaatgttctgagttctcctcattccaatatgtcaagtaatagtcacatataggatataaaatgaaatataatattattatccacattttatttatgtagatattgagtctagaggagtaaaataatttgcccaagttacatagacacagagaaagcctcagtttacattcatagcttaacacaatacagcctcaatcaatgtccagctccataattagaagcaaatttccagtctttgcaaatgccaaataactctcacttcccttaagatgtaaatgtgaccaaagcaactctggatttccctctctggtattttacatctactgaaatataaatcacagttttttgtgtgccagcccttgtactgtcaacatacaagttatagtttaaataaagaggattatttcaaggtcacgccattaacaattactttgcagagtttttctataagaattgccaaatgaaagaatcatttctatcgtttgctggggacttagtcttcccctaggtttgtctttttgacacgtaaattacaatgtcttctattatagtcttatcgcattctcttgcttttctcatatgggagggaagatataattacattaactggtaaaatatataacagttatagatagagcaacagtcagataaaaatagtgattcacttacaaggtttaaaatataacagctgataattatcacatataattatatatgatatcaaagaaaacaatgaatgtttcagtcttsttgaaatcctcagatgtaagtgctatgcccatgtgatgttcactctttttttccctgtcttttgtcttcgctcatgttacctcttctatctagaattctctttctctccctctgtctctttttctcctacattttctttaagggcaagcttagatttcccctctccctggagcttctatttccataaccctaagcattccagccttctttgataattccttccctgaaaacgtacagagataaatccttatataccaataaattgaatgcttactatgcttatgttgtcttcctcacaaattgaaagtttgcagagaacaaagcatatttatgatccatagcaactctaatagtactagttgagagaaaacaatcaacaaagcatatttatgatccatagtaactataataggaccagttgagagaaaacaatcaataaaaactaattagttattgatatatgtggaattagtcaccaaaggacaaatattttgagatgtcctaggctttaaaacctgaaagccatttacagtatttaaatattccattttgtattagattaagccttaaggccttgaggcttgattcaactctcactcttcacacttgtatcttccacctgctatttttttaaaaagttttaaaatagtatgtcaagcagaggctgcccttagcttgaataattcagataatagtctatgatttaaattccagatacaggcatatattttatgaagatctgcttaatacaataaacagattttccgtgtgaaaccagaaagagttagaattagagggagacagaaatcatttcgcttaaatatttaacttcatagatgaggaaagaaaagagtcagagagataagcgaatttgcaaaggttgcccaagtcagatgccataatgagactggwgcccatgctcttgagcccccttttcagtactcagttccaagtctaccctgtggatcatttctcttgtctttgggccacttcaagagaaaaataatgaacattccacacagactatggattttaagaaatgacacccgttcaagctatcctgactagtggaaataggaaatgtaagaatgtttctgaaaatcaggaaagatttagagcagtatctcacgcagactgaaactcaattctaaaactggaaggatgcaggcagaccttctcagtaacttcactcccattaaacctgtgccattactgtcccagatccctgttcctcctctgcatctctgtccttaatgcctctcgttagaaaggtgctaattctttctctgcacacaggatgtaattctttttttttttttttttttttttgagacagagtctcgctctgtcgcccaggctggagtgcagtctgcaagctccgcctcccaggttcacgccattctcctgcctcagcctcccgagtagctgtgactacaggcacccgccaccacgcctggctaattttttgtatttttagtggagatggggtttcaccatattggccaggctggtctcgatctcctgacctcgtgatccgcccgcctcagcctcccaaagttctgggattacaggcaggatgtaattctttttactacaccccctacttccctggcttatccttctatctgcttctcctgtctctgtcacaatacctcataatatttaatggccctgattctgtatcctttatcctatgttttgacaccgattctacatcttagcatttatctaggtatcccatttcatgatccatcactaaataatttttttttctcagttaaaattttgaaagagatttaaactggctcaaattcatccttgtaacactaaatcataccatgggtcatttgctaccttatatattgctgctgttggatacgggatctgcttgactaaacaactatagcaatgtgtgaggctgtttcacctaaaaactctttaggtgtagcagataatgttatcagcatggttagtacatacactcatgaacaagaatcaatttagtagtatttacagtagtcttatttatagttatatagagatattacataatgttaagttattacaacttttgatagagtttatattaatttttttaagattacctcaactgtcttttttctccatgtgctttcagtacatttctttcagtatttytagggagatctgaattcaagaagtaaaaagggtaccatttaaaagagaaaatttgtttagcaaggtttccaactattaaagctttcatgagtaattgaagttgatttttatttcatgcaattccttcttctgtcacccaccagacaaaataatgagtcttttatttattcttttatataaaagtcggaaggataatgcactagataaaatatttaaatcccattaaatcctgtggccccacctacctctccccgccccctgccccgacaccaacacacacacacactttgagcctcttgagactacctcaaccatgctctcatcccaaagtacaaaggcacagattatcaaggcccacatgcacctctgtcttgagccatagtacctcatgatcccctgatcccaccttcagctcttcttcatccttaacattcttcccctgtgggctgtggaactgatgttacacccacccaccagcaaactttaaacttagctcaaaccagtttattccctgcaaagaaatcctacttggtttagtcaatactttcctccactgtctaaaacaggctttcaaaccttctgttctttctacaaaaccctaacacccacttcatatttcccttctctctcaacagccagtgcttcaaaacaagaggtttacagaatacagctccctcacctgcatatttccacacctataagcctatcagaatcagtgtccttttttttttctttctttctcaacttgtgaagtagggcagatatctcttctcttctgtaaaacagattgccattgctgccttgtacctcatttcctccaatttggtaaaaaattgaatatctgtgatgtcttttaatacattgaaactcttccactcaaatggatcccccattaatattttaaaatgttcatgtcactctcattcaaaaacaaaactcttctttctaccctacagattctcccacatccaccactmtaccccattttctgactttacaaaaccaaaatctcaaaggaactccttattcttgttttcaccctcacttcttaacccatttctctctgatttttgttgctcagtgctaaaccacctattttctggtcagctactgaaaacacaggtttgccagtgtaataagacaaaggccagagtctttaacaagtcatcaaactccctgcttagtgtggtccctgcatcttccacagcctcacctgacacagctctctcccttgccttctgccctccattcctttccatagaaggcatttgcttatgtttttctcatccctccaaatcactctccttgtcccacctccagtctttccctagtcgatgaggactcaaatttcagatatcaagtgagtaaaataccatttcctctggggaaccatccttaatgctccagattaggtcatcttcttccttcataggactatcttgtcattttgaatttgtatgaatatttgattaatacctgtctcccctattatagtttcacaagggcctgcatctaatcttttattcaccattattttcccaacacccagccaagtgttaggcacataccagtggctcaataagcatttgttgaatgtgtgaataaagttaaacttttccaaggtacagcatgacatttaataatttcackgcaggttatgctttggacagttgctgtcttcaatggtgtatgcagtcatggcactaaacttacatttctataaactcaaatattttgtaccaaatttcttttgcctacagttatttgagcctagtattttagaaagaaaatatcagaaaataagtatttcataaatatcttctgacagatgtttagatcttaataacgtttcctttattgatccagagagaaatcctgacaccctactaaggttattccccgaatcaaagcaaatatatttgaaaggctgacccagtggaaggagaaaaaaaatgacttgatgttgtaaacactttcccagggagaccaaggctattatccatcattatttggtaaagggagtcaattaactgcattcacatgtaaaagatttctttacaaaaagctcacaaggactgttacagtgttggaagaaagaaagggaagaagaaggaaagacttcagacttctaaccaagagtagttgtgaacattttatgtgctctgaattaatttattcatgctccctttaaaatgtaattgctacttatttttaggaaaaagcaagttctatatttctataaaatattatacagcacaatgtgactatagaaagcacagagaaaaggagaatggaataaaaatgattaaaaaactgcatttataaatattatttttcttggtgtagctattttttaactctggctggaatataattatctccactgtacagttattaaattacttaatttatttcattaaaattttcctggtaggttttctgagatgtgagaatttgtacataaattacaataaaattaaaatccttagttatcccaagagcaaaaacaaaaccagccatagaagggggttttattatttactattaatttctgtacagaacagaggactctagcacaaggttagagtaaatacatttatttatttctgcaataggcatttaggcttctgtatcatcgtaatgttttaaaggaaagatatgtagtacataatataattttatgaacatcatattaaacatcattgggttttatttctagattctctatttctcaataatgttttaaataaactttaatatatactgtcatgcttctgagaatgttgccctattcatttattaataagggattggaaggagaaagaaaaacctcaccctagctgaaaacaaaatccaaaaatgtttcataaatatataaataaacatgaaaatagcactgtgttgcaaactgtaatattttgtttcaygtatatctgaagtaaattaaccagaaaaggttttctatttttttaactttggctttcaatacttaatgtatttatattaatatatatgtcttggatgtaatagtaatgacattttttccctcagaatgatagaattaaagaacaaaaaggaccttgagaatctagtctagtatcttattttacaaattaaataaaaataatctgaggccaccaaaagataaatggtgtgattttgctcaaactatgtagagtttgcttagtgtcagaaacaaagttaacatatagaggtgggaacattagcaaagcttaatgcaccatgcaaaacaagtcttagaatcacacctgttgctgctggaaccagcctcacttcagtctcctctgtaatccccaggtttagttaaaattagaacctggatttattcatattcaatgtagtgctatttgaattttttaaatgcaatatgttacctaaatatgtacttgttgctaargaaagatttagtgtcaatgctttgtatatttatctttcactgcacagcagtccttaccttatgcccaaagacttttcattcttgtattattaaaattgaagtttttctctcgtaatataaaagtcaatgtcagcacaaatttctaagattaataggcgaaaatgcactactaaaattttgaatatgcattatttctgaattaaaagaaataattcatttgaaattgtttacaatgttcccattttaactgccacaatattattattgcctactatttttttgcttgttttcttcaaaaatgtgagaaaacacttcctttgagtagttcaagtgcttttccttatttactttacaaacagacaaaacaaattatcttaaccagtctttattctccctaaatatatgtgggttttactgtgatcagacttcgtaaagtataaaacaatgttaattatcatcactatggatgcatatttgtaatggataattatttcatgtatttattcattaaaaaactttatgaagattaatgaataccagacaataccttggggaatcccaatgattaaaaaggcaatgccctcaaatagcttttacctttagtggggaagataaaaaagaaaacaaaacaaaaacagacctaactttatctagtgtgatagtgtgctgttagaaggcacatacaaaaggcacattcagcctatttgtgctgtaggcataaggtggagcgaaactaaagaagttatgagttcaaataaggttttttgggaatgatagttaagtcctaaaaagatagatggtagacttcacaaacactactagcgttattgtacaaaatagctccattttttccaaaattctgttctgcatacatctaaaagatttttcagtttttaatttgtgtgtacttaataatgttgattccatcactcctattctagtaggaaataaaccaagtaagactgtccttctgtcttctttttctttctctgtctctgtctctttctcatatgtacacagcaaaaagtgaccaaaccacatcttttttctaacaattattggatctttattttgagtaccaaccacagcattaccaggaatggttagttacaaagaccatagataaaaataacatatacatagataaaaatagataaaaataaaaatatacagttagacttctcaatgcttccttttcttttattttctttatttatttgcctttccctttttcttagcaactggtgttctacatttgcagagacagaattcacctaagatatgttttatgatgacgattttagtagaaatttaaatttgacatgtgtattgaatattctgtacatttacactagtacatttacttccattttttcaaggaacacgtttgcttacaaataatttttataaaatagagttaaaacaaaatatatgcaatattacagccaagaaattatttgagttgctcttgagcttaaacaataattttagatgatgaactgatgtttttcacatacaacatatcagatttgtgttttttttttttggttgtgtttggtttggtttgttttgtgttggttgggaatggtggtttggtggtctggtgtcaagttttgacaagtcattctgagtgaggtgataaagcccaactgcttcagagccccacactggtactattttatattaacagacacaacattggtttgtcccaaatggttaaaacatatgcacatgtgaatgcacacacacacacacacacacacacacacacccctacatacagacaacacaggtatacacacacaggacttaaatagtccaatggaagtacttcataaggacaaaacttcttaagtgatttccctagttattgcatactaagtatctcaggaacacagcagccattcctccaaactaacaaactttctgctaagcttaattgctggctgcaagcttttctttcttactgtttcagccgtctgcattttatctccttgcacaaatttatctccaactaataaccgagtgctaattccaggtaatgaatcccacaccttcagtttcactggttttgctcttcctctaggaattgatgaaacaaatacaaatcaagagtaataaygcaaatacacaagtcattttagagtctgtgtttgtgacaagacataaatgtcttcacctccttaacaatactgtcctcgggatgatgagaaaagatgagactttaacactggtgtttattaccactcttagaagggaaggttaatatatatttaaaaggtactccgtaacaaagcagagtgttatgcatacagagacaattagtattggtgagaaaacaagtgattttggagacagtgcccatccttattcacgctaaaatatgttaaaatcctaccatgtgttcatgagctcacaaagcctcctttacagaaagctgggaaagttggcattgttaaatgttcacatataattttactcaaaattataagtcttctaactgaggccaattaaaccaaaccaagacattccatttctgctgcaggggagagaccaccacttacttagcagttatcacttcctagtccttgtgatatggaattgtgtgggttattacatttaacccccacaatatacttatgagacatgtatttccccatcttagagctacagaaggtaaagcttacaggttaggtttctgcctgcattccagttaggaaatactgcagttccacagctggtatccaaaccctagtatccaaactcagagtcgytccgtgtgaaacctgtgctctctgccctgtgtctcgcttcctactgctctatcttttttttcctctggtacaagtccctactgctattatttttcattgttgttatctgctgtctaaagcagcatactattcagatacccatactgactcctgctccagaaagcctcattcatgtgagttttctagccatagcctccaccagtgtccatcagatgctgtttcttttttacttactttcgtcgtcttttttttttcttttgagattgccattgttattgcagctcagaaagaatttagtaaggaaactcctcactggaaagacagacacacacggtaaactacgagccaagctgcagtttgagaaaaatactccagcagtgcatgggattcattttgaaatgaccaagatagaccccaggatgttatggttgtgttttctacaaaaaaaaaaaataaataaaagtgtttataagatacctagggaaccatttcatatcattaattttttagatgatttgaacttttataaaaaactttattttctgtagtgacatttttctctttgttaggaaaacaaaatcttactttggtggacagatttttcactagatgtttttatttaatagagtaactttttaagacactattgcttctttagtttcttcagggtattttatattttgataaaaatgcaccatcttaagattcggtgagggagggacagtcacattaggaaaatgtttcgctgttgttsttaaggtctattaaactctgtcaagcatgacggggcatttttttttaacacatcctggtccagttaagggtgcaaatcagaaaaagtgcttggcacaacaatttagcaggaaagaaagctattttaaaagtcttttgggaacatgtttgtgaaacaggaaaaaacatacaattgagttgataatagcacttggtaaaggttaggctcactgaaatggatttgccatcttttttcacagggaacgtgttgttcttaagcggcagttctcacttaagcacagcttaattcagcaaggatctccttcctgtgcaacttcttttacactggaagatctatttttaaattataacccagacttagtcagaggagtaaatgattaaaaataagctgcgtttggtatgtgtaaaattacagcagttcatggtactttgtctagtaaatgactgaagtcacatttccaggtttccacttattaatttccccagagacctcaagcttctcacaggcctgtccttttacctctagttacacagctgcactcacttctgtacccatgcctttgtacttttagttccttgtacctagcaaactctgccctttatccagttcaccttgttactaactttgaattccttaaacacgaatgttttgaaatatgttataattcaattccaatacatgttttagcacatactgcctttccaaacaaaatgtcacctttctttaactgcaaatgtgtcctatgacgatgggcgtgaaacttctatttcaaggccctcctttgctgatctacagaactgtgcagaaaaaccctcctggacaattttttcttcaagatgtgagaactgcactcaggtatttccccaccacccattttattctatggtattctctatagtagtgattggaacccactcagatacccatgaktgaatttcaggaatccatttactttacttgcacttgccaagctctcacatccttatacacgaaaccttttaaaataactcttttaaatatttttctgcatcataccagtttaaggcttctgtaacaaattgccatagacttggtgggtaaaacaacaaacatttattttttacatttctggagcatggaagtctgaaattagggtgccagcatggttggattcttggtgagggccctcttccgggttgtatcttcacatggtctctccttggtgcatgcagagagagattgcctatctctttctttctcttttcataaggatgttaatcccatcacttcgtctaaacccaattatctcccaaaagccccacctccaaataccatcatatttcatgtttctaaaatgaaaattttgtcatatggctctactgcataattttcctacaattattattcattttatgcaacagcattagcaaatatatggaatacatgccattccttctcaggatgctgccatggcagacatcgttaatgactcaggagactctttctgattcactggactagattaactttaacattgctcagtgtagcagttctggctgccactaccagcaaatcagagtagatattcaaaatgaaaatatctatcctagagcattaaatcaaaactcctcagtacaacagaaagtaccattaatctgcttttctgtcttactggaaagcctcatctctcatctcatgtatcctgcatctctcaagcacctggtatgtccacactccagaaaagtatcatattctctacgtagatgtctctctctctctctctcacatacacacacacacacactcacaaacatacttcctccatgtaaaatgcatcattccagctgatcaattagacacataaaatttaattgagtacctataatactttattactcatatttgtacatatcattctactcctacaaagttttaagtatctctgaaaacagaaatttttagcatttctggatccctagaacttaatataacttttggaacatatgaggttttaaataaatgtttgaatgaatgaatgtattaatatagtaaaaggtactaagatggagttatatctagtatttgtaagaaattgagacacaccagagaaacaaattttagtatatcaacattttatttacttttaataaaaataacaatttttaaagtgtgcatttacctgagatacacatattgatttctctccttccttcctgccttccttccttctttcccttcttcctttcttccttccttcccttcttcctttcttccttccttctttccttgatttcttttttccatctttagttttctttcaccatgtaatagctccatagaaggagtatagttaggatgtaaaatttctaacctaggtcaagttccaagaataaaccaaagttcaacattttttcttgctaatatttctcttgtatttttgatgtttctatttgtaataacacaattaaaatatcagaaatcacaaatataataaaatatctacatttttgtttgtaaattgtcagtgctccactcctataagaaattaaaatctgtaaagtgaaatcactgacaggagaaaaagataaacaattatagatcctatctaaaattaagggaaattttctaagtatgtatatagatcttttccctcaactatgtacaatggttatttttataaacttaaatttatttatcaaaggaaagacaatattttgtgcatgaattaaaaattagttgttgaaaataaatttcaagaaaaatgtatgtttttcaaatcaaagcagttctatatatataaaatagaattaatttgttgttgaatatgaaataatgtatccaactgaaggagtaattcagagtttacatgcatgatatgctgtgttagctaggcaggttctttggtcgatgtgttttgttttacaatgtgaatatcatctgtctcttaactaaagaaggcaggagaggtgagagagaagactaaatgatcagcattaagtctttccttagatacacatggccttttggcatttacttttttaaaaacagctttactaagctatacccgtacacttcatgagaacactcacttaaagtgtacaattcaatatgttccctacttgggcaatagaatcattaaaagcccaatcttcagcattgcacaatacacccatgtaacaagcctgcacatataccctctgagcctaaaatataaaggaaaaaagaatacaattcaatggtttgtatatattctcaaggtagtacaactatcattttcgaacacattcattactctgaataaaatccctgtacccattagcaatcactctcyattgccacactccttgagtcctaggtaacccccaatagctccttcacctttatagatttgcctattttggatatttcgtataaatgggaatcatataatatgtttctttttttttactgtcttttttcactttgcataatgtttacaaggtttattcatgctgtaggtagcatgcattaagtactccttcctctttattgccaaataatatttcattatagggaatatatcatattttgtttatccattcacaaattgatgaatatttgagctgtttccattttttaattattataaatgatgctaagaatattcrtgtgcaagcgtttgtttggatatctgtctttatttctcgagtttataactaaaagtggaattkctgggtcatatagtaactctatgtttaacatttagaaaaactactaaggtgtttatcaatgattacactattttacattcctataagcaatatatggtggttataatttcccgtattctttcttacacttgttattgtctctcttttttattatatctatcctagtgggtatgaagtggtattttattatggtttggaattgcattttcctaatgactaagaatattgaacatcttttcatgagcttattgagtatttgttagatcctttgcccatcaatttttttaaaaaaatgacacataataattttacctatttatggggtgatatttcaatacatacaatgtgtagtgatcaagttagagtaactagcatatcaatcacctcgaacttatattgtttctttgtgttcaaagcattcaaaatcttctcttctagctatttgaaaatataaattatttttaactgtatttactccatagtctatacaacaccagaacttactcctcctatctagctgtaattttgtattcttttaccattctctccatatcactctctccctgctacccaccccagactccagtagttaccattctaccctacttctatgagatcaactttttatcttcttcatatgagtgagaacatacagtattcatctttcttttctgggcttatttcacatgacataatgtccttccagctcatccatgatgccacaagatttcattcttttttatggctgaatagtattctgttttgtgtctataccatattttctttatccattcatctgctgatggacactcagattgactccatatcttctctgcccattttttaattgggttgtttttctttttattattgagcagtaagctttatttgtatattctagctataagtcgctttcaaatatgtgatttgcaatttttttctcccattctgtgtgctgtctcttcattttcttgatagtatactttgaacacaaagtttataatttatatgtcatctaatttacttgttttttgtcacttttgctttcaatgtcctatctataaagccattgcctaacccgaggtgacaaacattttacccttatgttttcatctaagagttgcatttactttttgagctgggtatgaatatctcgccataggtacatattagttgtggattatccaagagcatatactgctaagactatttcatctttagaaaaaaattactccgtagatgtatttggataaaaaagtcagttttgaactcctatttgctgggcatggaatgtgctttgggtgtaaaagatgatgttcttcttttgtgaaaaagaaaacaatctgtaaatatctacattacaagatgaaaaggtgcttgaagccatctcattttacaggtcaggaaacgaagacccagcaaagtgactaacctaagaatattcagggcattcaatcacaatcagaatgcaaaatggagccttcttattccacacatagtgattattccactacactgctccaaataaatcagttaggcataaaacgtaatttaatggctaatttgtgaggatttctagaattgtatctgccttcaaatacggccaaattaaagggctctaatgttattggattctccaccaatcctcaatctcagctaattgccttcacttgaccacattttttaacattttctctgtatgataggaaggatgcatgagaatcgtctgatattcatgccctacttgctttgcaaccccagcagaaagaaaaagcttccctaataacaacaatacaaatgtcccagggagaattccagtggtgttggttggaccacacatgtccatgaccaagctaaatttaatcagaggattgtgctagtctgaccagatttcaatcagttcctacttcagtgatsaagagggaggtcttacttgaaccagagagaatggattctctatagggaaaaaggttcattttattaagggcaataaagaagatgtgctaatcagacagtatcaacagagttcctctacctcctaaaagttggaatgtgctagtaggtgccatataaattttattttgagaatgattggaaagctcaatgtaacaagaatatcataattttgcttatggactggtatgcaacttaaaattatatcagaattatatattttctgattttattgttggtgggaaaaacaaaacaagacatgttttcacatagcatttgactsctgactttgtggaaggaaaataagtataaggctctcattccaaagagctggaaagatgtgttttgtttcagtgctctttgagcaattaattctttccatattagatctcctggagggagagtgttccatcaagtacaaagcatttttttcaggctcccttccaccttttactaattgggctgagatttggccgcttgcctctttcaaataaaaagagggtgactaaaatcaccggaaaatggctaattatgcccacaatgggaaaatcagtcccgtgagtaagtacattacagtgtaaagtgaagtcccaaacttaatcacaaaattatctctctttaatagttattcaactgttcaatctggaatgttcattaaataagcaagtaagcatagggtcaatgttttcttttgttgttccagtacagtgttaggaaaggctattataaccaatttaaaataagtgaaacaactaaaaaagtcaaatactgtatgttctgacttataagcgggagctaaacaatgtacacacaaagacatagagtgtggaataataaactttggtggtttagaagggtgggagggttgtagctggggtgagggataagaaattatttaatgggtacaatgtatactattcaggtgatggttacactaaaagcccagacttcacaactaygcactatattcatgcaatacaagtgcacttataacccttaaatttatacaaataaaaaacaaaaaaataaagtaaaatttgggaggttttatgtcttatttttaattggcttagcattatattctttaagaagtccatatttgattacaatgttataaaaaatttgctagagctttgggttatatataggctcagtattagtaattgtgcagtcatattaactagattgatatcctatctgggaatatacttacaattcactttatttgatattttcataactacttaaatgacagaataaaaaacaaccacattatttctgcagaagataaaaaaaaactcaagatgcatgtgaccaccgccttgaaatacagtcagttttccacatacagtgttattgaaattacggcaaataaatgaaaatatgtataataagcttrcttatatttacaaaaattttaatgtggtataataagtcatatttagtgcattctaagaagtttgtattatctaattttattttacaatagctttctggtgtaggagttgttttgcagaaaagaaaactattcttaaagaagttgtttaatttgctagtgtgtgactgagttggattttaaaaacaagaagtctaactcatatttataaccagtacaactactgtttctacttgtaactggtattagacatcatcccttcattatgtgaattattaaatatcagttggatactactttaaaaatttcagtatctctttggaaaaagaaaaactgtatcattaaccagtgagacgatattaacaatatatacttccttatatatgaattttaatgtggattttaatagttacaattaaatttaggcatctcttcaaaaataaaatactttctagaagttttcatgagagtttttgatgacttttaaaaattggcaatttctataccaggtcatccataggaatttaatggcttaaatgtaataattttctttttttaaattactttgttgagtttagacattgttgaatcattttttaatgtgtcttataatttctgttactctgyatatttaaaagtcttggcttagtgattttctcttaaatgcaaagaagataaaaactcaatgtagccaaaattcagaaaatgttaatttctagtcctataagcattaagcctgttccaatgatgatggtaataagtttagcttagggtacatgaacttaccagattccattctgagacatctggaaagggggctaatgaagaagtgtgcttgcttttctaatttggactttctgcagtggagaagagagaactagacgtttcttgaatggcctttcaaaagtaagaatagctcaaaagaggcagtatatgaagaggtgagagcaagataagtgatttttttctttatttatttattttttttggcctagatatgttttccctgaattctcatgtaatgagagaaaaattagccaaatggtccactttttcccgtgagctattaggtagtaggagacatacacaaagtcttcctgagccacaggaaaaacaacaacaacaacaacaacaacaacaacaaacagtgtcaggagagatttggttttaaggctattttggctttaggttactaggagtaaaaactgtttctgtataacaatcatttttttcttttcatataaattttgaactcttacccaaggcttaatccttttaccctaatgctttgtttgatgagtaggaaacacctgggaaggcatggaatttgcccaggttcaatgaatgacagagatgggactgaggaagacactaacttcctgttttaaatgttgataaaatcatccctcgctagaacctcatgaatgagttccatggagagtgtttgaaatcaatgaagtaagcctcaaaagcagtagaatactgttsttcwacttgataaatacttttattgagggcagaaatcttaacatatctcaccaccttcaccctaccaaactaggtaaaagtagatgctcaataaatagggtaaggtaacaaatttaatttctagaagaagttttcttcatttaaaacgcattttttaaagtgctagaaaacgagacagtacatgtgtttttattttgggaccttgccagaatggcaagtatgagttgtcaagccatttattaatgtaagctttgtaaaagaatcgaatatgacattgctaagaagaggaatgaaaagaagaaattgttgggaaaaagtataaatgtgtttgatgagtacaagtgacatgtaatgagaaaactggtggttaagcaaaataactgaataagcaaaatagaaatgtgtccttcactttatgcaaataaacaactccattgtccgagtcagtatgatacagggcaaagggtagaaatttaaggtcagaaaacctgagttctgagcttggagtcagacctaagcatctttgtgactttggccaagtcacaatttgcatgctggatttgcctggtttgttcagtcaacatgattactgccatgactaacagaattatagagggatacagaaaatagcaatagctaatgcttattgtgtatttattattaagcaagttttttatatctagcatgtaatttaacacttaaaataatccgacaaggtgagctatgataaaagttataggcaacattgatttagccaggcattgattagcattatctcatttactggtcacattaaccttctaaaaacagccactacttttatgcaaattttcaggttagaaaatcggttgagagagtttaagtgtataagaactggcattaaagatatgtttctttgactttagtgtgtgtcttctaataagtatgcaacagaaaacaggaagctcaattaacgatcaagttttatactcattatctagttgagtaaaccaagcagaaaatagttgagttgattttcttaaaattacacagcaatttagaagcagcttagaagaaacacttctagctaatgggattgtcttgcaggaggatgaatgtattgttaaggttaagaggaatgactggctagttgggaagcagagttactactttggtttgatggaaaaaaatgtaatttttgtcaggtaaggatttttattagttttctatcctagctgtaccaaatgaccataaatttagtaacttaaaacaacatttatttactatctatctcacagttctattggtcagttctgttgccttggcttgtttctttgtttcaagtgttacatggtcaaaataaaagtaatggcagggctgcattcccttttgtagactctgggggagaacctgcctccatactcattcaggttgttggcagaattcaattccttgtggttgtaggactgaagtccccatttccttgctggcttgaggccactttctagtccttgcatgtggrctccacagcagagtcagcaacaaggaatcaactctttctcaggctttcatcttttctgcttccccttgtgctgcatctctttgacccttcaccctttcttttcttcttttaagagctcaatttattatttgcaactaacctggataactcaagataacctaggtcaatcattctattttaagatccataacctaaatcatagctgtaatcaaagattctggtgaatagggcatggaaagttttgtatgcctatcattctgcctaccacatgaatcttctatctattccaggtatcctcaaccctagctatatattaaaatcacctgggaaacttgaaaaaatgcttgttcctggtccccaagcaagatgacctgaatcagaaatttttggagtagaatcgaggcaatgatctttttttatgactcagaaaattataataggcttgaaagggttaggaataactaaaaacatcaggtttcttcaacttgattaaatttatttcataagcaatctactttaaaaacactttctgtataccctctttatgtgatcactttgttagggtgtgtagccccggagatgaatatgctgcctgccctattcttactgtgctcacaatctcatggcagagacacataaagaaataattataagattacatggtatgttttaaaatagatatttgaataacttgctttgggagttctgtgacattaataatgcctgggaacactgcagaatattttgcttgatttatactttatagttgcttttaaaatagtctggctagtaactagaaacagtgaaatacaaatgtgttcaggtttcggcatgtcccagtgaggatgaagtatttatattgtgcttccccaagtataacaggccaagaatttacttgggtgcttactaaacatgcagrttcctaaattcttctccaaaaggttctgttccagagcgtcctttgtggggcctggccattttaacattttcaccaagttttgggggtgattctgatgcaggtggcccacaacctcacactttgaggacatggtgtttactacatcagtgatttggcacctgctcactcaatagcttaaaaaataatgcatgactcaaatgacatcctaaagaggacatacagcttgagttataatcttatatccgtaacatgtcttcaggaaagtaaagcttctttatgttttgtttcactaactgctttatatattaaaagtgtgagtgacattccaagctaggttgaagtgggcactaaaaccttacactggaatttctttttcatactttattggaggccaggtgcaggagctcaagcctgtaatcccaacaattcggggaaccaaagtgagaggattacttgagactaggagttcaaggcaccagtgagctatgattgtaccactgcacttcagctggggcagagtgacatcctgtctctaaaaaaataataataaataataaaaagactctattggaagtaaagatattaacttgcaacaacaattctagcacaaagacttaggttttccaaaaataagcagtgagaaaaataagttaaccaggctcttgaactttgacattttttagattgtgtagaatgattgaaataagtttccatttgccatgcaggtgtggaactctgcgattggagtagagtgtttattccttgttttgattcaagagatatgtagcttgtttaatatgccataagtaagggaaagcatgtaatataatatataggacatagctcaactttgctcacacaaaggttcaggtgggtgaaccttatggcaaattaagtatgtgtagaaagtacttctgttagccaacttttagtgaatggatacataaatgaaaaacagagtatggtttagagcctgtaaaaatcgaagttatttcaaaagtacagaaacaaaagattaggttattatttttcttaatgttggagtgaacatacactttcaatattagggctaggtgactcaatgaaaaataagaattattataaagaaacataaattaatggaaagtatgtataggaataatacacattttagaaaataagaaataggcttgcaaggcactggtgcatgttcaggatttatgtttttttgtgttcttataaatattgattaagtcacattggtttctaatgcttatgtacaataaaacatgcttttacactattgcatgtcaagaagattgccctcttaaaatttaagtatttgggaaaattgtcttggtagatgtataatatattaagaaattaaaccagaattgtaagttacataaatttttgagtgactaggcagtaatatttcaaaaggtatttcagattttaagacatttttatttttcacagttctttttgtgatgaaatatatcatttttattttaatattgaagatattgggggccaaagcatggaaaacattttgaaataaagggcttttaaaattctttttgcatagtaaagaaaattatctcatttccagtaataaaccacttagtttaatttttaaaaaggaaaataaaatagtacttatagaaactatgagactagcagctcttgaagagaaaatgccagtaacaactagcagtgccaatatgattacaaatttacttaacagtataaattagagctttcacaactctgaagttcttttcctactaaacaaaccttggaacatatggaaaaattctctggctggcttaatcacttaacttgacytcttttcattatttgcttggtctgtcctcaaaattaaaaggaaactattatatttcatgatgtaacatgcagttcaattatcagtaaataatttaacaagatctgaaagagattaaaaatgatttgcttaacagctttggttaactagcatcaattgtattttagtgaagatatatttagaaaaagctaaatatatagagagaagtacttgctgaatcagccaattagaggcagtatgcagagaaccagtgagctgaaaccaaggattacagttaaacatacttctcctgagaacaatgtcatcatttcatctcccagtatgagagtctatctaagttgactttcagctatatttgcaatggcattatgcacatgccttgccatgattcatctattatggaatttgagacctcttggtgaaagggatgattcctccataactacctctcaccacgtgtctgctggcaaggaaactttgataggtcctttgcaaagtagatgactcaagtgaattgcactaccaaatgatttggtcattgctagatctcatggagtgtacaggtgcccattatgtgtttgaatggctgctaacctaaacttgctgctctatctttgacaaacccaggggccatacacctgcccccttgattaggaatacacaagtttacacagtgaaaaataccaccttattcctagtagcacaattttcagatcattagggaatagggtaaagaaggaaagctataaaagtggaattatttgcattaataaatattttgtgagttgaatactttttaattattgatgtcaggatgatttagttaccactaagagatatttcactaagatactttttggaactctgattttgaagcctattagataagcaacaaaaataatggtaatgttggatgaaatggtttcaaatatgtggggtttggaaaaccttcagacatgacttttgaagcactttgcccctcaatatttggagttcatgtgcatattaaaggtaatttaatcctgactcatgcrtaaatcattaaaaaattattttgtaaaacatacrtgatttttacatagaataatatttatttacattgttactagcatatttaaatatatatacttttattcagaaaaatatgaactactaatatcttaaatatgtactacagtgccctaaatgtggtttaacctttatgtcttccaaatgcagtacagaaaactactgtttatttaacatctaagtaatcacaaattcaaaactgaatagttttcaggattttattttgtaagaaagtagacttgtagatataggaaacatcccaacaattttcattgtcagtacatattcaaacactgtctaaaactttctaataaaataaattacaattagtagttatgatcagtgttcttgattgtgactttaggatcctaaagtactttactggttcatgttttaattcatttactcattcatgtatatggtaaacatttgttaactgtcagtcacaaaggatgcaaagataaatcagatatgaaaccatatctgcaagggaaatagatacgttactaataataatcatacattccaataaattcgtagataaagttaatcaaaggaagatcaaactatagtttaattcaaaaggctttttgccatactttagttctttaaaatttacttaaataaaatattcagttagattacccagtgtccccaccatcctgaaaaaatgaaaattgatgtaagtttctccatctaataaaaaacaacaaacatttgtaaaaaaattatgaccaaatattaaaataaaatatatctgaaaaaaaagttgctatgcttagctggtttgggatattgttgtaacttttctaatataaattatactttaagttctagatggaaaaatgtgataacttcagaaatgtgagctctgcttcattggtttctatatatttagggataaaatggttgagtttgccacattaacttgttactatctatcttcattcatactaagaaacatactagtgattattaaagaagtaatagaggcaaggcacggtggctcacacttgtaatcccagcactttgggaggcggaggcgggtggatcacctgagctcaggagtttgcgaccagcctggccaacatggtgaaaccctgtctctactaaaaatacaaaaattagccaggcgcagtggtgggcgcctgtaacaccagttattcgagagactgaggcaggcaaatctcttgaacctgcaagacggagattgcagtgagccaagatcgtaccactgcactccagcttggggtacagagcgagagcatgactctttctcaaaaaaaaaaaaaaagaagaagaagtaatagagaaaagtatgatatatttataaagtgcagacaatgagaaagaaattagcccatcagaaagaatccttaaatctctattaatcaatcatttatttagtattgaatctcttatttctttagcaaaaatttcttgagcactcaggttgtgtcaggtactatgttaaacaccaaacagtgatttgcaaaagcaattttgcctatataaaaccatgaatacaaaaatcaattacttttttatatttagggatggattaaatgatagagttttgcaaaatgcataattataaagaatgtgatattgtttaaaataatcaatttaaaataaaatatatctgttaataaatatagaagtgattttgtatatagaatctataaagtaaatttttatattaatctaacaaataaagctgaataggttggcatttcattaggttagattaaattgcatgggaaatagaacttagccaagagtatgccatgagttgggaactttcagggctccacaatatagtcaaaatcatttaatggtcacaacaaatctgtagtgtccagtatcattccctatcacatttccaggtgaaatgtgcatgtaagagtattgtctaataatgaactgtaaattgctttaattttttgttaacagaaatcctagtaaattatcattaatatgataaggagagttttaggagttactgtatctgttaactattttcaactcttccacaaaaaatgtgtacaaaaaaataaaaaccaaaaacaaaacaactcttctttctttcaccttgctattaatacttgataataattaaagctccactgagaagattaaaacacaaaatttatttttaaaggcagtataatttagaatgatttgtggaattatatgactatagatacaataaataaagaaatatttatctaacttataaatgcctaaggaaaacattttagtaattctatgaaaaaaatgtaaatatctaaaatcaacaatttttcaagtgaaaatgacataattactctttaaaaattatttactcatagaaaatatgtacatttctagaccaagtgtgttctcataatatagatctataattcatattgaaacatcccatgctgtgaatataatgctatataataacccaaatatattgtaagcaaaagaggcttttcaaagttggaattgttcaataaaaatatgatcttagtagcagtattttctttgaagtttttaatttatcatggaaataattttggtcattagcataatattaaattattacattcatcaatatttcaggtcttgacccctgaatttaagaaattcttaaagacaatgtcaaatatgatccaagagaaaatgtgatttgagactggagacaattgtgcatgtaagtattgggaaattaaattttctcatggtaaaatttaataaaaactaaaatattaacttattaattactgaattaaataaactgactcattgttttctgtctataacaacactacttttattaaaattaatacaatgattcatggtattttggttatatttttctcaagatcgtctaataataaaaacccatactagcctatagaaaacaatatttgaaagattgctaccactaaaaagaaaactactacaacttgacaagactgctgcaaacttcaatttgtcaaccacaacttgacaaggttgctataaaacaagattgctacaacttctaggtgagtcattggcgagggctagcaatggcacaaattgtgtgtgacaattaatagtgtgctgtcattgaatgtcataagaagaataataagcaaaacctgtgaacacgtaaaaaggtttttataattatttttcccaaattagccctgtcataaaatcattactagtttcctaacaaaattaaatctaagcttacaggtcagtggcaaatatctgttgatyggaaattttttctctcctttaaaaatattgtttgcgtgttcagtgtattagtccgttttcatgctgctgataaacacatacccaagactgggcaatttacaaaagaaagaggtttaatgcacttacagtttcacgtggctgggaaggcctcacaatcatggcagaaggtgaaaagcacatcacatcatggcagcagataagagaagagagcttgtgcagggaagctcccatttttaaatccatcggatcttgtgagccttatttactctcaggagaacagcagtggaaagacccacctccatgattcatttatctcccactgggtccctcccacaacacatgggaattatgtgagctacaagatgagatttaggtggggacactgagccaaaccatatcatttggttaaatgaatattatattttatggctacatcctgaaaatatgttggagtaggttgctcctggacttcacagggtgtaagcatttggaaaaacactccagcatttcttgtctcttagaattaggaagctagtgggtagcattttagaggccatttttcattagctcagaattgtacttagtattaaaaatattcaaacaaatattttattcgatactcttcactccctgaaaccttatttgaataatgtagatgacttagggaatcttttatttcctaattttaaaaaattgattttcagtagtgaagaataatttctattaaattataaagacattttaatgatgtatagatgttgattctcaagaaattgagaacaatttccttccttaaattactgaagagtcagaaaattgaaaatgagattaatacttacaggaaataaaggtaagctttataataaaatatgctatcaaaattttttatgtccatgaaaaactctctattgtaatacctttataatttgatcccaattttggtaaaggcaaaaaatgcaagttgttttctaattacttatctatctatctatcatctatctatctatctataagaagtttttctgtttgtaagtctaattaaattaaattaaaatgtatttataagctccttaacatttgacaccataatgttcttaaacatttgacaccataatgctcttaaacatttgcagttttaatatattttaatctgctgggcagggtggctcacacttgtaatcctggccaacatggtgaaaccccatctctactataaatacaaaaattagctgggtgtggtggcgctcacctgtaatccatctacttgggaggctgaggagggaggatcgcttgaactcgggaagtccaggctgcagtgagccaagattgtggcactgcactaggccttggtgacagagtgagaccttgtcttaaaaaaaatgatttatcaaatctttaaagtaaaattattgaattattgtgtagttttaaaataaattttctgttgagaatcatctgcatttatttcataaatattgatgaattatatttcttttattttctgttgcagtttatgttatacagcatatttcattttggcttaatgatggagaaaaagtgtaccctgwattttctggttctcttgcctttttttatggtaagcataaaaatatatatgattatgtctgttattgcttccagtatacctataattgataaagaatattaatgaagttactagatacagaaattagttacatttttatatccaattgatacagcaataatgtgttttcattcggtgtatgcttttagtcctataacaggtatagaatgagaaggaattggaggggatcagaatgggaaagatgaatacacacatgcataagacaccagaggaaagtaatcagagattgaaaaaaaaatggaatgactctatggtacatgttgtacatagtagagaaaatattttcaaccagaattgtagattcagagttagatctgttaaaaaatgattctctcattgatgtttctcccgttctgccagttgattgacatatcttgattgcaaggcaatttagaaccatacactttgttttaaattaatttcctcaatcattcattcaaattagcagacattgatgttaaatttgaggcaagtgtgtgcataagtctgcacactcatctgcccctctacatgtatacaatggggatatggggcccaaggtggaaggtaggcaaataagacaaaaactcaattgctctgctggaggagtcacatacttcatacacttaattttatgtttaattatagtaatgaatcacccatgtttttctctacctcaaaataaaacagtgactgtgctcttatctcattataaacatgaaaaaccaagagacatactctcatctaatcctgtggcagctaagaattttcttgaggtgtttccaagcaaacaccacaaagatggaaacaaagaaacttgggagaatacagaaaacctaaaccagaaaaaaacaaaaaacaaaaaaacaagactacattcctgtccgcatttgtatttgaaaacattttcaagtctaggagcaaatatttccaagtctaggagcagtccaaatcctgcacttcttagacggtatctttaagttgacttaagctcacaccctccactgagcgagctgcatagaacattactttcctgcaggtaattctgtaacagattagcaactgattattgtaattaagaaattgtgactcttcctcttgaactcatgtaagatcgtgtacaaatcagagtctgtgttccaagtagggataaaaatcatatggatttttgcaattttatggactttttgggaagaacaggagttacgtgcttttcaaatatattaattttctttatgttctacatttccatgtattacttgtgtagcactaccactgcataaatctttatttggaaattaaaacaacaaaggaatgaaagagttattgttaaatggtggtcacacaatggtaaaacttaagcttgagaggtgctacccagtgagggaatgtcattttgattttactaaattcaacttcctgctagaaaaaagaaatactacaatgaggaggcaaaggaaggataggaagataacagcttatgggatatagttaatagaaattatgcaacaattactgctaaaagtgttaaaaagaggtctattcgggcttcatattataaatcagaaaaaaagtcacgtggaaactaaagtagaattgaagcttaaaatagtgctactatattggaagaaaataagtatataacttgtccaaaaacattattgatgygcatacaagaaaaatttctatttaccaacatcataaatgatgttgccattattttgattatcaaaatatcatgacaatggcaatacattgtaagtatttccatgtgccagatacgtctcctctgttatcttgatgctattttatactattttacaataaggaagcagaggctttgggggaggggacagacaatatcttgccttcattcatagagccaggaaaaacattcgggtcagattggaagacatctctgtctacattccaaaacacatattaaggaatgtcctggagctggctaccacaggcttctgagaaccaactgtggtttcccactctgccaatggtgacatcttgttggtgttttgaaattggacatggyggggatatttataccayggaaatagcaaacactacaaattggggttttttccctagagcgccagtttatcttccagtacatcaccgcacttgctgttttctactgtgacagactgcctttgacaaacacattttcataatcyttttcatgaagttgatgttgttgtttttttaatcccttagattcttgttacagcagaattagaagagagtcctgaggactcaattcagttgggagttactagaaataaaatcatgacagctcaatatgaatgttaccaaaagattatgcaagaccccattcaacaagcagaaggtaagcatggctacttagttgtaaatgcatttgacatatttttaaaagaaaactactcccattatatcattataagtgctttaggtccattattaaaaatagattgctacctttttgtatatgtgcagttttaattatgtttgaagaacattttatgacatcatgttatatcgctttttaaaaacaataaaaatatgtgacagtgatctttttagtatgattctttttatggtacaaagatatttaaatcarataagtattaatattaacacaaaaacacaaatcttaatgacagttgactttttcagtttatgtaattgtgtatttcttttttttttaacaacctgcttgacaggaggttgcctaataatataatgaatacaaaagtgttgtttttcataacacacacactttgcatagtacatttggtggcaaagttaatgaaatctaagtgcttctgtttgcattaagatattcttttgcttttttggataacattcattgagagcctgctaagcaccagatacttgactagattctgaagataaaagatgagtagcacaagcagagttgccagataaagcaataacaaaaacaggtcctatattttacctggcaaccttaaagaaagggttatcttcaaaatatcaaatgtaaaactcacagtaaaataaaatttaacactctttagatatttttaactttgaaacccttccaagccttcttgctgtatattatgtaaaagtagattttaaatttaattgttgaacaataggaatatctttgtaaagtttcataataaaagtattctgtggtaagagaagtttggaatcattgcataatacaccttcttgaagtttcataatgtactttgtaattttaaatactctagaaagtcttgcaataaagagctatttttatttcaactttgtgtctctaaaatccatttgaccagagaaacttttttcatggaatacctacttagatctaactcaaatgccataaaacacaatttcaaaaattctggaccttgcactctatcacattaccaatgctgtagtgaattagatacttttggagctgtgatatggacatatctgagatgctttctaaaactacatcaagaaatttttttctaataggccataaaatgtattttatctagaaatatatggattcaaactatttaaataattgtccaaaaaatgacatagcagaaaacattatctggggaaacattaaaattttgttggtttttatttcaatttacttgaacttacaggccatcagaattttgttctattttcatgagggctagataaatgccgatattgccttgcaaatctgttaaaaacaataaacatctcatgcagcaatcaaggttctatctctatctgacaagttagaaaattacttttgggccgggtgtggtggctcacacctgtaatctcagcactttgggaggccgaggagggcggatcaagaggtcaagagattgagacgatcctggccaacatggtgaaacctcttccctactaaaaatacaaaaattagctgggcgcagtggcgggcacctgtagtcccagccacttgggaggctgaggcaggagaatcacttgaacctgggaggtggaggttgcagtgagccgagatcacaccactgcactccagctggcgacagagcaagactcagtctcaaaaaaaaaaagaaaattacttttttaattatagactgttacaacattagaacattggtcggttaatttacctacgccttaaaaaaactttatatattttaatgtaagaagttctttatttaattttggagaaaaatgtgagattattgaacattctaccttatttgaaaagaaaaggaatgaagagtcagaatttggtggaggggcctaaataagtatctttcagggttacaatggtataataggaaatattggaatatttattggcttgcttcagaaaatactaacaccttgccctaagcatacagtttctaaaattaaacatgtttctaatttcccattgttttcttattttaagcatagggacgctaatcactacattatggctaaggacaactagcaaagaccatttgatttattaaacaaatagctacctttgacaattaaaattaaatctaaactttatatatttagatatttttaaatttaatttagaatttaattgagaaattattataatattacttggtgggaagccaaataatttctatatatagattttyatataatgtctgcattttcagtagatagcctttactccacatcagtgtgaaaccacttttaaaactatgtcttcatgtataartagaaggatttaattatccccaattattatttccccactaaggcgtttactgcaacagaacctgggatggatggctctgctggaacgatgttgcagcaggaactgaatcaatgcagcyctgccctgattactttcaggactttgatccatcaggtaaaagcagaaatgtatctacatatctccttgacatctatttaataaatcctaggttaattaaattcctgttttccctttttttttaattttaaagaaaaagttacaaagatctgtgaccaagatggaaactggtttagacatccagcaagcaacagaacatggacaaattatacccagtgtaatgttaacacccacgagaaagtgaaggtatgtcataattctgaattgaaatttaacttacagtatctgtttaaacagctcctttgtccaatactgtattaaagaaaataaagtcattattccattcccttataaagccttttcataatataatttgagaagaataaagaagaaatatatccgtggaaaaaattattattgattttgtcattacactgaaaaagcaatccttttaggtaatagtgtaatttacaagtcaatgtttcagtattggggtttcaaattttccaaagaaaacataccttaaaagtgtaagaaaaggaaaatcttccatttgcagtggaatttctagaatgacctctgaaactgtgctcaagtaaacaggataagcccagcagggtttaaagagtcctgtccctccctcagcagaaggatctcattctgactgggtcttaggttattcgcactaactatcgcatccttaaacactacacattggagtcaaggttaattacagtttggcactataatatagcttcgatagaaaacacttgcatgtatttgcatgtgtttgtaatagaggcagtttatcacagtgattacaactgtgagtcctaaaacctgatttcttatttctacttcttaccagctgtttgaccttgaaaaagccattttacatctctctgcttcagtcccctcatatatgaaatgagggtaagaatagattccatcctcattattttcataaggattgatttaacacaagggaaatacttaaaagattagcatatagtaagctcttgataactaccagctatcattatgtttataaataacatattcccagcttattcaggtaagaattggaagagaattatacaaatacacaataaagtggtaggttacaaataaatggaatgcagacaaataaaaataaaaaagtgaaaaccatgagaaagaacacatttgtacagatcatagaatcttctaagttaacaaattgagatttgtctctgagcttcaaatttgtcaaaggaaaaagaaactcagtttgaaaataaacctttatctggcatttacatctgaacaaaacaaatcatcacgtagcatttgtttgaaggtgcacaaaatataaaatactagtttcatatagtatataatctagatcaataaaagttttgcctcatagatttaatatttgacttctaattttttaaaaaattattaaaaaaataaaaaggcatacaacttataaattttgataatttcactggatagatrtttttcattccagacacgttcaagtatttattggtttgtaaactcatcattgtaaggctatcagatcacatatttctaaaaatatagtttattcaactgaatttgaacttctgcatgtgtgggattacagatacttayagtattgatatgaaccaaatttttttgtttatacaaattacagactgcactaaatttgttttacctgaccataattggacacggattgtctattgcatcactgcttatctcgcttggcatattcttttatttcaagtaagtaaatttaaaatattttaagaaaattacyagatgtcttgggygaatgccccatcatgtgcatatttacatcatgtctgacaaaatataccaatatagatgatttataatgtttaaaataagttgaaataagttgatcttagctttgtaaaatatgtagaggagactgatgaaatatcttaacctgaattttacaaaattagtaggcatataaaagtgaagacatataataagaagggagtccaaactaatatataaacctaactgtatttgctttgggaactgttaaatagtataggccttcttaattgtgtgtttagcttttggacaattttaataacagaataagtgtccattttagaaaccggaattttgtgcaaataatagcaaaggcatttaacatatatcatcaaaaatataatctaaatacactttgtttagggtttttcctcgtttggcgggtcatcattaaaaaggtttaattgtactttcaattttacttgtaattcactccattttgaggaggaagagtcagctccaattttttgaacaaagcaatcaacaaccaattttaaatttatagaaagttaaattctaagtcatgcatgcattattttatcccttcacatgattttcataactttgatcatcagcatatatataatcatagaattcagcgtgacaagagtaagtagctatgtttcattgtatcttcatcgcattgtagtcatcttctgctccttttgctcctgtggctgccaccgccactgctgctccttctctttcttctttcttcttctccttctccttcttcttgttcttctttttcctcctcctcctccttctctttcttgtttcttcttctccttctccttcttcttgttcttctttttcctcctcctcctcctcttctcttattcctcttcctacccctccttcttcctccaacttccttcttctactaattttaaacaaagaagatatatatacctataattttaataccctattaagcaatttctaacatttttctagttttatttcatattgtttctacagttttaattatagtatttaaaatattttaactatttttataacagcattttatcattagcactttatatgttactgaacagtttttaaacaatcatttgagcagctaaataatttttcatttagtaggtgtacaaaagttgttattatcaattctctattttcgaccattaacattgctttcattttttcaattaaaaaacactgcaatggacatttttgactataacttttcccatagtttgtactattttctcaggctacattcccagagtcttgggatttcttggtcaaagggtctatatctttttatggctcttgaaacacatcatctcaaaaatatttcaaaatgaacatgttcaaaacaaattcatattatctacctcctcctaacccaagctggttttcttccagagtgacccatctttacaaatgacactaccagaaatccaatcacattggccagaaatttaagagtaatctgtgatacatttctctcatttttcttctctgtcactctttccttataacctgtgaacttaaccttttgaaacccttctaatctattccatttcctgatcactactgccatcaccagcagtcttgttctatctagcctcagtaaattcactttctctcttcatttaattctaaccaaggcagccagaatagtagtttcaaatatttagatcaaatattgacctgattttgccattctttgctttaaaatttttagattttccattgtaattaatataaaatcaaaatcattaacttgccctgcctgttctctttgcctcctccctagtctaattaaatgtatttatcttttagatttaaattttagcatcacttcctcagtgaaatcttcccgaattacttactgtaatatttccagaattgcaattaacgatagtagacatagggtaaaattttaattaacatttggaagaccactatctctgcaaattaaaaactaatacagctgaaagtcttcagattaaatggtctctttttattttgcatgtcataagttgaaatatccgagcacattaaatttttgaagaagataaagttgcaaagtataayaattacatttgcctgtcaaaaccagtggctacagggaaggacaatggtttctagaattctaagtcatacagtcccaaacaagttagaatttagtaaagataagtaaagtcctgcaccaatttcctaaagtcaaatgcaaaattatttatgttccttcatgtgaaagagtctaagatttaatggaaaatgcttgctgtgaactaattagataagagtagggctgccaagtgaaaacaatgctgcaagccaaatgataccaacaaatgtagagtattcaattttaaatctcaaatcagaccacttattctcctagttcactatatgagagcaaaagcaagatatcataaaaattagcttatcaagtgaagaaattgaagaaaatatcaactgatccgggcatcaaggtaccacaccaagagtgttaagccagaaaaagacaaaatatataaggcacaatgtatgatttcaagaatccaaattactataattgagaatacagttggtataataaacagagaaaaaaatagctcaattaaaaaaatttaaaaaaacgaatataactaaacaaaatgtaatgaaccttgcatttgccttcctgtcactcaggaaagttgaagtagatggctttcctatactgggttcatagctagacctgaggatctttaatgctctttccacacccaagaatctatgaatgaaacagtacttgaataaagaggattagaatgaaagagttatctttttaatcaaaatatataatctccatatcagggaagttggtatctgttaaagtatttggcaagcttaaagcagtctacacacataaactgtatttcttattgataaagaattggaataaaatcatgttcaatatttttatatctgtatttatgtatgttttattcaagaacaaatactgttcaactgatattcacaagtaattttaaattttaattgaagggttaaaatttaaaaccagagaatgtttatttcatctatagagaagtgctttttaaaaatgatattgtgtatatatttacaaaattattaactttaaagatgtaacctgtaggcacattcctcattccaaaagaggccagaaatttggttctcccaaatactgtcctcgtgttttacatataaataggccaattttttagaaaaataatattttttaaaataaagattactatgtgcaataaatacatgcatttgttatttgctaaaatgcccatgcttttaaacaagatgtataacatgctacattggcaacactttgttaaagcaaatgaatgtcttgccaatataagaaatttgacctctacataaaagaaaaaatatgtttttcaaataattaccttacttccacttgaagttttcactgaaagtacaattacctgtttattctatatagtgaactgaaaggaaaaaaaagaatttttcagtggcaagttagtataagaggtatgcagttgaattcaggcataactcaattttttttttttttttttttttgagacggagtctcgctctgtcgcccaggccggactgcggactgcagtggcgcaatctcggctcactgcaagctccgcttcccgggttcacgccattctcctgcctcagcctcccgagtagctgggactacaggcgcccgccaccgcgcccggctaattttttgtatttttagtagagacggggtttcaccttgttarccaggatggtctcgatctcctgacctcatgatccacccgcctcggcctcccaaagtgctgggattacaggcgtgagccaccgcgcccggccaactcaattttaatggatagtataatacaatgattaagacatgggatgtattccaaacttgtcatcactacttgctaatagtatggacttagcctgattttgctttaaataagccccagggatgtgtgtgtgtgtgtttacagtgggtcatgatgttattgaaaatactacgcaaagtagactcatatagtacctggcatttaggagcccgtcaatgagtagtaagagttactgattttttcattagactatatcaatcatataggcactcagaatacatttatgtagtcatctgaaatactcatataatagtaatacaaagtaaaataaacaaaacaaaacaaaaaaatgagtgctattctggagctacaaagacctggggaacactgagaaaggaaagaaccattctaactcatagaatctgaagattcctgaggtgatactctaattgaagcaaacacttcaatgatgggtaaaacttcaacagatagaaattataagccataagcagtgaagagatcatctagtctcacacctaattttacttattttctaattaattaacattttcaagatttctcctgatctgtgttctagctcacttcattattttaattgactctacaaatctttaaaaatgaagaatttgaaaagagagaagcaaaactgcaaattttcctttattattatcattctcaggccttaggtaaaacatgagaaaccgtcttcaagtaaaactcatgtatagcattttaaatactttctgtatgtctagatgtcattacaggagagtgtgttctttctttctttctttcttgttttagagataggctctcactgtgtcacccaggctggagtgcagtggcaagatcatagctcactacagcttcaaacgcctgggctcaagcaatcctcccccacccagcctcccaagtagcaaggactacaggcacacaccaccacacccagataattttttaaatatttttttctttagagatagggtttgattatattgcccaggctggtctcaaactcctgacctcaagtgatcctcctgcctcagcctcccaaactgtcgggattacaagcatgagccactgtgcccagcctgagagtgttcttcagacaggcagtattggtctcaaattccactttgtcacttacttgctgtgtagcgtggaacatgttctttcatttttctaatcctcagttatacatattaaaaatgcagatcatattagtatctacatcatagatttgctataaaggctgagataatggcagtgttatcagtgagatgcagtgttaagcagagcgtctgattcaaaaaatgttatctatgattggcattgttctcacttcttattagtccattacgaggtttgaatataaatatttagccctggtaggtatgttataccattaagatctttaaaaacaaaattaaataatacaagttctggttttaaatggaccatgtttataaagaaaatattcatgtagaaaaataagtaaacattgaatgaacatttttataaacaaaattaataattatgttagaaaaaactatggttaagtaaatcagtcaaaagtaataagatttttttatgaccggaagataccgtgtagcttactcaatttttgaatcaatattaaggaatttttagtctttgaatttagatacttctaacatttattccatagaatgatctaccagatatgccactagaattaacgaaaataattttataaagctagctttgtgagagcaggagtctcctctgctttgtttctttacacatctcggggcttagcataggatcttgcacatagtaggcactcaataaatttttaaggaatgaagacatgaactggctttgaagcttacatataggacagacttgcccatgccttatttgtgaccttcagcatgtcccttaagattgtctggccttatttgtctccatcaacaaagaaaggcattagactaagactctaaaattcaaatcagtagaagcatctgtgtaaaacaagatgaaagactgcagctagatccaaagaagagtagggccacctcagaaaatattgaatttgaatggttcatgaatcatgttcttgtggagtcaggggcaatagaaattattagctttcatccaactaacctgaaaacaattcctagaggagctgatgtttcacataaaatcattcactgtgtataaaaatactattagcagatcctttctgtttcttaacccagttccttatactgtacttattcttgcttactcggtatgggaaacttttttcctcttctttggtaattgagggtcactgacccaccctaataaaaaccaagaaccatacaaaaagttgatttagggtactgtttgttattttttatttagagagagaaaagtctaccactcatccattctttaaattagaaacagagaacacaaaacagtattcaccagatatacttcagttttatattagagccaattaaaggaacaagtcagagcaggagataaaaagaaagggaacagagagggaggggaaaagagaaagagacgtaactttagggcttgccaagccctgagaggcaatgactcttactcgtaatgattcttggaaaaacaaagtggaaccctttagataaaaaaaaaaaaataaactctactggaattagttacaaattatattttaattaccgtttaaaatcagagagcagagcaaatctcacaacctagacaaaaggcttcatctttttccacagaaaagagagcatatgacatctacccaacttttatagggaaaaaaaaaaagaaaatgttgttggtttgtttttttaaagaacgtctttgctaacattcagatactgaccccaaacaatttaaaagccaagttgcatatttggaactatgtagacaatgatatcttttgtaggtacttgccataggtcccaaataaaattcagaaaaaaataacctctatccaactggtagaccaaagcattctcaatttaacttattaaaataacctgttagtgcttgtatttctgcttctcagtacaaatgaccaaaattctcattttttcttagatcacatctgaatatatttaaccaatattgtgacctgttatctcatttccagtttcttcatatttttcttcaattagagcaagtacagtttttctttaagctataacttttctctgaaaattgtgcacgattaatcttttctttaaaaaaaaaaaatggagtcttgctctgtcgcccaggctggagtgcagtggcgggatcttggctcactgcaacctctgcttcccgggttcaagcgattctcctgcctcagcctcccacatgattaatctttaaaccatatttaaacacagctaactattaatgaaatcctacgttgaaacctatagagtttgctctactaattactctgatgttgtacctgttttgacaaattggaactttcgcttttcatttatttaaaacctggcaatactgcactgtcagaggtttgacaaggactgagttcaaaagtagtcatctagtattccctgaacagcatacctgtcactgcctacccagcatcacccttgctctcttaactcacggtacgtccatttattcattgtaaatttgttatacactatggtcctgagatatagcctattctgcggtctgtatcccaggctttacattagatattatttatttaacttttttttttttttagacggagtctcgctctgtcacccaggctggagtgcagtggcacgatcttggctcactgcaagctcccgcccaggttcacaacattctcctgcctcagcctcctgagtagctgggactatgcaggagcccgccaccatgcccggctacttttttgtagttttagtagagacggggtttcaccgtgttagccaggatgatcttgatctcctgaattcgtgatctgcccgccttggcctcccaaaatgctgggattacaggcgtgagaactataggttttcttaaatgttttattgggtctatctccaaattaatgaattttaatcagttagtgtacataaaaatccatccctctccarctgaatgttgtgagaggtgaaaacattcttatgccataaagtgagatggtgccaaaatgtttccaatatgtccattttagttatataataaaataattgcatttctacataaagtatacggtttgaatgcagacagagtagtgcaagaagtaatggacatgctttaacattaacctgtctgctataaggtcattgctattactggcttatggagaagagtcccaggtatggaaatataaatacagtaactgaattagataatttggacttaagatataaaaaatataaagctataaatccacattaaatatcacatatctttattcctacagatatatttgataaatatgcamattctgaatcatgaatttaatcttttctgtttgagctaattaaatgtgctatttaatttaagcatacctaagttttcctggcaatagaatgacaataaattttgaaaattatatcattatttgaatagattaaaacttcgttatttgaaatagaaaayagaaataaataacattttttctcccaaaagtcataatatattttacaatcaggttttccattattatagacagtttatttttctcgatcatacccacagacatatatgagaaagtcaaagcacactctcaaaactgtagcatatttttagtatttaggaaaaagaaaaaacmgaatgactagatattatgctgctaatatttgctgatgaaacattaagatgtcaaaaaccaagaaggtcttacatgaaagagatrggaataatttaaaaacagaataaagtaaacaatttttcattaattgttaaaaaagctatataacacaaaagagtatgaacttcagaatcaaaaagccattcagtaagtgatgttctttgaatttaatttactcattctgtagaatggaaaaaaagccatggtggacgtttaccttgtactctgtcacatggcctgttcttgcccctcagaaactttaagctcagggctttgacaaacagggatgtcttccccatttggaatacttctctcctctatactctcttgtttcaactgtatgttaagtattcttctcaccctggccacattctttttgtatcccttagtcctgttttaatttctaaaaagcacataccactatctgggattacattgtttaatttatgtgcctatttaccctctgctatagtgtgagtcacatgaggtcagggttttgctttgtattattcacaactgtttccccagttctagtaacagtggccaaaatattactatccaatagtaagtgactagatggattataaagtagtcagaagccttattgcttccttgagaacttcaaaattcaaactcaatagatcactttttataagagtgtaaccttgagaaacttacctccattttattaaaagacaataatacttcaaggagttgttaaatatgatagcaactttaaagtgcttatctctatgctggggatagtctaagggtttcaaaaatcgtggctgctattattataaattttgcctctaaaaaggtttttgtttggttggttggttttggagcccaagaatcacaggtattcagaaagactttcttctcttggtttcctgctcactagaagaccaggaaaagcagtcttaccaaagcagttcacaaatggtagaaaatcagttgtccatacaaaatggacatggctrttccttatgcagtctgatactactatatttcattaaataagcagcccaagggcatgggaagagggagcataatggaggaagagcaataatttatcctctaggaccttcattgagcaccttggttgaaatactcaccctctttctaatctggcctaatctaatttggatcaccagcagcctccaaaagagagstattgaaagaggttatatctacttctcatatgtaaacatgtgattccatcaacttgagagttccattgaatagacaaaagatagtcacactactgattcttttaatatacttgttgttttctgcctatggtttgtggcagtgttcagattgacagggctttccttttggatatgttgctagtgttttttkggggaaaagatctgagaatttggaaattaaattagataagctagaataagaaagcaatactttgtagactgtgctattcttatattgcttgtactttctcctttcatgattcattttgctcataattagtattgagaaaagtagtttggaagtttttagctcatgtcaaaagcaaatggaaaacagaggcaaggttattgtccatactagtggcagaaatttgaagatgaagtactataatatttgggatctgcatgatagtgaacctggcaatttggcaacaactatagaaagaatgaaatttcctgggaagataatttaggttgctttatgtattgcccttcatcatatggaaattctgtctaatgataattcttgtttggtaagaaaaaaaatgactatttttctgtttgattgagttacttaaaacatacttattttaatatagaggaagtttgacattactgaggtaaacctggatgctattttagtatttgtacctaaaaaccattagagcgtttgattaaaatcaaccatatgataattatgctaaaaaacaacagctaacttaacatggagtgtttatcatgggttagatgttatgctaacattttaagtgatttatctcctctaacttttaagccaatcctatgaagtacaattgttagccctaaattacagattaggaaattaaagattcaagatcttaaataatttacccaaagttataccatcaatagatggcagagttcagattcactgtctgaactacacatagtgacttgacgctacttacttctaaaattgttccaaaagtgaattgaaagacacggtttcattacatataaagcataatgattttgttgacacaataacatcaactgcctctgtaactctgctggccaaaattgcatgttgaaatggcattttaaatgttgaaatggcattttaaaataattatatgtaaaaaatatgaaatacaaacaatctggacccacaaaccccattttctgttctgtggttatgcggggatagaaagggatattataaaatttaaagaaatcgaaggatttttgtaaacattctctaagactctaagataattgctttcactattttgaataaaataagaatatttaagaatttaaagtaggtaaaattggttacaggttaatatttgaaaaaatatacaaatattttagggcttcatttgaacaaaccatgtgtttaccaattacatgtttttggttttcacttacaggttgattttatttgtaccaatctacttacatgtgttaatgaatatgtttagaaggaaacaatatgcatcatcagaaaaatcagtgccatttttacactagacattgatagaaaccatatgttacttagcatctgtctgcatttgtttaagttgcacagtgcctggaggtagaaatggaagaaactaaatagtattttaggcagtaggacatatttacacaacacaaaatgaaatgatgtggcgatggtccagtttactaaaatttgggcagctaaactggatatcagaatttccaaagcagcagtctttggtttgagttgtatagggtggactatctagtttgaccacattatttcaataattgtataaaacactytaaattaatgtctttgtaatgaaattatttaatgcatcttcttaagaacttgttttgtcttggtattaaacattcagtaaatttcaagggaatttcattctattatttcaaaactttgcccataatgatattgtttgggtcttaaaaagagaaatatggtatatccttttatcccataataagagaataagatgtcktgtgtgtgtgtgtgtgtgtgtgtgtgtgtgtgtgtgtgtgtgtgtgkggttatactcacaataatgacatttttggaagataatatataccagcagctcatttttaagtacttacctttcaagacaaattgaggtgggagcagggtaaaaaaaatggaattctgagaggaacagaaatatagaccatcatagaggacattgaactttatacaaagaggattaacctttaactgtatacaagaggattaaattttttatcarctaactacagttagcattttattttactcccttccaatcttttcacatgtgaatattattaatataaacagttaaaatataaatgtatttattatgttcctagctcctatctttcagctcttctatcacgttatttattttatttcactttttaattgacatgaaataactgtgcatatttatggggtacatagtgatgtttagaaatctacaatayatagtgattagatcagcataattagcatatccatcttcccaaatatttataatttctttgtgttgggaaaattcaatattcttcttctagctatctttaatttttttctaatttttactatcatgcaatatgcccacataatccttctagctatttaaaactacttattattaactatagtcatcctacagtgatatagaacactagaatttattcctctttttttttttttttttttttttgagacggagtctcgctctgtcgcccaggccggactgcggactgcagtggcgcaatctcggctcactgcaagctccgcttcccgggttcacgccattctcctgcctcagcctcccgagtagctgggactacaggcgcccgccaccgcgcccggctaattttttgtatttttagtagagacggggtttcaccttgttagccaggatggtctcgatctcctgacctcatgatccacccgcctcggcctcccaaagtgctgggattacaggcgtgagccaccgcgcccrgcctattcctcttatctagctgtaattttgtatcctttaacaaatctctccccatctccactctccccttaccctttccagcctctagttctactttttttcttctatgcaatcaacttacttaaagcttccacaagtgagtgagagcatgcagtctttctttctgttcatggcttatttcatttaatgtagtgtcctccagttgcatccgtaatgtggtgaatgagagaagttcatttttttaatggcagaatagttctatttttgaaagtcttctttcatgtttgctttcctttattccaacttacttcttacaaatatatcttacttgctgtttaagcaaaccttctcaatctttwcgtcatagttttaaaactatgaaattttgttgtttatagatatggacttagccaatggacttagatatatgtgtgctcagcagaaaatgacaaaatcgcccagttaagaaaaatgctttactttttttcccttgatggtagctgagttacttatattgtattactaaaaacatgtatatttgcatgrataagcagttcctctckctaaacaatacttggcactcaatagacatggggtaagctcaaagcaggcattttaaaataagaccatatgaacaaatgttatatgtctataactttcataatggaacactgatgaatgacagaaataaaccacacataatataactgatttgaaaagaacattatttactagactttttctgatattcattaactctcttcatgctcaatgaacagaaagtaattatgtcactgctgtggcattttatcaaaaatacgattgtctttctcttagtgttgaatttctctaagtaatagcaggaatcatgmcactcctttgttcaaaagtttcaaagattctttttttctatagaatataatcaataacctgtagataagccctgattactktctgcgtcactactcctatacactacaaagtcaagccaaagtaaaccactctttaatatgaaaatactagctggttccagttgtttctattttgatggattccagctggatttcacwtatttgttggcatatgaatgtcttacacacactcagcaatcattccaagagccatcttgcccatgaatcccttcatagaagtcttgtagaaggaatatattgacaatttataatattgatttggatcaaatatgcctccaggctctttaattactagagctatatatagaatcacagacctgtggctggaagaaaggtaatttcagaggcaatatactctaaactgaatttttaaatatagaaaaccgtggcatcccaccctaattccaatatcctgggcacacagkctatttaagataaagagatttagtgataaaattaggtaaagatctccttaaagtttccaaaatagaagcctttggcttgaattatatatggtggattatataggttgaccatattaatagcatatttaaaaaaaaaacacacacacacatcatgaaattttttgcctctgtagtgaaataattcctcaggtcttccttcatatgagttcacacttgacattaagtattcaggttcaagtggatcccatactactattttaaaactttatccataataagcctttgagtaaatgcattataaaggaagtagcgcttgaacacgggcaggcagtcatatatgcacaatcttcttagagtggaggtggattcaatctaagagtgacatcagttatcattagtgacactttttcttgaaatctactttctatgtgaactccacacagtgaactctcttttgttttatacaagaggaactctagtaaaaggtggtactatttttaccttatatatggctgcaccaattagaaaaattcagtaaagctgtgcaaatctcattggttgctaaatttacatttttatcaattcatctattctgagtactttgttattttttccagatcggtctgtgtaatcaccaccatcacaacaaaacacacagttttatttaaacagaacaatatatatggtgtaatgaaaaaagttatccacatgagaatctgacagcaaatacaaagtgttcaaattaattagctgcaggagttttgatcaattatctaacttaactgaatcccaatgtttgcaaaatgaattaaactattarttatgttcagaaattaatagagaaagtcatgtagaggacttgtacaggcaaattttctatccctatgtatatctacctcttctggagcaactcatttgtctctaggttttaagcacttacaggttttccctaattaagatttttgtaatgagtggatcttagggagaaaaaataattgtttcaaaagtggatcagctgctatgaattgggaatgtatcttatttgaataatgattaataaaaaaacatttcatgatgtcaacacacttgtttttcttgctttttaggagcctaagttgccaaaggattaccttacacaaaaatctgttcttctcatttgtttgtaactctgttgtaacaatcattcacctcactgcagtggccaacaaccaggccttagtagccacaaatcctgtaagtaaaccaagattgtgcccttggttcaagggcctaatgggaaagggggaacatggctgatatatgcataatgtgtataattaagtacacatatatgtatattttcaagtctgacatatatatatattttcaagtctttatatcttggggaatattgagaaatatttacctttctacaytggaatatagctacatatactctacagagtattccctcagagtattctcagtattccccaagatacagagtgaacataaaaaagtgtaataatttctttgcttcaattatttatacatgtacacatatcttcacttcattttatagctgtagagtcctcttgctatggcacataatagtttatcactacataatatttattcaatccaaatgaaaaactcaaagcaatgaactctgcgtaattcgaaaaatagtacacgcacatggaaaatttaaataaattatattttttgtatcaggctgactttmaaaagtcaataaaaccaggaaaagaatgaattgtacatatcctacataagattaaacttcatagcataatgttttaaaaactacagtgttcagtctcaataaatatttataaattgttgccttacaggccatatttttcaaacagtttaaaatttacttatctaaatgtaaatattttgtgtaagctatatgcatatgtaaaatgtttaaattaaaatatctgcatacataaacatacattcaaattttaaaaattatctgcttttataatgtttatgggatatttactatattttgtgtgtgtgtgtgtgtgtctatataaagtgttttttaaaagaaaaaattatctagtgactgaaatcaggaagggaaagaatttttaccaagtgggtcaataaacagtctcatgtgtgttttatgtgtgtttttagagtaattttcaaaattctaaaagtccctgcattgtttgcacctgtgcatccagattgcttaatcttgtatatgttccactctaaagtcattggattagaaaacacactggggtataattagcaacataaaaatctggctaatgtcctgccattttagagtgaatttctgtaagacaargagattcagagttttgtcttgaagctgcagagcatgagattctaaatctcatatttgtacgcaaagatgtgtttaataaacacattataaattgtcatatatttttgttttgtctctgttactaatgccctgcatagaaatatttttctgcagtatgctcttaattcttttttattgtaatggtttatcgattaacttttttaatgaaatcaagaattagaagccgaattaaatataaatacttaaaaactctttagataaaaagttgaagctgaaatttatgatttctctccatatagtagactatctcattttcacctttgagtgaactttaatataatgctgtgttttacatacaggtacattatttaaaatttaatgttacgtattctgcagatacatttaatgaataaataggttttacaaatatcctttagttaggaggcatcgtatataatgaaaacaaaattggaatgttcaggttgtagatttgattgatgtataaatattagcaaatcatttaacttctctggtactaagtttttttatctataaaatatatgcctatgataatgtacacctcataggactaccgttaagaattaaataaaacaatatatgtaaaagtatttttaggctgactcctatgcagatgccattattactattctgtgatgacccaatattaacaatccagtgcattttcttttcaattttatttttggttaaaaaaactatttcaaaaataatgataattgccactaaacttttattgattttcagactagaaactggagccaataggagtaacaggtcatgtatttttgggaaagctttaattgtattctcctgtttaagagtaaactcactcttactcttttgtgttttctttactgtaatttgaatgtctctcttcctgcctgtttaaaagtagagaagcaaaaatggagacctcaggaaaaatggaagggaaaccataattttgtcctccttttacttacacaaagccctcagactccatatttggataggataacctatggatgtattagattatttcttaataagcatttgcatgaggagcatgtaatatgcaaaacttttcaagtatttgggcacttttaatgaattggttttaaaattactattatttccaacagaatgtaacagtcaagggattcatgatgatataaataagtgtaaagttatttatgtgtgacacttttatacttataattacataacaacaaaaacacattcagaaaatacacattcactaaataaagtagatttagaagttacactttttttctggaagatataccattatcaatctttggagtctgtggctaaaaactaaaggcatcattacatgaatacgaagactggcattccacaaatcctaatcattaatgtataggattttgtgtgtaggggagaatgttccatgtttcctgagctaaactagagtattgctttacatgtgaattcataaacaagtaaatatkggggttttttttttcctcacaggttagttgcaaagtgtcccagttcattcatctttacctgatgggctgtaattacttttggatgctctgtgaaggcatttacctacacacactcattgtggtggccgtgtttgcagagaagcaacatttaatgtggtattattttcttggctggggtaagtgttattatacatacttgttgattcagtggattaaagaagcctttggaggatgccaggttcctttgtaatatgaatataccaatgagtaatcatttttaaagaatatcaggtgattaacttttgcttattcttgtaaattgcaacattttaagcaaagtatcactgactcatccattgttttcagtagtcacaagtcaatatataatagtgtctttttttctattgaatatgccaatgaatagggtatcttggctgaatatgtagtgactaaaacaatagaagtagaatcataaattaaagatttagtctttgtaccattctgaatattcatttttgccacgtgtaaaatgagagcattgggttcaaacatctttgaagttccattctaaaaatatttgtttaaaatattgtcattttacggtaagagtagagggattagtaattgaataaaggcatgcaaaagatttattttttctacacaatatcctgatgtggtattattcacaaagcaaacagtgatatacttctgacatattaaaaataactagaataatacaaaatatgaagtgcagaaatgaatttaacaggactagtttccagaaacaaaactgaagttgtacttatctattatcatctatctaccctatcatctatctatctatatctctatcatctatctaaactatctatatctagaaagaaatacatatacagaggtgtatatatacacacacacgcacacccacaattttagtgtattctgattaactttataaagcattgcttaattacatatttggaagagctgatttagaatgttcaaaggctgccaaatttttggtacataaattaatcactttttttcttcttctcttcttcaaataatggcttactagtagtaatctctctcatagtggaagttcttgtgattctcaacttttttccacatctgataatgtaccaaatgttggccaattccatctcacagaaagtacasgaatgctgaatttcttctaatccttgtggcttaggaaacacatcttaagagttaagctctgaagtccactgattcaaaatgacttatgaattatagtagaagaaaacatacacacataaacacacaaacacaaaaatgtaaatacctaatactttataatgtgtattgttgatgatacaaataatgtttattcaacaaatatatagtggctagtttttttgctcctagagtatctttgaatttttgtatttaattacatattttygaaataccatctgtagaaaaaatgcctayttattttcttttttttttgttattacaggatttccactgattcctgcttgtatacatgccattgctakaagcttatattacaatgacaagtaagaaaatctctttttattatttctactrgaataatgtaaaataaaamttttcaacataatgttattatgttttctctagttgctggatcagttctgatacccatctcctctacattatccatggcccaatttgtgctgctttactggtatgtaacaaattctcctttccttatcattgctcacatttcaactttatttctgaatcatctggcctatggtatccttcagggtcccagtggacacagatggacatgcatgttcacagtgcttaaatgaatagcgtttagtgaaggtatcatatctgatgtatgcgcaggaaaggcaaaggaactaattagtaagggatggtgagccattagggaccaacaatggaatgctgttatcacagctagacctgaagagasaaatgttagtgcagtgaaatgagcaytgggaggagtcacccagtaagagatctgatcttgagtagagaaaaacaaccactgccaaaaccacagcctggcagaatagaagcagcagaaacaaagactcaaatttatctttattcccatactctwatcttttggtttttccaattagccagatgcagcaaatgtctcagggcaaggaagtctgggtgaagctgttcacagacatcatcctcctgtggcacagagaggaatagaggatgaatctagcaggggggggtgggaggtgacaaataagaaaaaacaaaatacctatgcaaattttacattataattattatcagttaatgtgagtgcatgaattagacattttagtgtaattgcaggaaaacagaagtcacattcgatgcttttattacactattattatttttattattttaattgaaaaaaggtcttgctctgttgcccagactagagtgcagtagaatgatcacagctcactgcagcccccaactcctgggtttaagggatcctcccacctcaggctcttgagaagctaagactatacgtatacactactatgcttggataatttttwaaaatttttttttatagagacaggatctcactatgttgcccaggctggtcttgaactcttgggctgcagtgatccttctgccgtggcctccacaactgctgggattacaagtgtattacattatttgaatgagaaagtaaattaatacaaactagcaatctagcatgctttgtctcagagagtattagagatcatagtgcaattacagtccttaggagtggtattttagttacagctgctattcattttkttgttgttgttgttatactttaagttctgggatacatgtgcagaacgtgcaggtttgttacatacatatgcatgtgccatggtggtttgctgcacccgtcaacctgtcatttgggttttttttttctttcattgttgttgttgtttttattattattatactttaagttttagggtacatgtgcacaatgtgcaggttagttacatatgtatacatgtgccatgctggtgcgctgcacccactaactcgtcatctagcattaggtatatctcccaatgctgtccctcccccctcccccgaccccacaacataggtgggaattgaacaatgagaacacatggacacaggaaggggaacatcacactctggggactgtcatttgggttttaagcgccacatgcattatgtatttctcctaatgctatccctcccctcacccccaccccccgacaggccccagtgtatgatgttcccctccctatgtccatattttctcattgttcaactcccacttatgagtgagaacatgcaatgattggttttctgttcctgtgttagtttgctgagaatgatcatttctagcttcatccatgtccctgcataggacatgaattcattctttttatggctgcatagtattccatggtgtatatatgccacattttctttatccagtctatcattgatgggcatttggtttggtttcaagtctttgctattgtgaatagtgctgyaagaaaacatacgtgtacatgtgtctttatartagaatgatttataatcctttgggtatatacccagtaatgggattgctgggtcaaatggtatttctggttctagatccttgaggagtcaccatactgtcttccacaatggttgaactratttacactcccaccaacattgtaaaagtgttcttatttctccacatcctctccagcatctgttgtttcctgacattttaatgatcaccattctaactggtgtgagatggtatctcattgyggttttgatttgcatttctctaatgaccagtcatgattagctttttttcatatgtttgttggctgcataaatgtcttcttttgagaagtgcctgttcatatcatttgcccactttttgatggcgttgattgtttatttcttgtaaatttgtttaagttctttgtagattctggatattagccctttgtcasatgggtagattgcaaaaaatttctcccattctgtaggtagcctgttcactctggtgattgttttgctgtgcagaagctctttagtttaattagatcccgtttgtcaattttggcttttgttgccattgctyttagtgttttagtcatgaagtctttgcccatgcctatgtcctgaatgrtattgcctcgcttttcttctagggtttttatggttttaggtcttacttttaagtctttcatgcatcttgagttattttttgtataaggtataaagaaagggtccagtttcagttttctacatatggctagccagttttcccaacaccatttattttatagggaatcctttccccattgctggtttttgtcaggtttgtgaaagatcagatggttgtagaagtgtggtgttatttctaaggcctctgttctgtttaattggtctatgtatctgttttggtaccagtaccatgctgttttggctaatgtggccttgtagtatggtttgaagtcaggtagcgtgacgcctccagctttgttctttttgtttaggattgcttagtcttggctatacaggctctttttttggttccatatgaaacgtaaagtagtttttcctaattctgtgaagaaagtcaatagtagcttgatggggatagcattgaatctataaattactttgggtagtatggccattttcacgatattgattcttctatgtatgagcatggaatgttttttcatttgtttgtgtcctctcctatttccttgagcagtggtttgtagttctccttgaagaggtccttcacttcccttggaagttgtattcctagatattttattctctttgtagcatttgtgattgagagttgactcatgatttagctctctgtttgtctattattgttgtataggaatgcttgtgatttttgcacattgattttgtatcctgagactttgctaaagttgcttatcagcttaaggagttttttggctgagtcgatggggttttctaaatatacagttatgtcatctgcaaacagacaatttgacttcctctcctcctattcaaataccctttatttacagctgcgatcaagttatttatatatgtgcttgtgtatgtatgtgatatttttcatgtaaaattcaaagcttcctcattcgtctcttcagactctttttaaatacagatattctattatttaactatatttgctagctgcagtttagtatatggttgcgttggatcactgttcaaaccattctcaaaatgtatcattgttaagccattcttatagaatttattatgactttcataacattttttgatataccttaatgtagattatagtgaaaatttcaaaggcagaggcacttgcctcccttccttctcctacattctaagggcatgagtgacatactgtgtttaagttgtaccctgagactgcctggctttgcattgtgtgcataaaagagtcagcactgaatcctggctctaccacagctgcctgtgtatcatctcagagcaagttttctgttttattttgtttttaacctctctgtgtctttgttttctcatctgtaatgatggaataataagaatatatacctcacagggtattataaggattaaatgagatgctttctgttaagtgatctggcacagttagtgcatagaatattataaattcttgaaaaaatgccttccaagtttcctcacttgtagtttctgcatgataccatgcttctactctgaggagagcttgaagaaattataatatatcgtttgggctacccaggagattccagaacaaatgcaagacaatattttattacaaaagatctggctgcacagaggggtacatgattcagacttctaaatcagtaaggttcaggaagtgaaagcacctagcaaatgcaaaatgtaacgtcatctacactatccttggaaacatctgttcatgtaaactttaaggaagaagagtaaggatgaaatacaggaatatagcccaycaagctggtcagtaagaaaagaagcgaaaatccacattatttgcctaaaactttcccatcttgttggcctaaaacaagattaggaacctatttttctgtccggataaatcattctgtccttgtttaagctccagagctccttcttggtcctggccaattccaagctcctcagaagagccctagtaattgttctcatggttatcatatgtttttgcacaatttttataaataagatattttaatcacaagtcattccactcagacttcctccatcacatttctatgtgagcagggtggtactggagtgactacagcatttttgagatcctgttgaggggaagttgagagatgatacatttaatttgggttcagtgacagatatttaggtgacttcagtgcatagttaagtgattgtytgggaatgacttccagaaactgtcctacagccactgtatagatttaccccagttcctgtcatgacccaagcgtggtactgtgatatcaaaatagcctgatgggcctactagctaygtaaactttatgagtatgtcagttaaaggtttcttcttttctactgaactagttttgctcaagggtgggtgaaattcagacatagttcttctaaaatttaaaattcttcttttatttttgcttatagtaaatggaaatatttacagaaaataaagtaagatgaagggattataattctcaaaactatgttgtgtggaaaaatagcatccaattcattytaagacaattatttataaaatagctaatagaataattaactctattgtcaactctagtttctagtttcacattttaaatcagacttcccatgtggagaagcactttgcatttaaaaattttcatataattgggatcatctaaattgcaatgtttctactgtctttttatagtttatgatttaatgtattaagattataaaatatttgatattaagcagataaaagagcattattatctttttttaaagagcaatggatgcttawgaagggaatatattaggatgagtggaataacagctgacatgttgatttgtcacatttcattctcacacctgttgaaatggcttattctgcttttgcctttatcgtatttctgtgtytgcaaacattgcttttcatagatgtgtttccattaggattttagtgagctgtatatttttgaagcatatgttctattaaattttctaaaaatagtggtagaatatttttgtgcccagttatttttatgacacatgtgtccatttagcaaatgcaggctctctgttaattcttttctataataaatgggaaactactattttttgcaatttttaaactgtgtggatataaattatatttggtgcatagattgaaaatttaagattattaaacaaagggcagatgccagaactaagggtgaggaaaaagaaaagagaatagcaattagcccctatggagctcttctggaattaatattcatgattctatggaaggcataaggaatgggcatagagaaaatggaccaaagtaaaagatattgactgggtgaaaataagaaagagataaactctaacttgggtgaaaataagagaaagataaacttgtattatgcgagagaaagagaaataaatatgtttcagtaggaccctgtttgctgagtcacattagagtgtcaaaggtttatgtctcccatccaaagaaactactgtctcttcgagaaagttgttgaggcacaaaaatagtgaatattatgtcattgcagacagtaattaacaggaagtcttatagaatgtcaaattattttagctctagaatgactggggttgaatatcagctggttcaaagttccctcataagtaaaagaggattacagtgatactttggagaggtgttgtaaagattattgttactagaagaaacaggaaagtttttggtttgaaagatgaaaatggttattatggyrtaatatacatttagaaagtatgtcatatggacatgataaagaggggatgctttaaaaattagcatttttcyataaacaattattttctttgatatgaaaatgttcaaaatctttagttttyagaccacagatttttttaattgcacgtgaaaatgagctgagaaaaactgaaatattcttcaactgaatatgttccacagtaattataccataatttaattttacttttttaaaacttgtttattaaaattgrtgtacttgttaaattgataaatcacaattccagaaatataaattaatgccttaggcaataataccctttaaaaatattcttgtacattaaaaatattttaagatttataaaattggagatacttgaataatgcttcttaatattaaatatgaaatgattttcagatgccatttaatttcgtttttaggtgaatctttttttcttgttaaatattgtacgcgttctcatcaccaagttaaaagttacacaccaagcggaatccaatctgtacatgaaagctgtgagagctactcttatcttggtgccattgcttggcattgaatttgtgctgattccatggcgacctgaaggaaagattgcagaggaggtatatgactacatcatgcacatccttatgcacttccaggtatggcattcttgataagaaggcagcttgagargtttggaattaaatatacatatarctttggtttactcctgactacttgtacagctatttgattacaaatacatgtatctttccatttggattcagatcattctatttttcttttacagggtcttttggtctctaccattttctgcttctttaatggagaggtatgataattgattttattccttctattattttatatttgctatctgtctatctatccatgtatttaaatgagataaaattataaattccccaggaacaaccatgttaaattctgtttccatcagggaaagaaccayagaatctcttaccataggtttaactctccttctcaaatgctcaggtcatattggagttcaaagccagggaaaagtcaacctcacttaaaaatatttcaaatgctattcatctaatcttttgagatacctttgagtcccattaagtctgagcttttccccagatacagtgccaggcaatcccaaatctcatagaacatacactctaataggaaataagaaataggatcatctcattttccctctttctcttttttgcctgtcttacaatgtagcctatggaaacaactttatggcaaatacgaaaggattttaaaaattaaactcttggttatacagggaagaaattcaatgggttaggaaatttagaagagaatgctctaattcataacatgaccatgtactcttcagtacttctagatttttatccatgcgtttcctacttgggaagtttcaggcattttgaaagctggtaacatatttcttatgcatacaaatgtgttatagctcagtaatctgagctctattgacttagctctttatatgtttttaatctgctcgacacaatttaacctgtaggaggattttggcaaaattgaacaaagtttagaaatccagacagcagctgagtgagacacagacacttgataatgtgaagcttatcataaagcttcagatggggaacacatgggaccagttggtataacctatgacaaccattcctataaaacaaatgaacattggaaatcatgcacacatcatgaaaaactataacatgttatttgcgcttgcttaagtaatatttttacttcctcatcttgacatataataaaactcaatgtttagtttttaattaaaatatatctcaagttcaacacgtatttatttatattattattatttatctatatttatttatttgtaatgaggtgtagagttgccacacattgtagactatatttcatacatttaagtggtacttccataattcttctgctatacagaagacaagagcaactttttctgaaatcagagaagcatagacagaatgcagttacaaaaaatagataaatcatttgtttgatagtaaaattcaaatagattttattatatacctctataaatttaatgttatatacactgaattagacaaccctaawtgctacttgtataggatgtaataattaaatatagatgagagtgatatggacaacatgctaaagaacatgcatgaaataggaaaggtagacctctgtatctacagaaacagattttaattcyatgaactaatttttaaatattcaaaacacactcactagtaaaatattttgtaayaggaggcagtgtagaataaacacagcaatgcatttaatcaccaaagwtgctacttttcatcttggctgtgatattttggcaaatgctggcaaatttcaggagcctgtgtctatctttcttaaagggaaattaaagcaagttctctacacaggtctcagaaaaataaatacaagctaagaaagataaagtttttagcaccatgccccacttcatgagattctcagtatacttattatttgatttgtcaaatcacttattttcaaaaacacatgtgccaacaggaacattaatcattttggatcaaaatcccaaattggctcttttatttagaaagagtgcccagggaatatctaaagtaatgcctaacactcctgttacactcgatctgtgtaaacaaaagggacacagaaccttgatcttctgccatgtcctaaaattgagaaaattttgacattggaaaattacaataatacacaatgtttgagctaggttgttsccaaatctttcagttcctcacaacatttctaatatctgttccttttcttcatctctggagatacaatccctgtttcagtatgattcatttctcttcttaagaaatactgtgatccctccctttttgtctcaatgyctcttactttttcccactctcataacatgaagaaacaactgccaaattcattttgttccaactatgtcatgtacttcttaaaatcatttgctcaggcttagtttccttcttgttttccacattaggtcaaatgcctgcctttagcttaatatttgtgtttttttctttcccaccttttatgcactttttagctaacgtcttgctattagcatttctcactagttaaataaatgtggcttgacaagtgcttggattactttcattttatccctagtgccctcagacaaaaatgtgcactgtgatcataaactagggactctagtcatcagaaggttatatttaacaacacctgagggtagatattccataagatgagcaaaaagttttgttgaggacagacaattaaacccaaattctttcatgagaactacgtagaatttttataaaagtttcgtaaatattttaaattgattcccattaaggagtataaagttagttccttattgggtgttaatgggtatataaagttgtaatgttacattctaaacatttgccttactacttatacatggtcatgcataaaacaataaaaacattcatatctttaataacacccagctatcttcccttacaatggaaatttgctcctactgattttttctcattaaaagtttattaagagtagctgctttaatgtcgtatttaacaggtgtgatattgtattagaggaagcagaagaaaaatgtaacatccttagagcaaataacataaacaaacaagtctacaaggcctgtggatctttaattaggtttatttttaactatagtaagacctcacagttcatgaaattggctttctatggtttttctgatgatttagttgcaaggaagaaatagagtgatgaccttaatcaaagtagatattttaagagcaaacagtcatatatttcaatagccattttccttccaaattgaatttaagctttcctttttaagactataagyactagactcacagctaagatattacttcctctcagctttttctcatactttatatagaattttttatacaaagctatatgccacttcccctcaaccagaaactatattgattacatactcaaccaattcagcatttagtaacaaaattaggagaagtttatgaaacaaaaaataaggatcaaaaatatttctcatcagatgtatctagataattggtcaatggtcatttttattttgaatctctgaatatgtatttaaaattcacaatctgaagccattcaatttgtagtttgctcatgatcttgaggttgttacatatgcagatgttatttttaaattatctgaatttagatattttatacggaggatttagaattatattactaaattgagaggaaagtttaatttttgcaagataaataaatttgttgccttataaatgcttttattttcaaagcatatttacatgaatataaattgttttcttcagatatggttaccatatattttttaaattgagcttgaaagggctgaagttactgaacttcatcataatgtaactttcaatacgaagttatttcattttaattatataatttttgaactatatagtagagtgaaattaactgataattttaatacctcatttaattttacctaaacacattgttggctttatatttgctccttcttttttcctacatgaaatgagacaataaaactttgagtttattttaagtgacagactataagatactttaacaggaactctgaagtatcctgtaaagctgcagacatcctggaacacctattttctatagaatgtttgtaattggaggaattgaggttttgtgtgtgtgtgtatgtgtgtgtgtgtgtgttttaatccattagactaggaaataacaagagagaagtaagccctttttaaagatttaatattgatttgtatacatggatatagtgaagagaaagttgaggaattctatataagtagtagaaagttaaacaattatacctcagtacgtagaaaatgaattaccagaaaattgctgtgagatgctcagattccctttggaaaagcactgaaagagccaaagagcaatagagagcttggggaagaccattcaaagcaaacccactctgggcagatatagatcgggtcacaaggatttggctaacacattcataacctaaaagcaggctgctccaagccagtgtgctcactcatcagacatggaaaagtcctcaacgtacttgagctagagatgtatttaaatgttctcatttgtgcccattgactgacaatgaagaaaattcactcttgtgccttacattccattatgaccaatattttactgtataggacccacctacccctgatctctagcttcaaacagaggggaaggaagtcattaaactgcaaatttattcagcagaagaggwttcaaatatataaaaatggagtggttacattcctaaatttatttttcacaatattcaccagatttataattatttgttcaacacttttctttcctctatgtagtaagctccatgaagacaaatatcatgctcccttttttagaatgtagcacaatttctggcatatgggagtcactcaraaacaaaggttgctgctactgccckgctgctgctgctgctgatttgtattcttcgtatcctaacttcttttcttttgtgtatctttcgcttatcctgtcacgaattgtcttctcattctattaataaagacattaatataaaactcaatgttgcacatgaaatcttrtaaatgggggtccagattacctatttgtttggcaacaataaatacatatgaattataaaagctttgaagacaaaacatgccatgaaaaatattaatggaatgtaaagtacaatgtaattgtaatacatttcctaatgtgaagatggkacacttaattttttaaattaagaaaatgaagctatattattcactgattaacataactttttttaaaaaagctcttctccaagacctatttaattgtgcttcaaaaacagtgtcttcatttcaattaatgggttgttcttgttctttctgttttccttttgattgataggttcaagcaattctragaagaaactggaatcaatacaaaatccaatttggaaacagcttttccaactcagaagctcttcgtagtgcgtcttacacagtgtcaacaatcagtgatggtccaggttatagtcatgactgtcctagtgaacacttaaatggaaaaagcatccatgatattgaaaatgttctcttaaaaccagaaaatttatataattgaaaatagaaggatggytgtctcactgttttgtgcttctcctaactcaaggacttggacccatgactctgtagccagaagacttcaatattaaatgactttttgaatgtcataaagaagagccttcacatgaaattagtagtgtgttgataagagtgtaacatccagctctatgtgggaaaaaagaaatcctggtttgtaatgtttgtcagtaaatactcccactatgcctgatgtgacgctactaacctgacatcaccaagtgtggaattggagaaaagcacaatcaacttttctgagctggtgtaagccagttccagcacaccattgcatgaattcacaaacaaatggctgtaaaactaaacatacatgttgggcatgattctacccttattsccccaagagacctagctaaggtctataaacatgaagggaaaattagcttttagttttaaaactctttatcccatcttgattggggcagttgacttttttttttgcccagagtgccgtagtcctttttgtaactaccctctcaaatggacaataccagaagtgaattatccctgctggctttcttttctctatgaaaagcaactgagtacaattgttatgatctactcatttgctgacacatcagttatatcttgtggcatatccattgtggaaactggatgaacaggatgtataatatgcaatcytacttctatatcattaggaaaacatcttagttgatgctacaaaacaccttgtcaacctcttcctgtcttaccaaacagtgggagggaattcctagctgtaaatataaattttgtcccttccatttctactgtataaacaaattagcaatcattttatataaagaaaatcaatgaaggatttcttattttcttggaattttgtaaaaagaaattgtgaaaaatgagcttgtaaatactccattattttattttatagtctcaaatcaaatacatacaacctatgtaatttttaaagcaaatatataatgcaacaatgtgtgtatgttaatatctgatactgtatctgggctgattttttaaataaaatagagtctggaatgctatatttggtaaatattttaaagacaaccagatgccagcatcagaagtctgtttgagaactaagagaacagaaacatctatcataagatatatttattttaaaaacacaaggtcactattttaytgaatatatttgttttgataactcataccttaataataggtgtgtttgacatatttcttttttcattttgacaatgaactcacattctaatccagaaattttaaacaactactgtgataaataccaatctgctacttttatagattttaccccattaaaatattactttactgacttttactatgtgaagatatatagctttggaaatgtcccaggctattcaagaaatataaaaaactagaaggatactatatataccatatacaatgctttaatattttaatagagctactgtatataatacaaattagggaaatacttgaatatatcattgagaaaaaattattgtcagatcttactgaattattgtcagactttattaaataaagatagaagaaaaccttgctaatgaattaaagtgaaatttgcatgggattcagtttctctaatgttattttccgctgaaatctctaaagaacaagaatgacttcaattagtaaaagtcaattttgggaaaagtcatgggtatctgttttttaagtgtgtcaakytgattaaaatggatgaaacaaattactcatcataagttgtttcttaagctgtcaatatgtcaatagatggtgagttcagaacttatttcaaattgctaagacaaattatctaaattcgtaagaattaacatatagaatggtctggtcagtacatttataatttatctatgcatgaaaaagtattgttttgtttgaaacatgaatttcatagcaagctgccatagaaaggaacgcaggctgttctagaccttcaactgcctaaattatacaaaaattcattttaataaactcaattattagctatttattattcaaagacccatatttaaatcctttgctgaccatgttgacatatatcagccttcttctagacaaactgtcaactctcaaccatcttgacagtagaagtgacagtaaaaaatgttgaatgatcagagattatattaaaataaacatgtaattttcaagtatttttgttgtgcttttataatattaattctagatcagatttattttatagccagggtttgtctgttgtagagtcttgaggcgtagcagtcattcatgattaatcactgttagttttgtacccatatatttttagaatagttttaaatgttagatttctcaaaagctaaatgctacttaatatctttgtatcatactcataaagcaaagtaaatctgacactttttttaaagcaaacttctttgctgtcaaaaaaataaatttggggaaatttctagcttttaaaatgtagatctgcattttactgtgattacttgtgaaagtcatattttaattttctaaattctaatttgtcattttatttcctaaagttaatttccaatgcatttattcataaaatattcattctggaatgcagtgtttgtttaaatgtaatccaatgtatatagaattagtggtggctgtagtgctgtatttattgcttataattttttttaaatgtgaacttacttttaattttctcttggttttaatctgctagtagaaaccactagttatctgtaaaaatatattcaagatattctgatcaattataacaatttatgttatgcctagagtatatctctattttttgattgtatgaaaatattaaagttatgagttaaagtttattttcattgatatttactacagtgccaaataatctaatttataaacataattcttacagtaatcaatgggatacttctcaaaattaacaaatctcttaacaaaatatatcttttgccctctttaaagtcttcagtaaaccagtaaatgaattcaataaaccaattaagaaaaagtcatgatttgtttttcaaactaaaaaaatccaactatactacaatggatgcaaactccttcttatgctgaaagaagaaaaaggatgtctcaaaataagaaaatgttcagaaattcatctcctttatctactatatttcattttgtagttttgtttaaatattagaaagaaaaataagtatttaaaggtaatttttaaagagggcatattcatggctctcacacaaatataaaatgaaaatgtttcaaagatttcgtttagctcattaattaatgaaggaacaagtaagatgttacaaaaattcaaaggagaattcaaaatatcacactatatgagaatattaaaaatgttgaaataaatttataaataagtgcaaaaccactctatccttagggcaataatcagttgcattccacttaataactaatttttatttttatgatcaataataatgtacatcattttctgttttctggagaaaatgcccatttaaaacacttgtgtttttttcttataatctctcctccttgtgattatactaatctcaaagaaagaatattcttgattaaaaatattgctagtttaataaggtttggcctactgttgagataggtacatgagagtgttaattacaatatagacctcctcaagttggttttacaaatctagaaccatagtgcactttttaacagcttcattgagatatacttgacatatcatataatacttcatattcaaagcagtttttagtatattagtagagtatattttaatacatccatagagacacgctaccatcaccaatttcattacatttttatgaccttgagaagaaacagtgtatcctttagccatcacttctctatccctctatctctactttcatttcagccataaacatcactaatttacattctgtctcaacagatttccctattctagactttcatatgattgtaatcatatagtatgtgaccttttgtgactaaatgatttcacttatgtttttaaaattcattcatgttttggcatgtatcaatgtttccttttattccattgggtgaacataccacattttatttattcatttgtctgttgatggatatgtttgttttgcttttaccttttggttattataaataatatacctataaacatttgtttgcaagtttttgtttgtacaaaagttttcatttcttttcaggacatttgcaaaacagccagatcattttacattcccaccagcagtgtatgaagggttctgaattctccatttttctcaacacttgttattacctgtcttttttattttagacatcctaatggatgtgaaatggtacctggtagtttaattttcatttctctgatggttaaagatgtcaagcatctattggccatgtgtaatcttttttggaggaatatttattcagattattggtccattattaatttggttgtctttttattattgatatatatatatatatcaatatgtatatatatatagtctcacacactcacatctgcaaatatatatgtataggtctcttttcagataatttgcaaatactttctcccattctgtgaattgtcttgtccctttcttaattgtgtcctttgatgcataaaaggtaacaattatttattaagtacatttttttcttttgttggtcatgcttttagtgtcacatctaagaatccttagccaaattcaaaatcatgaagatttactcctataaaatcttctaagaaatttatagaaaattataggtcattgatccattttgagttaatttttgtatgtggtgtgaggtaagggtctagcttcatatatttttgaatgtggctatttgttctaggatcatttgttgaaaagaccattttccccattgaaaggtcttggcatccttatcaaaaagcaatcagccatagattcatgggtttattttaaaattctatttcatatatatatatatatatatatatatatatatatatatatatatatatatatatatatgtctgtccttgtgctcaaaccacactgtcattattacctttgtttgtagtgagtttgaaatcagaaagtatgaattctgttttattcttctttttcacaattgtttttgctattctggatctcttgcagaatatactaaatatatactatagtatatatactataaatataaatatataatataaatatatacatatatatttagtagagacaggatttcaccatgttggccaggctggtcttgaactgctggcctcaactgacccatcagctttggcctccaaaagtgctgagatttgtgtagttttgatattagagtaatactgacttcttagaaagttatggaaagtagtcccttctcttccaggtttgcaagaatttgtgaataactggtattaattcttctttaataaattcagtggtgaagctatctaggccctagccagatataggtagttgtctagttactgatttaatctttacttaatataggtctatttagattgtctatttcttcttgagccagtttcagtagtttgttttcttctggaaatttgtccatttcatctaatttatctaatttgttaactataaagtactgagcaaccactatggttacaaatttaacttctgcctggaagttttaaaacggaatattgaattggatttttgaaagcctatattatttgctatctttgacagtaataaactatgcacaagaagtctatcagatttcatctgctatgtctataaatttgaatatatttctttttcctcaaagtccctaaaatttgttgtaatctctagcattcctgaaattgaccttccttatcacctataaggctgggacgtgtagccagttaccaggcgatttagataccaggccagttttcctgggaaagcattacgggcattggctccataaaatagtcaaactttgttccccaatatgagcataatttgatgaccattattctgatatatgacactccacataagtcctttagtgtataatccatttgtcctattatatactggtagaaaggaaggtacattcttactggatttatgcaattaactatattatcatgaaaagtaaggatatttaatatgttttttcccctaaaattctgagggtaagttagaatctactattatttctaaatgtattgtttcactttaaaagcaatatttatacaattattgtggattagagatcttaagatgagacagaagagtttgagctatatatccagtaagtagaatatgaaaacaaaatcaacatttcacacaagtaacacaataaaattgccctcatcaattgtttcagtcttatgaaattaattattgttcaactggatctcagattagcaatctcatgaagccatctcctgtgcaaccaaaaaagccagataccagagaaaaaatgctctcaaaatcctggttcactccacttatatggaaagtgcaagcgcgtactcatgcatctgttttttcacatgccaacagtctgaagtgccttgtaattttttttcccaagggcttgtgtgtttatccttcagtattaaagacaaaactcttgtctatagcttacagcagagcatcagggaaagcatcagtgtaaaacaaaatgatcagatataatatgtgtatgacagaaatcacaatgtctgtggttaatagtgaaaattttcaaaagtaaaagttctaatgcaggttcttaataagaataataatgcaactgagaagaaaatgtagttgttcctgtaggaagaaaaacaacaaatccattttttaaaaatagacaaaatgaaatacacattgagctataacataataatcttgagatgtatttttatacaaagaacattaagcaaagtgatgcagtaagtttggcataagacctaagtattatctttagttttctaaaccttcatgactaagtctgtctcagttgagaaccactgatgtagaacagggtctatgccctcttaggaaccctggctgcacagtagtgatggcagtggcagcccgtctggagtagcctctgctaagatgctggctgcagccggggctgcggtatccttgaagccgatggcagccaggaacaggcaggagacctgccccctactgagtaggcagggcaggattcctgtgcccctgggcgcagctgcagctgcccagccatggctccagacctggcatccctacactctcaggggcttgggaagtccccttcccccacaggcttggaagtgcctgctcccactccctggcctgtccctactcccagtgccaactccaaggcagagcagagttgtggccaagcctgggtgctgtcacaatctggcagggtgtacatgcactcagggcagcgctgacacaccagccccctgccacctctgccccttctggactttgggtgccaacaagcatgggagggaggcagaggtggggctgagctcaaacccgattgtgaactgcacatgtgagagatctagtttgtcagttcctcatgagaatctaactaatatctgatgatgtaaggtgaaatagtttcatcccttcatccagaaaccatcccttgcctcgtccctgaaaaaactgtcttccacaaaactggtccctggtgccaaaaacgtttgggaccactggtgtaatagatactagattcaaattaaagaagtaagactgtagtcaaacaatgttttaaataataactgaaattatgactgataacattttattgttgtctaatctcatcaggcaaagcactgccagaacagtgataactataggaaaacttggcaaattttttttaccagtgtttcctccaagattaaaatatattatggaaatggagtgcaatgataaacttctaaggactttccataaagcaaacaattaggctggagtgcagtggcgcaatcttggctcacagcaacctccactgcccgcgttcaagtgattctcctgcctaagcctcccgagtagctgggattacaggcgtgcaccgccacacctggctaatttttgtattttcagtagagacagggtttcaccatgttggccaggctagtctccaacccctaacctcaggtgatctgcctgcctcggcctcccaaattgctgggattacaggcgtgaaccaccatgcccggcctgttgcatattttttatcaggtgaaagaatacattttttgcaatttccagggcactctggcaaatgtcaatagtagttttaagtgtaaaatatgtcttgaaattttattttgctttttgtatatatataaaatcagatttttagaaaggcaaaaatttttaaaagatatcaaaggaaatttggacatttaagatatgattatgggagcctgagaaacaatatttgtttacctatttaatcaaagaaacagtacatattttaaaatgaagtacctggtaacacatttttaaaaacattttagtctcttcataattggggaaattttgtggtcatttttatggttttgttattgtttttgtttgatcaaagacataagcaatgtcaacctaaagtataaaaaattaatttgataagacttgaaatctattctgtctaggcagattacacggaaattaaataatatattgtttcaatatattgaatatattca

SEQ ID NO: 97723 - DNA, 32830 bp, Homo sapiens
gacctcatgatctgcctgccatggcctcccaaagtgctgggattacagacgtgagccaccactcctggcctctgctagaggattttaattgacaatacccttaatttgcactttgacagaagcactttctctgttttgtgagaatgtattatatctgactgggcgcaggtgtacaggtgggtgtgaagggccagtgtcgatgtagagctaccacatgggagaatgctgcattcacctaggtaagacacctgttctagtgaatggcaaccatccacacagctgcccaagcaaggcattctgtatatccgtctcaaggtctctcgacctctaattctttccaccatgaatcaagagattttccagaaggagaactcttatcaagatactctcctgttgaaaatccttcaaaggttcctcactgcctacaagatgacttcttaacacagcttcaagtcttctgcttccttctgatcacctgtgttctctccctcaggtctgctccttgaaaaaagcagtttggtctgctttcttttgcctggacccattatgtgctctcaaaaccccctggacctacccttgtcattgcacttgtcgtacccagtgttgacttgtgtaccttctccaactagattaggcagtaaaagttttattcagaccgtatctttaacgtccaacactgggaataacgcgcagtatcctcctcagtgtctgctgtaagaatgatgaattcacttttttttttgagacaccgtctcactctgtcactcagggtggaatgcaggaggttgcccactgcaacctctgcctcccaggctcaagtgatttttcggcctcagcctcccgagtagctgggaccacaagggcgcgccaccacgcctgctaatttttgtatttttgatagagacggggtttcgccacgttgcccaggctagtctcaaactcctgagctcaggagattcacccgcttcggcctcctaaagtgctgggattacaggagtaagccaccgcgcccggctggattcactttcttaccgagaactctaagaaggagccaccgcctaataacgtatttctgaaggcaaaagtccggatagcagctttatttctgacactgccatccgtcggcctgtggtacagctttctagtgggcaaccccatccttttggtaagcaactactgcctccgtgtcagacgctctgcggctgacagaattagagacagtccccgccccagattgctcccctcgctgcagcaggggatagttcgctgaagaacagggatcattgtatgacttcaggagaatgcgagctttggcccagggtgcacaaatcattaaggctcaggccactccgacttctccgcccaagtccagggacctctcgaggtgctgaaatcccctcagcctgaccaatgctctttgaccaacgctggtagttctgggcgctggtcacacctatggactactggccctccccttcccattgcaccccatctctgaccctgcaagacccgggaccgctgacctcggaccccttgccctatttctcagccctttggccactcttactccgtcttacattttcttggccacatccgtctcccggaactgctccttcaccatgatgaccgctgccgggacgcctccttggcactcgggaggccagattagagaaacgatgcccccagcacctcctggggctgcttctggactcgccgctaacacatctgcggcatcctctcggccaccgtagagtgtcccacgtgtccgcttcctcttccgctactcgcccgcgcgtctgtctgtcaagagagacttccggcatgcctttttttttttttttttccctttccccgcaccgtcacctggtggcgcttactggaagccgcaccgaggcgtgtgctgtattttaaaaatcccatttctggtcaatttctccacgtaatcagacacccgcagagaaactgcatataactctttgcctcaaggcttttagacaagcagagggccaaaacttgcataaaatggaaaatcatcatcattaacatcagtaccatctaaattaagagcttctaattgttttaagggaaggtggaagctaaaatgaaccggcccatccaacagagggcactatctgtggaggaccaacaaaggaaaacagagcggaaaatatgggcgcacatgtgcctccagttcatgaagttatttggagggaggggggaagaattaaacttacattattgattacaaaaacagttgaaaatctgttagagtgaaaacagccatggtaatctacagaagaaaagggagaatggaaagtaaagatcattcatgtcttgaaataagttgtctacagtctgtgagaacttgtgggaggtgatcctagtgtgatatattagtgcatgagcctagcaaggaaatcacatcaccacagggcttagcgcttagaattagaactaagtcctcattatttgtgagaaactcaaaacagaacttaacaaaagtgtttaacaactttcaatttttaagaagggacgctatctcattttcagacgccatggatcctcactagcaaaacacaatgtcacagacaaacgaggcatatcaggtttttctaactcatttcggtactccatcacttaatcatgaaataatgttgactatatatatatatatatatatatatatatatatatagtcaacattatgggttttttttgttttttttttttttttttttttgagacggagtctcgctctgtcgcctagactggagtgcagtggcgaaatctcggctcaccgcaacctccgcctcccgggttcaagcgattctcctggctcagcctcccgagtagctgggactacaagcgcccgccaccacgcccagctaatttttgtatttttagtagagacggggttttactatgttggccaggctggtctcgaatccctgacctcgtgatccgcccgcctcagtctcccaaagtgataggattacaggtgtgagccaccacacccggctctgatgtttacaatattataccaacaagggttggatcgtgtgtgacttatctagaggttaagagcaaaagttatgaaatcacagtgccatcatgggagtctagctttcaccatttaaagttgtgtaggcagccaggcgtggtggctcacgcctgtaatcctagcactttgggaggccaaggtgggcggatcacctgaggtcaggagttcgggaccagcctggtcaacatggtgaaaccccatctctactaaaaatacaaaaattagctggggttggtggtgtgcgcctgtaatcccaggtactcgggaggctgaggcaggagaatcgcttgaagctgggaggtggaggttgcagtgagccgagaccatgccattgcactgcagcctgggcgacaagagtgaaactccatctcaaaaataaaaaaaaataaaaaataaagttgtgcaggccgggcgcggtggctcacgcctgtaatctcagcactttgggaggccgaggtgggcagatcatgaggtcaggaatttgagaccagcctgaccaatatggtgaaactccgtctctactaaaaaatacaaaaattagcctggtgtggtggcgcattcctgtaattccagcaactcaggaggctaaggcaggagaatcgcttaaatccgggaggcggaggttgcagtgagccaagattgtgccactgcactccagcctgggcaacagagcaagactctgcctcaaaaaaaaaaaaaaaaaaaatatatatatatatatatatatatatagatatagatatatgtgtatatatacacatacgtgtatatatacacgtatataaagtgtgaacttgggaaagttatttaatcttattgtgtgttagtttccccatttataacatgggtgagtaatatgtatcctatttcttagagtcaatgggaaggttaaatagcaaaatgaaggtaaaagtaattagaatgtaacaggcacattacaatcactcaataaatattcttctgcctcagcctcccgagtagctgggactacaggtgcgcaccaccatgcctggctaatttttgtatttttagtagagacggggtttcaccatattggctaggctggtcttgaactcctgacctcgtgatctgcctgcctcggccttccagagtgctgggattacaggcatgagccaccgtgcccagccggctgactattttcttaagaataaggatagttggtcacctcgggaggctgaggcagaagaatcgcttgaacttgggaggcggatgttgcagtgacccgagatcccgccactgcactccagcctgggtgacagagcgagatgcggtctcaaaaaaaaaaaaaaaaacaaaaaacgaaaaaaaagaaaaatagtcggccggggacggtggctcacgcctataatcccagcactttgagaggccgaggcgggggcggatcacttgcggtcaggagttggagaccagcctggccaacatggtgaaaccccgtctctcctaaaaatacaaaaattagctgggcattgtggcgcaggcctgtaattttagttactctggaagctgagccaggagaatcgcttgaatccgggaggtcgaggttgcagtgagccgcgatgaagccattgctctccaacctgggtgacaagagctagactctgtctcaggaaaaaaaaaaaaagaaaataggaaagctgcccgcaaagcctgcaccttggacacctcgtctgcactaacatttgggaaattcttcttattatttctccggaacatatatatttacattctttacatgtctgtttcacgttaaagaaaatatttctggagcaatcaatttttttttcctttttttttttttttttctgagacggagtttcgctcttattgcccaggcggagtgcaatggtgcgatctcggcccactgcaacctccgcctcccgggttcaagcgattctcctgtctcagcctcccagatagctgggattagaggcatgcaccaccacgcccggccaatttttttttttttgtagtagagacggggtttcgccattttgcccaggctggtatcgaacttctgacctcaggtcatctacctgcttcggcctcccaaagtgttgggattataggcgtgagccactgcccctggcttccaatttttttttccttttttttcttttcttttttttttttttctgagacggattttcgctcctgttgcccaggctggagtgcaatggtgtgatctcggcccactgcaacctttgcttcccgggttctggcgattctcctgcctcagcctcccgagtagctgggattacaggcatgagccaccacgccccgctaattttgtattttgtatttatttatttatttattttcgtagatacgtggtttcgccatgttggccaggctggtatcgaactcctgacctcaggtgatccgcccgccttgccctcccaaagtgctgggattacaggcgtggccatcgcgcccggccaaatatttttcaaaatctaattttgcataatgaccaagatttgcagaaaaatacaaattaaagagatcttttaaagtaaagattcgtcataaaagtcacagaaataatactcatgaataataaattagaatgggcaatgttaagtacttgaaataacaaaggttttagagtcagggtttctgcagtttccctagccatataacgaggagactgttagagaggatatcctaaaatgctttccaagtttacccacctctaactcggaagaaggcaatttaaactaatttggtttaccggaattcaaatacgtacaattcaacataatgaattgaactgaaattgaacacctgcttgcgtaaacctagtcggctcgagttgttctggttctggattggtcagtctagagttccaggggtgtggccaaaagtctgtgaggcggggccgtaggcagcctaaatcaggcatcggcgcggtcagcctcgtggcgcgcccrcgcccccacgccggctcttcccggggtccttccgtgcgcgttgatatgattggccggcraatcgtggttctcttttcctccttggctgtctgaagatagatcgccatcatggtgagtctccctgggcccgtgcagtyatctgccgcgtatccgagccatccgtggtccctgggtcccagtacttgagctataggcacgcgaagcccggttgctcttctctggccgtttctgtcagaggatggttgtcgaggggctcggggctgttggcagggcgtccgggctggcgggctgcgctgtagacccggacacgctgggcttcgggctccagcgcctgggcagtgcaggagctgttgcgcttgttgacttcgtggagcacggtggatgggggtagggggcgggcgggatagatggacactgggaggcacatctcgtctgcagttcctcattgggctaggtaggcggcttgcaggtgatggcagtacaagaggtgaagaaggtgcgggcagcgcctgggcgagttgcggcaagtgaaaccattcccacgtgtaagctagaaaacttgtcagctggatggatcttcatgtttcatagtggggaaacaggccctggaaagagatgttataaaaaggtagtcctgccctaagtcatgcgttattagctcctccagcatccgtttttaactttaccagcaatcttttttttttctccttacctttgatccgttactttcaagaattgagtaccactgacgtggatttaatttggtgtggtttctcaaagtaaaatggagaaagtctaggaagttatttgctgccatgaaagtctcttgcgcctcctttttggtaaaattgttagcataaattgcttaatgcccacattttttgttaggtattaagtaaaggtgcagttcagtccttcagaagggaatatcgttttctctgatctctgctatggccattctagaaggatagattacatgtaggtagtgagtacaaggtttggggcacatttgtgcaagacatgataaacacagttcattgagtgacctttatatgagccacagcagtttttaccccagagaagtgattctcaacccggagtgatttttctcctaagggaacagttggctaagtctggagacatttttgattgtcacaactgggaaaggtgggaagtgcttccggcatctagtggttagagggctgggatttttatagttattctaaaacatacagtccccacaacatatccatatggaattatccatatggaaatatcagtagtgctgaggttgagaaaccctgccccagagatacacataacctagtgaagtaagttgtacagattcatgtgtaaaaccattgtgttttcctggtattttatgtattccttaggtgtatcctgtgagtttggccttgcccagtgggttttatttactttagttcgctacatgactaatggctacaaattggactgcaacattctaggtcttggaaaatcacagcaaggccaagaaaagttggagtagttttattaaccagagtgtttatgttttcagaacgacaccgtaactatccgcactagaaagttcatgaccaaccgactacttcagaggaaacaaatggtaaggaagggcacatcaatctttgcttaattgtcctttactctaaagatgtattttatcatactgaatgctaaacttgatatctccttttaggtcattgatgtccttcaccccgggaaggcgacagtgcctaagacagaaattcgggaaaaactagccaaaatgtacaagaccacaccggatgtcatctttgtatttggrttcagaactcattttggtggtggcaagacaactggctttggcatgatttatgattccctggattatgcaaagaaaaatgaacccaaacatagacttgcaagagtaggtgtcttttcatttgttgatcagctcctgaagacctattttttcaatagcgttgtgttgtgagtgtggtaaaaagggcaagaccaagcaatctgggatacaactctgaaaggattaagagaaaaagttatttcataaaatgcacaggtggagtacgggggttcaaaattgaagtctgacatttgagctgagttcagaagggcagctgaagtagtgttcttggagatgggctaggggtaaggattgttttccagaggagaagtaaggggatgtgtttggaaaggtagcctggcaccaaattcacttagtttggattaagtctgcatctgggcttaaacccataggtagtcaggaaccaggaaaagtttttgattgtatactgagtgtcaaacactgcagagtgaactacagcagtgatctgggcaagctccccagcttacattctagtaaacaagtaagcatcatcacctcgaagtgcttgttttgtttgttcctttaactcactttatcctatcctgttagataaaccttcccatacgatagctgtgagggaaaatcctggtgatgtcataggtagaggctgcacttttttttttagagagagagtctagctctgtcgcccaggctggagtgcagtggtacaatctccttggctcactgcaacctccgcctgccaggttcacgcaactcttctgcctgagcttcctgagtagctgggattacaggtgcgcaccatcatgcstgggtaatttttgtatttttagtagagactgggtttcaccatgttggtcagcctggtcttgaactcctgacctcgtaatccgcccacctcggcctcccaaaatgttgggattacaggtgtgagccaccgtgcccagctgaggctgcactatttttaactgacgttcggtcatgttaaaggccttgctgaggtggtgacattgaagctgagatccttgtaaagatttggaagtagtctttgtaaagatacagaaacagtcttgtaggccccaggaacagcaagtgcaaaggtgggcagagtggagatgagtagatccggaatctccatgatgtgggggttgtaaatgcttgtctgtcataagggagtaatggggagttgaaatgggaagagatcccctcagccacttcggaggtgccttgttttggtagtgcaaaagaagaaaaaatagtgatctgtgagctcaagtctggacaagaacagccagtctcccaaactccctgttsagagaatgttgagtggaccatttgtttcctgtgaggctattccatacctaaaatcccttgatgatcctttctgttccagcaaaaacatgcattaaatgtacttgaaaagttttggtttagaaarctgtgtttcttaagctcagactgggtcagtttccctaccagagtggtggrtaatgattttaatgtttacaagtcacctggatgtactcttttctcattcagcatggcctgtatgagaagaaaaagacctcaagaaagcaacgaaaggaacgcaagaacagaatgaagaaagtcagggggactgcaaaggccaatgttggtgctggcaaaaaggtatagttcattaaggaaaatatagaaacgtcattaattgtaggtctttagtttctaggaaagaagggatcttattaatttttaaaataacttttcttaatgtttcttcttttccctcttcttctggattacagaaggtaacatgttttaagaaactatgtagcatagtgtcttaacacctcagtaaagtagcttggcccaccccttgtcagctcacagcacaatctggaggccacattggttcattgatcccagctggtgggcacctttcaagcctatcacaagaagttttaattttactaattggcatagaaccttcaatgcagagcggatcccattccctgtgattttacttattaatatggacactggtttaagaagcagttggatcaatgtggcccgtgttttcctggcacactggaaaggcaactgagatctcaggattgctttcctctccagttggccaagacaagtgattttagcgataagcagctttttaccagctttgctagctgtaaatagttggacattgtaaatcattgaatagaattaaggtgttgggttgttaaattaacaaataatcaagtgttctgtgaactttttttttttttttttttttttgcttttcctctctactttcttggatttcttgttcatcagaaatgaagtgtctagcaggtactgagattgtaagcacggtgtggggatgcatcaccttcactgagtttgctttgatgatgctttgcatgttggcctttggacgacagttttatagtatggtcgattataatgccagtgctatttaggctggtgcaaaagtaattgcagtggcaaaaaccacaattacttttgcaccaacytaatatgttttaagatagtatattatgagcaaaggagaaaacgtttaaaatcatgtttattttgtaaactccaaaatgcatgttacatgtgaagtgactcactggaggaaggtgagtactttaccaagtaggcacttgggaaatgctgtgtccacatacttaggaaatggcttcagttaacactgggcttgggaagggctctcttatccaaggagcagtcttctctggagccatgaaaccagcctggcagcactggtaataaactagtctgtgaaatctggcaaagcctctgtcctgtttggatatacgcaaaactgccttttaccatttccattgctttttattacttaatctcccaactttgtgcctggtgtctttttttttttttttaaaatagaaaatttttgaggtaattatgtattcatataaaagtctttggtggatatgctttttcccacaagcacttggttagaatggcccattacctcatttgtttattttttgagacagggtctcttgtcacccaggctggagtacagtggcatgatcatgggttactgtacctcccgggcttgggtgattctcccacctcagcctcccttgtagctgcgactacaggcatgtgccaccgtgccctgccaattttttgtagagacaggatttagccgtgttgctcaggctgctcttgaactcccggacttgagcagtctgcttgtctaagccttccaaagtgctgggattacaggtgtgagccactgtgcccagcctgttacctcatttaaaacaaattttgcacatctgaacagcctaaaattgtaatgtgataagtggggtaggagtggggtgggcgtagtgggattttgaatcaatgaaggcccttgttcttgtggcatccttttgcagtgattccctgccaggcaaggcagtaaacctgggattgcctgcccaggactgtaatcacattgatgtcccagcgccatggagtatgtaatgaatgaactgccagcagaactactcactaagaactactccctgtttgtgaggattgtacctgttgagagaagttgcaaaaagaattagtcaaaagaattagtcaaaatttgtcctctgacctaggtctgaaggacatttaacacattgattgttctcttcatccagcctttgagccctatgagttagtgcccttagcctttgagtcccacaggtatggaggagctacctgtggggacctgagccatcactattcctgcttcaagttacactggtgcctctcactagcactgctctgaaaagccagctggaaaaatcaatgcatttgagtacataaattctttggctccaaagaaatgccatagcaatattgcttttaattcagttttgtttagatgttagaattggtatttgttcttgctttttggttgcgatggagttatatactaagttacttatactaaggcattagtagtctcatatctgaggagcaattgtatttttagttcagctaaattaatgcctctttttaaatactaacttgtactacttttgtggctgtgaatggtatcttttattgaactgaggcagcttttaaaagacttgcctgatcatttagagcactcccattgaggttaaattagacttgaatctgtaatgattctcgtaactgttcctggtgtgtgtccagcacaatgttgctgggcagagcagaggggcagaggctcaggtatgtacttcattgacaagtgggcaaggccatcctgggtaccacattggcttaatgatctcttcattgtgaagtccggctacctcgtttgcataagaactacagtaatcaggcaaggcattgtcagaattgggaggaataaaatcagtgagtctggaaggagtgctctgtatacaattgcaaagaacaaaatggtcatctttaaggtacctgattgcatgcacttaaatgcagattattttggagtttgaaaagggactattaatgaaatctttcttttccctcctttctctttttcccttccccgccactgattmagtgagctggagattggatcacaggtataattcaagcttttcatgtagtcatgtagatcactagactccttggtgtactgacgyagcaatttaaaagcagatcatgtgtagtacatctagaagtagatttacaaatattctgaagagttgtaaccttttaaaatactaacagtgacatggttttgtttttaaggtttagcaatatttagcccattatttttgttttattcttaacttgaatgtttgtaaattttatttcttgatgctttcattgtgttatgataacatcaaaataactkgatattctaggttactaataattgttgtgcatgagtgttactacttttggaattgaagactttaaagaattttaaaggcagttgttgactaaacttctttctcttgattcacagcygaaggagtaaaggtgctgcaatgatgttagctgtggccactgtggatttttcgcaagaacattaataaactaaaaacytcatgtgtctggttgtttgaaatgtatttgcagtttcctgggactgctaggaggttagtctgctgatttcagttgctgtccaagttcacatgctccatgaagcattcagtgaaaacttaatgtcatggggtggtgtttgtttgctgcttggtttatagcttaggtgggttcatctgggagtcaagcttgtaaatgctgtgttaagaaccatgtccgcggtggacgcagtgtagtggctcacagtcatcagcacttttgggaggtttgggtgggatgattacacttaagcccaggagctcgaggctacagtgaggtgttttttttttcgagacagggtctagctttgttacctaggctggtcttgattgaactcgggctcaagcgatcctcctaccttggccacataaagtactggcatgagcgaccacgtctggcttagagtctaaaaagtaccatgtctggataaactggagaaatctcaggaagcagtagagagctgaaagacttggttgggcatgaaggggactcaggaaaagcaataccgtgaaggcagaagggttgaggttgcaggaaggaagggtagtggaatgttttggagaaaagatggtcacagcccctgcatggagcacctacagacaggagggcagggctgagaagagttaagtcatggggctgggcctgctggccagggggtggttggagttctgttttcatatctacagaggctgtgtacttcggtttgtggggcctctggccctgtaggttctcttgctaaggaatctgctactactttgctaggaccaggaaatggcttactagtacagaacgtgtggaagaatggggtctttgatgtgatttgacattttttgatgaacagtgcataccaggctgaaggtaatgctaggggcagcaaaggttggggtttgagatgcagtttcctgtgactgagctggagtgtggaagcagagaaggcaccctgtgagcagcttgcagaggcaaggtggtgaggatcctgacagtgctgcagggatgggatgggatgggatgggacaggacgtggagctgggggtggttgctaagttgatgcagggagagtggaaggaagcaattgagaactgaagggtaggaaatagtttctgatgtgaagaaaaagggcatagctgcagagagcctgaatgattgaaggttggcatcaaagtcacgaagtgggsaggcttttctgttcagctgtgctcagggcagaagttgtagtctttcagccagtagccttgggaagggaggtgggatgaaactcaggcttggcctatttttccagaggatccacttgggttgtgatattatagaaaatgtggcagtcttgctgtgagccttgttaggcataacatttggaaacttggcaaattttacgtaaaggtctggatttccagcctcttgaaataccagaagcagcagtagtagcccaccttcctgtttgataacaattggcagggctccaggctggctgcatctgttgggacaggtattctctggtctccacagcctttgctcctacggccagctaacaccctcctctacctgccctctggtcttctgtccctgctgcctgcttctcttccatctagtccatycaagtgttttttggggaagtcacctggtaccttgttagggttaatttgtcttttaaattgggctcccaagggtatctgctagctaccctggctcacaaggctattttgaggctgaggatgtaacmactgtgaaaacagtttggaaactagtgctaagcaattgtttgtcrggaagcagggacttgtgggaactcaaactgtggacagattcagcacattgtaggccctcacagtaaccaggctaccctgtgctgtcagcaggctttggaagagcctccataaaatgcaaacttgactttactaagctgaatcaatattgagggagcacatcccttccttcagcttgtcactgatgggaagctgtggcttagagagagcagggatctttgaagagtgatgagaaactcagctagaggtggttctgggaaggtacctgcagtgaatatttggggtgctgctttttagcttttcctagcaccacaaccatgagttctgtttgtagctggatgtgcctatgtaatcaggcagctttcaactctgcactcttcctttcttccctggcaagttgcttattttaggctgcccttaaagacagcatcttacatggtgctctcatggagccgaaacaggtgctgtcctaaactctgaacaacgatctccattaatctgcgcgcgcacacacatmcacatattttttttgagatggagtctcactgtcacccaggctggagtgcagtggcagaatcttggctcactgcaagctctgcctcacgggttcacgccattctcctgcctcagcctcccaagtagctgggactacaggtgcccgccaccatgcccgggtaattttttgtatttttagtagagatggggtttcaccatgttagccaggatggtctcgatctcctgaccttgtgatccgcctgccttggcctcccaaagtgctgggattacaggtgtgagccaccgtgcccggcctaatctgcatgttaactccaagaagcatgtcttcctggacccacgctggaaagggtgtagagcagttaagcatcttaccagtgtctcacccatgaagtggtggggatgggattggaatgcagtcatctgactccaaaacactgcattttttcaggcactccagtattaagctactttgcactgtgcatataatggtatataaaactcatgactgccagcagggtgccagttgccatgggtttattgaacaagtgttagatggctagccaaattcccaatttactgaccacctgctgtgtccctgttctgcaagttggggataaagaagctgttctgtcttgaaagctctgaggtagttaatgacgatcccatgatctggcttctgttcctttctgtgaagtagcagatagtgtatgactgtgacgtgatagaaattgagagccaagaagatcagtgcagggaggctgggtcttggaaggcttccaggagacatacagcagtccccacctatctagtttcagttgctgtcggtcaactgcagtctggaaaattatcatggctaaatggtctgggatcacccaaaagtgatgatcctcttgaagtgtcatcagaaggtcaatagtagcctaacacgtcaccatgcctacgtcatttacctccctctcccttccacataggcattttatctcccatcaagaatgtgaatacatgtacgtattcagaggaaaagagttcatgcagcctactacagtataattattaatatcttactccctaaattatgaactttaattatgtatatatagcaacaaacttggtgtagatagggtttgcggtttcaggcatccactgggggtctaagaacgtttgccccatggataagggaggattactgtaacaccagcagtggcaagagacatgatctgatttggatgcacaggagaaagttctcatttgaggccatgaaaaataggaaagaaagcagggagatgggagcaggcagtgtgggacaaggtgagaccagtcattctgcaaggggaagagaggatgacactggggaggtgggagcagagtgggtaggtaggcattctcttgaatcaacaagatggaaggccctacatgactgatgcctttgagcagagttttgcacaatgcatttctggtgggagatactccatttcaaaaatagtcttcaggttggctgctagagcacagaagtatgacacctgactcatttgtgctggcagagaggctctcctgggttttagagctttgtgaacacacctccatacattaatccaactgtccttccccatccactcacccttgaacttcccgcatgccagatgttgaggggaggcagaaatgagacctgcctcccagtgcccacagtctggatgagagggtacaggtgaggtcctggtaagaaacgaagctggagaggtcagcggagaataaatcagggaggatcttgtatgccaagctaaggatttcacttgttcagtgttttggttaaagaaaataaaacgttggagaattagatgttctgcagtggattgtgtgttcttttcacatgccgagttcctccacacaggaaatactttggcaacgctctggctgctcatcatgcatattggagagggaatttatgtagaaggttatgggtcgatgagatggcatccaagtatttatcgtatttttttgagatggagtttcactcttgttgccccggctggagtgcaatggcacgacctcagctcactgcaacctccgcctcctgggttcaagcaattctctgcctcagcttcccgagtagctgggattacaggcatgtgccaccatrcctggctaattttgtattttgtagtagagacggagtttttccatgttggtcaggctggtcttgaactcctgacctcaggtgatctgcccaccccgcctcccaaagtgctgggattaccgtcgtgaggcaccgcgcctggccccaagtattaataactcggaaaaagggaccagatcaggaatcaggagtcacagttcctgatctccactcagcttacaatcagctggggccatggatgggcaaaagacttcccttttctgggcttctatttccctccctgtgtctgtctgctatccgggctagatgagtaattccgaaacctggcaggtgggggctttctttttttctttttgtgagatggagtgttgctttgtcacccaggctggggtgcagtggcactgttttggctcactgcaacctctgcctcctgagttcaagcgattctcctgcctcagtcttctgagtagctggaactacaggcgcctgccaccatgcttgggtaattttttgtatttttagtagagatggggtttcaccatgttggccaggctgggggcttgttaaaaatacaaatgctggctgggtgtggtggcttatacctgtaatcccggcactttgggaggctgaggcgggtggatcacttgacgtcaggagttcgagaccagcctggccaacatggtgaaacatctctactaaaaatacaaaaattagctgggcgtggtggtgcgtgcctgtaatctcaattactcaggaggtggaggcacgagaattgcttgaacccaggaggcggaggttgcagtgagccgagaccatgccactgcactccagcctgggtgacagagcgaggctctgtctcaaaaacaacaaatgcccagcctcttgccccagttttcagagttagtagatctgggtagcgcccaagcacctgatgttttaatagcttcccaggtgaggctgcttcaggaaactggactgaagcttcccaggtgagctcaggcttgggaagctggactgaagtttctctaagatccgttctgcctctgagaattctgtctctaatgggaatactgtctctgccctcaagaagctggcagatgaacagtaatactattgctaattaatgaccacagaatagctaacatttattgtttaccatgtgccaggtactgagctaagtcttgcacaaattatctcatttacctttttttttttttttttttgagaatgagtctcgctctgtcacccaggctggagctctggattgcaccagtggcgcaatctcagctcactgcaacctccaccttctgggttcaagtgattctcctgcctcagcctccatagtagctgggattacaggtgtgtaccaccacacctggctaatttttgtatagtagagacagggtttctccatgttggccaggctggtcttgaactccagacctcaggtgacccacctgcctcagcctcccaaagtgctgggattacaggcatgatccactgcacctggcctcatttacctgcactcggagggaagtactattacccccattttatagatgaggaaattgaggctcaaagaggttaaggaacttggttaaagttacacaactatggcatcctatgataagcctgggggcatttgtggaacatcttgccaaggagctagaaatggtcctgagccttaaatgggtggaggtgattagctgaggcagcgattctccaggtgtggtcctggacagcagcagcagtgtcaccagggaacttgctagaaattcaatttcttgggctccaccctagaattactgaatcagaagctgtgggtggggccaggtaacctgtttttttttttgagttgcccaggctggagtgcagtggcgtgatcttgcttcactgcaacctctgcctcctgggtgcgattctccacctcagcttcctgagtagctgggactactggtgcctgccaccacgcctggctaattttttttttttttgtactttttagtagagatgggatttcaccatgttggtctggctggtcttgaactcctgacgtcaggtgatccgctggcctcggcctccaaaagtgctgggattataggtgtgagccaccgcgtccagccagaacctgtgttttgataagctctccaggtgattcagatgcatgctaaagtttgagaaccactgagcttagggaaggggaggatattccagagggggacagctgtggagacccggtaggacagtgctgtagactgccccatccctgccttttcacttggtgaaataaagacgtgtgatgcactatgcagactcccacaagggggcactgtgggcacagacgtggaagcggtctgctttgttgtcaagaccgctacccttgtggaagcatgaaaaaagcttgatgccagatcaactggagaggtcactctttcttctcagagaaggtctaatgggggtggtaatcttgtttataggattcggccctcgtagggaagctgaacctggagggctttctgctgttcatatgtgcatggtgatgtctacccatccgtgctgcgaggtctctgcagatcctgtgcaaacagcattcccccttttgtagctgcccagccaggcagcttgcggtttctattgggggaggtgggggccgaaggctgggaaccccagcagcccgattctgcttcagccttctgcctacagtgctatgcctctgtcctattctttgacaagcatgggtccggggccacagtgctgggtccaagacctgttttcaagccttagctctgccccaccacactttaagatctctggcaagacccctttctcctctgggtctcagtttcctacactgtaggatgagagagtggtgctgagaaagtggctgtcaacatctctttccactataaaattctgccctgggagttgaggaagagactgccttgtgcttttcaaggacctcggattgcaggggatctgtaaaccctgctacatgacatccatctccagtagccacttaaggaagcatttccagggatatggtgcaagtcagtaaggtggaatctctcaaacaagattttttaaaaagtccatatcttcagacatccagaatttgcttttataggtttctattctgcactgtttggaagaaggaaaatttataccatgttctcttttctgctgcagtgtgtatttcttccaaaaatacattgcctcggagggtctttggcattcacctcgttaatccagggattggcatcctatactctcggtgactgctcacccagctgagccactgctctgcctgggcaggaaatctccagaactgccttttcagagcgctatagatgtgctcatccctgggttataaggggattcaaaagagtggtccagccctctgctggctcccaccgtcgatgatgatattcagagagtctggttagaaattgcccaacccagccgcgtgcggtggctcacgcctgtaatcacgttgggaggccaagatgggcagatcacaaggtcaggagttcgagaccagcttggtcaatatggtgaaaccccgtctctactaaaaacacaaaaattagccgggcatgggggcatgcacctgtggtcccagctgctcaggaggctgaggcagaagaatcgcttgaacctgggagagggaggttgcagtgagccgcgattgcaccactgcactccagcctgggcgacagagcgagagtccatctcaaaaaaaaaaaaaaaaaaaaaattgcccaacccataggcaaacattgttaactgcagctgtccttggtggaggaaacaagttaaacatgatgtctctttccatcaggcctccttggagcggggaaggagagctcttcagttcctttggcaccttcacgcagcatgcaagacgggctgctttttcttctgtttatggatgaggcacagagggtrgatgacttgccccaagtccttcagctcattcatgctggggaaaggagtaagcttcaggcgtcttcccctggagttcacgccacytctgacagcaagtgagcygtttgctactcaagtgctgtttcttgcttttttaaggtaacaaaacactgcatgctgtckggggtaccttttccctgctgttcagttcattgccctgtgtcgtctcacagagygtgtcactggtacagaaatgttccctgggaagctagagttgaaacatcgcccactggtgctcctgagctggctttgtcatgggtttagagggtatgttagggaggaggccttctgctgcaagtctctgagaagtcagcttacactgccttgaacagtgaggttgcttattagctcctgtaagaaccccctggatgcccaggagccttcagggttggtggacactgcagtttaacagcgtcttcgagggcctagacgttttctctctccactttgctgccaatgctggtgccattctgagggatagttgcccatcacagtggggctgggactgggtgaggcaatgaagcgcttagcatgtgaaatccaaggaggtcttcacccacagtggtgctagtgcaaggtcagcatctccttgaccctaagagcaccttgccctagtactggggcctgtgggaggccacccactctccacaaaggccagaccagaagtcacctgtgttttttctgctcctcttccatcggctgggacttagtctcctgcaacacctaataactgtgaggtgggctgggaaatataggcttgttccagctcaggcagatgtgggagcacagttttgggggacaatgaccagtctttgccacagcaggaagaaaatggttgcttcatagggatcctttcagcagaaacctcccagcaaaagggggaagtttactgggaagctgtgggtgatctaacaaagccaaaaggtaggcggtgctggcagcctccctggatttgggtctggaaaatcatttcagaacaaatcagctcttccttctcccctccttcctccttccccctctttgagtctatgccyctctctctctctacaggctggcttttctttgttcccctttctgccccatggctgccacaaycaggattttattgctccccattccaaacttccggccagattagttagacctgcatcctccttgccacttcccagggacaagatgctgactggtctgtcagctcatggagcccactcccacttacctggggctgaggagcacctgctgggaaggtttgagggcaggagggctgctgatgtatccaatgcagccaccactcccaccgctgagacatctgtctttctttccttcttgtcactcccagacctcagcaagtggccgctttaaaaagagaataagagctttattgaggtttaattcacagaccatatattcacccttgtaaagtgtgcaattcaatgggtttcaatgtatttgcagagtggtgcaaccaccaccaccacctaatttttaaacattttgatttttatttggtctcactctgtcacccagcctggagtgcagtgatgtgatcatagctcgttgcatcctcgaactcctaggctaaagtaattcttccacttcagcctcccacataactaggactacaggtgcacagcaccaggcccagctactttttttttctttttttttagtttttgtagagacagagtctctacattatgttgcgcctcctggcctcaagctatcctcccaccacacctattcatttttgatcatttttattatgccaaaaagaaacccttagcccggcaggtgtctcatgcttataatccctgcactttgggaggctgaggcgagcagatcacctgaggtcaggcgttcgagaccagcatggccaacctggcaaaaccctgtctctactaaaaataaaaaattagacgggcatggtggtgagcacctgtaatcccagctacttgggaggctaaggcaggagaatcccttgaacctggaaggcagaggttgcagcgagctgagattgcgccactgcactccagcctgggcaacagagtgggtgagactctgtctcaaacaacaacaaaaagaaaccctgtagacattagcagtctctccctatttccctcaacctctgccccagcccctggcaaccacaaatctgttttctgtttttataaatttgtctattctggaaacttcatataaatgaaatcatatagtgtatataggtttttatgaccggattctttcactcagcctaatgtttccgtgctatgtccacaccgtagcatgtatcagtaatttattccttttaattaccaagtaacattcccttgtgtggatttaccacgtcaacatcagttgatggatatttgtgttgtttctgctttttggctattctgaataattttgcagctatgaaaattcatgtgcaagtttttgtgtggatgttttcacttctcttgggtatatacctcggggtggaattgctgggccttatggtgactctctggttaactgttttccacagaggcagcaccattttatgttcccaccagcaatgtacgaaggttctaatttctccacatccttcctgacacttgttattatctgtacttgattttagccatgcaagtaggtatgaagtggtatctcattatggttttgatttgcatttcataataactaatggtgttgagcatcatttcatctgcttattggctgtttatatgtcttctttagaaaaatgcctgtttgaatcctttgcttattttcaaatggggtgatttgtctttttattgtgttgtgttagtttatatatcctggatgcaaatctcttatcagatatatggtttgcaaatattttctcctattctgtggattgtccatttttaaaatttatttatttatttatttattttgagacagggccttgccctgtcgcccaggctggagtacagtggcttgatctcggctcactgcaacctctgcctcccaggttcaagcaattctcgtgtctcagcctcctgagtagctgggattataggcatgcaccaccatgcctggctaatttttgtatttttagtagagacggggtttcaccatgttggccaggctggtctcggactcctggcctcaagtgatccacctgcctaggcctcccaaagtgctgggattacaggtgaccgccaccacccccggcttagttcttggtttttctgtccttggaaactgctgtcagggttcccgagagactttgaatgtaacaataataccttccttttattgagtgcctactattcactgtgttgggcacattgtatatattaccttttgtcctggaaatagttttacaaggtggggattattgtccccatttcatagtgtgatgaggatgctaaaaaaaagcaaatgttgcctctagctgccgccatgggaggtaggcacctggagcgaaggcacggcaggttctgctctgccctatctccctttggaccccttctaggggttatgttggatttggaagccacgaggaggagtctactcagacaagagcatcctgatgggggctgccttgagatgatggggtgtaagccctgtttagctggaaatgaggagagagagacgtacccttggtcaagggctatcatgtgaaagaagggtaacatttgtcctggagtgtggagtgtgaagcatatggggaaatggtttgggctggatagcaggcagtttttaaaacttggagcaagccgggcgcagtggctcatgcctataatcccagcactttgggaggccgaagtgggtggatcacctgaggtcaggagttcgagactgtccttaccaatatggtgaaatcccacctctactaaaatacagaagattagccagatgtggtggagggcgccttgtaatcccagctgcttgggagcctgaggcaggagaatcgcttgaacctgggaggtggaggttacagtgagctgagattgtgccattgcgcttcaggctgggcaacaagagtgaaattccgtctcaaaaaaacaaacaaaaacaacaacaacaacaacaaaaaaaaaaaaaagaaaagaaaaaaacctcggagctaatggaaggggcctgccccctgggaagcagcaagcttcctgttgctggtggtacacaagcagagcctggctgctttctaggtgaggtggttgtagaagctctttgggttcagagtcctgggggggttttagggtttccttgaatgcccagagcctgtatgtcatagcttctgatttcacagggacttcctgtccacgcagctgggatctctcccagcccagattcatcatgtctcacccatcctgagggctaaatttggaatttaataacaacactttggatttatgtggcccgtttccttggaggcattacatctgttatcccattaattctcctaatatctttgggtggaaggtgagggaaggtgagggagcctgagaggggagaaggaacctctttggcttcttcagctcctgaaggggagaggaaatggcagagcaggagcgggccggggatgggggaacgtctgcaccacagcccctctggctttcccctctcataaaaagcaggttgctcaccggatgaaggggtgtctcccagcaggaagctcctgtgttgggcacagtatattggtgcataagtctccaggtggactctttgagggctggaagtgggtagacatcaaggtgggcaagatgaagcctgagccctaagcttgggaggagaccaacatgtctaccacgaaccaatttgcagagctggatggtctggaggaagcagtatggcttcctggggaagggggatttgagctgagtttggaaagagtyctggagcaccctggagtccagtttcctacctcctagtcacgtggtgtgggtgaaggccataccttggtgagctttcccagggtatgggggtgcctagggtgctcctcaagatcctaaggcttggcctggagtgctgttgggcgaatggccagagagtctgggcaggcagaggagggctggggactagtgcagggaaggagccgctggcactggccatgaagaaggagtgggaagggaagggaagggtggcccaggtggagggctctgtggggcagaggcagattggtgtgggggttcttgtctactccagactatgctgttttcattcctgcctctgttctgaggcttgaactcctgcaggtacctggcttttacagccctcccaagtgcccttccttcaagctttggctctgactgctgctgatcttccctggtaccaagtgagggaggtgcagaatcccaggccacaggcgcagaacagggcggctggaaggcacctggacaatcctctgagactattctctccttcccgcttttgcagatgagggaattggggcttggagtgcaagcattgggaagaatttcccaggaagagagatgcacagatgtgaagaactcgaaggcaagagaaagccggggggttgtgtggcaggtagaagtgccaggaccgtggagcgtgtggacatgtggcagattgcggaggggctgtggcaagtatttacaggtggccgttacctggaggaagactgaaaacagagaacagtgctgccaggcgtgccttttggagagggcactggtcagaaacggagccttcatgtcgcctgcctcacctgctcctgctggttctccccaccctgtggacggtgacttggtcctccacttgccagaagccttgtcagcaaccttgactctgtcaccccacatccaggccatcaacaagtcttttggccctttctttgaaatccaccaggaatccagctgcttctccccaccttcctgcctctctggtctgggccactaatgtcactgccatggccgccttgctgcatttctgaggatgcttcatctctccaccttcttctccactcagcagccagcagggcactgtggaaatcggagtcacatgagctggcacctctgttcagaaccctccagggctccacatctctctcacccaaatgccaaagacctccccacgcccccacaatcccccacgacctggccactggcctcccaccaccttccagctccagcggctcctaccacatttaaggctttccttcctagttttaatttttcctcgtcagcagttgattttattattttcttgtttattggtattttcccactagaaatgaagctgcgtgaagttagagattttttttttttggtctgtgttcctaattagctcattgctatacccctggcgcccagaacaatgccttggacacagtacgcagtagactaaataaatacttgttgaatgactgactgacggaatgacggctgtgtggggagtggattgggtcgtgaggcagaggctgcggtggaaactcaggcaggaggtgatggtggttcttggggctgcggaatgccaagtttagaagctcttcctctgctgtggcacatgaaccggtcactcgagaaggcttttagatttactttgcctaatcccctcttagtgcatgtggggaaactgaggtacacaaaaggaattccccaccaagttaggggcagaacctagcccccttgtctcccagatggatatcttcttttttttttgagacggagtcttgctctgttgcccaggctggagtgcagtggtaccatcttggctcactgcaacctctgcttcccaggttcaagcgattctcctgcctcagcctcctgagtgtctgcgattacaggtgcacacaaccacgcctggctaatttttgtatttttagtagagacggggtttcaccgtgttggtcagggtgacctcaaactcctgacctcatgatccacccagctcagcctcccaacgtgctgggattacaggcatgagccaccgtgcctggctggacatcttgttattaaagcttcttctctctttgtaggggagggggagatgcctctggtggagaagaccagtgtggcagtgactgtgtctgttagtgaacctggtggctggttgagggtctgtcgtggtgactgaggacacatacaaagtgcttttctcagtggtcaccttggtgttggtgaataagggtcagaagatggctcctgtcctagggcactgccagtcggtttggaagctgaaatgcctgcttagcagtttgaggaaacacagaccttggaggatcttctggttgcctcttcaagaattcattctattccccttctgctccccaaatttgcttttcttggggtgggtcttggttggcctaagccaagaaagtatggcatctactccttccatagcaatagctcaggaataggcagtgacccagacctgaaccaatcagtgcatggaattacccctggccaaagtggttgattgaggctgggtgcaagcagagttgtgagaaggctcccatttggtggttggagagatcgcacttgctccagaggtcataatgtgcagatctgaggcttggaactgctgcagacattttgctaccacaagtgaagccaccctgacgacacagttgacaatttggagcagggcagagctgagagaacagcagggaaacagccagagtcttgctcaagcctccctgaagtatctatacccctggactctagttatgggggctaataaatgttatatactgtttaaggtagtttgagttggtttatctgtcattcgttattgaaaaaacatttttttttcggctgggtgtggtgacacacacctgtagtcccagctgcttgggaggctgaggcaggaggaccgcttgagcccaggaggcagaggttgcagtgagctgagatagtgccactgcactcactctggcaacagagcaagactgtctcaaaaagaaaagaaaaaaaaatttccattttcatcaaaaattgtattaaagattttctatgtggtgggttctataatatattcttatagggaataagacctatattatccttcccctccgagagcaatgaaaaaaacacaaatactgaggtgggcagatcacttgagctcaggagttcgagaccagcctgggcaacatagtgaggcctgtctctattaaaaaacaaaaagaaaagaaacacaaatatcacacataattatagacaaacacatagccaagttgaggaagaacagaaacaaaaccaaaacagtttttctgggctgatcactgatcagatagagatcatttacttgcctggcctttgctctaaagatctggtttcatgttggttttctccatgttactcatgaaccccaggaattctggaaaattcttacctttctaagatcaagagtaggtgtagcagtaggagcactttgagtgtcagggtgacagagcccagaggcaaggcccatctgcaggaagcgaagtgacaagttgctgggtggccccttgtgtgatcctagcattgtcaaggaagaaatcttaactgatatttgggtgatagggaatcatggggaagtgtgggtgtggatggggacagccagagacagatgtgactatttttttctttttctttctttttttttggaggcaaggactcactctgttgcccaggtgggagtgcagtggcttgatcaaagctcactgcagccttgacctcctgggcccaagtgatcctcctacctcaggctcctaggtagctgggaccacaggcgtgtgccaccatgcctggctaaaatacatatatatatgtgtgtgcgtatatatataaaatatatatgtgtaaatatataaaatacatatgtacatatattttatatacttatatataaatatatacaatatatatgtactatatatattttatatatatatatatatatttctttttgagtcaaggtcttgctctgtcacccaggctggagtgtagtggtgtgatgatggctcactgcagcttcaacctcctgggttcaagaggtactcctgccttgcctcctgagttgctgggaccacaggcacacactaccacacttggctaatttgtttttcctattttttgtagtgacagggtctccctgtgttgtccaggctggtctcgaactcctggactgaagcaatcttcccacctcggcctcccaaagtgctgggattacagccgtgagccaccacatccagccagctaattgttttttatttttgtagagaggtgatctccctttgttgctcaggctggtctcgaactcctgagctcaagtgatcctccctccttggcctctcaaagtgctgggattacaggtgtgaaccactatgcctggccagatgtgacttttgcttgaaatgtgctccagagccctgcctaagtcccgctcctctgagaagccttctgtcccaccaggtctggagggcaagtgccaagaaatgctctgagctgtttcttcctgaaagtggggcagcttgggctgtcagcatggtttctagcaccgttggggccatggaaagaaatctgtcttcctacagagtcactggctttttatccttccccttctgtccgtggacatgtaccctcttgggagagtattgatcagaggggacagcactgatcatgcctttgccggaggtctgtgcacacatccgcatgggcacctgttagcatgtgcttgctagagctacagatggcttcctgctgccccacaggtggggttctttaccttactttgccccttggtgggtggtgaccagtgggctccttcctggaatatttatgcatgcggaaaaaacatgaacttacaaagaaaaccaagtctattcaagtacacttagcaaaattaacatttgtgatgaagtaacaaatgtttccttattaatgcaataataactatcttgtggcaggtctaattactactataattcaaagtagggatggaggccctagtgacatttgaaatatctgtaacagctgtgatgttatatgaaaatatctgtgatttctactggccacaaagtctctggaagtgctcaaagtacagggatttattatctacattcatgatggaaaaatcttagaaaagaaccaaaaaaacacacaaaaaagaaaaaaaacaaaaatcttggaggtcagggctgggcgcggtggctcatgcctgtaatcccagcactttgggaggctgaggcgggtggatcatctgaggtagggagttcaagaccagcctgaccaacatggagaaacccttgtctctgctaaaaatacaaaattatccagggtggggtggcacatgcctgtaatcccagctactcaggaggcagaggcaggagaatcacttgaacccgggaggcggaggttgcggtgagccgagatcgcaccattgctctccagcctgggcaagaaaagtctcaaaaaaaaaaaaaaaaaaatcttggaggtcagtgaaaataaagatgtaacttttttcttatccaagttcatgggacccctgcattctatccgtggaccccatggggagtggctgtgctccccaagttaagaacccctgggtgacaggtactttaagaaatgcttgtgtgtgtgtgtgtgtgtgtgtgtgtgtattacattctgtagatatatgcacctatgcatctaccaggattctcctacccacagagaaagctacaggggacacctcttaccactccaggtggacctgctatgcacacacacacacacagccacaggcatgtcagagacacactgcatgtgtacatgcacatgctcgtatgcagcacatggggtcatgtgcacacacacccccggagaagtgtacacacaacttacacttatacctgcccacagagctgcagggacacatgctcacacacacaagcatgtggacacatactcctggctctgtacccagcgcttcctgtacacatgtgcacacaattctaagtcctaggcaggatggacagaggaggtcagattcatgccatctggatactgtccccaggcactaaggaggcctaatccaagaggatcagaatcctacccaatccactctccccaagtgcaaaccaaggagccagtgaaactctaatctgtaccctaatgggatttgatcaacgtcgctgtgccaccatgagtggggctgccacagagccctcgatttgagcttgtctgaccccgtggtgagggagtagggcagtgggcccagtacagtgcgggcgccccctcaaaggaaagcattcttcattggtaatgaacattatgtctgcagaaactaatggcccaacctcctattcagtttatgtaaaataaaacaggccatatgctgctgctttcagagtttgggtgtttaaattaaatgttgttcaatgaatattcaagcccatttgctccaaagttgtgctcaatgtggtggtggctctcatccccctccttcctcgcagcccctccctgctccagtacccagggtattaagccattagaacggggtgtgaacatccaggcatctgtcttccaacggaaagtt

SEQ ID NO: 97724 - DNA, 121702 bp, Homo sapiens
gcacagagctgccagaatgcccgtagctcagcccctgcagtcctcactgccaggctgaaagcgggccatgctgagccatgcacaaggccacctggctcacaaataacccaggaaatcagagtacttgggtttttaaattgctccactgtgggcagaaagaaaccctacccagagtcaaaagtgctgaccatgtcattgaatcatagattctctttgctgatgggccactttgcatccgaatactgccaaggcccaaggtaatgggtatggtggtataagactcaaacgagtaagtgaaaatcaatacagatgctctttgacctatgatgggactctatcctgtttaagttgaaaatgtcataagttcaaatgcatttaatacccttaacctactgtacatcagagcttagcgtggcccagcttcaacatggtcagaacacttgcatgttcctacaactgggcaaagtcatctaacacaaatcctatttttaaataaaatgttgggtatctcctgtaatatattgaaaacagcactgaaagtgaaaaacagaatggctatatgggtaccaccataaagtagcaaaatcaaaaatcaaagcatcgtaagccagggaccatccatctgttaactggaagcctcatgtcagctaagagcaataacacgcatttgctaacagcacattttgttacctgcctaattaccggtccgtccagccacttgaggacacactggaatgccgtggattccttccaaggctggcgcgctctctgtgggtggggagggacaagcacgttttgggtgaagatcctgtgccagtcgttcatcctgcccgcctgagggtcccgtgggcttcccggatgatctgtgccagtcgtattcaaataaagagaagagctgtgagggctagagtggtcacagcaatcctgaaggcttctgcctcccactaaatcccagaggaacctccatcccccaaacccacactctgcaaaccccagaagagtggactttgttgctggctggcacccatgctgcctcctctaggaagtaccatttgcatttcaaaaaggaaaaataaacgtagatatatttatttgtatttgcttagaatttatgaaagctgtacaataacacactgtatctagggtgatacaccaggtacctggggtcaacatgggatgattcacttttcctgtgtatccttgtcaactttgaactatgcgaattaccttttcagaaataaaaataaaatggagaaataaaatctacctccagagaaccctccgccccacccctacccccgtgggccagactcagggcacgactctcctgacctctgtggctggttccggatggggacatgaagggatgttttattcagctgtgtaagttggataccacacaaggacaccaggggtgggtggctgctgaaatacagtcctagcgttaagactgtcttgtaggggacccagggagcatgagagagggaatacagcccttgggccaagaggtggtcagcctgaaactgcccggggccaccttaggacacacataaaaacaagcagagaggaaaaggtaggagtgagggccactgggtccccatgtcattattagagacctcagttggtcaccccacgacacttcagctacatgaacaaagtctcttgttgctaaagccatttggggacaggtttcaggtgttaccagcttcttggtgggtcttggcccgttttgagtgttatctgatcctgtccagccagaccgggatctaaatcttctctagccaacacagaatccaaagatctgaacctcaagaagaggttgaattccgtaaactaaaatggcgagtaaggagaaaaagaagtgggtttggccttctaagacagcagctctctaagtacattccccaaacccaaggttcaacaggatcctgtcaggggctctacaaggtcaaaactattttcatgacacccaggtgttatctctttcaccatggtggcatggtggggcagaggcagcagcagggaaagccactggggcctcactcaacccaaggctggttgggttgagtgaggtcctcccaacctctcacagaaaagaacaaggcagcttcaagtaagaacatccttggtgaagccggaaaaactattaatcttattacttcttgacctttgagtacacacgttcttaattttgtgagacgaaatggaaaatacacaacaagcatttctgctgcaaactgaaaggcaacagtcatccccggggaagcctggctgtgactgggctgcatgctgaacacaccgcttttattattcaacaccattttcactaagaagaatgactgagagacaaacatgggtacttggcagacatcttctcaaacgtgaacaaagttagcatgtcacttccgggaaaacaactgcaacaaaaatggagtttccaagcaaaaatgagaattaagaacatttgtatcctctaccatgagcctactagcttcacacttcttcaagactttcctgatgagaggggcagtgatataacgtgatcttctaaggttacaccattaaatgtgtcaatagttggaaggtctgcatgactccgtgaaccaatattttctgaacaatgcgtaatggtacaaaatcctgcaagaagaaaacatccacccaaagtgcaagacagaccaaaggagtttaatgtcagagcacgaagagttcattcacatggtggagactctgctttagaacaaatccttaagaaacttctgctcgtagggtttcaatgcagcagcaaagaatatccacaatgacccaagagactcctccctaactagatcgggatggatttccttcacatacttcaaccaaggcaacacaaggcaacagactgagtacagaagcaaacaggagccttcagctgtcctctcttaaggagactgtaaagatatttgcaagaatgcaaaagaatcccactcttctaaatttttttttgttttggataatatagttggtttttgtaaaaaatgtttttatgttaacatgtcacagccttatttttaaataaattaatatttttaacatttctcagttttaacttctatggcagtaaacattggtagatataactcacataaacaaaagttctttggggtcctcaataatcttttaaagggtaaagggatctgagaccaaaaagtttgagaagggttgtgctaatggttcaccccctgcatgctcccggcatgtgtgggaaccgagaggacatgaccaggcagcctgagaggggccttggcccagggtcccgcctccacccacagtgcacccagacgctgcatccttggcccagggtcccgcctccacccacagtgcacccagacgctgcatccttggcccagcgtcccgcctccacccacagtgcacgcagatgctgcatgtgggccaggtattcctgaggaccagactcagtctggtcctgtgtgaatccagcaggcacacatgctggtttgttcctttttgttctctgtgggctatttttgtcgctcaacttcccttgttttgtggaggaccctgacccaattccatgtatggggagagctgctccccgattccagccagagactgcagtgattgcttcaaggaggaacacatggcccacactgagccatcagtcttccccgggagacttgagcccaggatgtctctcctccaatgcccacaactgcccacaccatgccagcccagagccccaggagccaccacagggagagccgactttggacttctgaccggcctaactggaaaagaacaaatttgtgctacttttaagcaaccaagtctgtgggactttcttacaggagccacaggaaatcatacagctgtccacgacttataagcagaagacacctgaccaataccagctcaagggccatctcccccaggagggcttcccaggtgctcccagggtccaggccccaggctcacatggcccctgtgcttcccttggtcacatcattcgtcacctatcttgtgttgaattgctcgctggccaagttcttgaagaaagaagcctcattcctcctgtgttcttggtaccgtcacaactcagtaaatggtcacggaaccaaacagaagctttagcaaagctaccctcaagcttttctttcccactgatgttttataacattcagaaatgtattcacacacaatgcaggccgtgatggccccaggtggggatttcagagaggaagtctctcctgacgcagatgcccatgctcctcacctgccccagatttctgacccggtgcctcctgccctctccctgggtgtctgcaggactcagtgccacacttggcccaaggacactgctgaaggacgtgcatacgccagtcgaccctcacagggagcatgaagcatgccggccccctgctgtactaggagggcagacactaggcggaagggcatccattccgaaagcacctgccacccacacggaagtcctgaggctcgggatgtggaggcagggcagtcctagtctgaggggccacggaggccgaggtgacacctgagactctgcaggtgggagcccaagcgcccgcagcagctctcactgccatcccagcacctcacaaacctctccgggtgcccttccacctgctccttgctcctttccacctctgctctggcctctaggagtcaaaccaaatgctccctcctcagagcgagagccccatcccccacctccggctgctcccacacagggcaggtgacagaagagccaccacgcttcaccagggctgtgctgtagtcctgcgagactgtgagctccatgacaccaggctgggtcttcagcaaaagtcttttaaggatgaaatacaaatgccctggaggaagtgcagaggggcctttggggccaaatcaacaataaaagagaaaatcgagaaggctccaggtcttgaacccaagaaaagggtacagtgggctctccaggggaaaaaaaaaaagaagaagaagaaaatacacccacttttaatgagcccctgatgcaagacaggaactcacattctatggttactattccaacaactctgccaaatgagaatcatcattatcgccatcttacagatgagaacactgagactcagaaaggataaacagccaatccaaggtcacacagctagctattataactagctattataatagtattatagatataatactgtaagctattataactacctcccactacctcaatcaaggaggccaggagaggccaagggagaagagaggcccagagggaaaaagtaagagcaccaaaggaacccagggctaatgctgtctcctctttaacttcaggacagattcgcagcctccccacctgtttccaacctccaaaatgagagctgtgaaatctccttgagatctctgcttctgctgatctattcagcaactatttcccgagcacttgtgttccagtgcataagaaggctgtcaaatgtgctgtcttcaagcatctagaaagccagtgggggagaaagacaagaaagtgactgtgagcagcaacaggcccccgggagggtgcagaggtgagcagggctgaaggaagatgcagggggtgggaggcgctgtcagggtccgggaagcctccttcccggaatggaaaatgtgtaatgcctgagacccagatgccttggggagcttttggggaagcagaggtctgattaagcactgcctggaattccctcattcatgagcattctttcagcacctaccctgcgcccgggagaaacggtcttgaacacagcagacaagctcgctacccccatagaatgtaaagaaacggggcacaaattagcatacaaaaagacacaagtgtgacctacggaaactgcacagaggaggtgcaacgaacggagccctgggttaggaccgggaggcgctgcccaccatcaacagaaatactcctccttttgccaactacacacgcgagaggctggatttccttcacagacgtccaccaaagccacacatcgcgacacacggaggcagaaagcagcggtctcctaagaagttagacacgaggaatctcgggcagcgaggtgcctgcaagcccgggggcgggcgggagcagcctgcacgcgtggggaagggcacgcgggagcgggtggcgccttccgggccgggtcggccgggaggttccaaggcaggaaaggggcgcagaaggccgggacggcgccgggtacaaagcctcgcagggacgcccgaaggccgcagagccaccgcggggaactgacagccggagccggagctggagccggggggcggggaggaggggcggaggggcgcggccaggcggggtccgcggactccggcctgggaaggatgcgcgcggactagggcgcgggsagccaaggcccagaacatcggtaccgcgctcccttcagccgaggggctgcagagaggccagggggcagggggcagggggcagggggcagggggcaaagggcaagggcagaaaggaacccacgtagccaaacggcacccagcggccccgaccccaagtgtcccgacgasgggggacgcctgcgactaacgcggggacagcccccgccgcgcgccaccgccgcaccccaggcaccgggcccccacgcagggacggcgtggaccaccctacccccgaaccccgaggctctggccaacactgaggccccctgtgcctcgaggccgcgtccaacctcccccgcggcgccggcccacatggttccgcccgccgcgggccgcgttacctaggagaccgacccgccgcggccgcgccggaggccacggagcccacgcttttcagagagtctccactcgacggacccagaggcccggcggccggtgctcaacggagccacaagcctgaggaccgaggactggccgaggggcgcgccccgtccgctgccacccgcgggaggagcctcggaaggcggcgcaccgcgccgcacactcagtccaagaacccgcctcgcgtcactgtcgccgtcagggccgcggagccaatcagagcccaagtcgagggctrcgctttgcgagcgccagccaatcggtgcggcggcgggcccatcctgatttgcatgtccgacgacccctcaaccaatggtaatgtgactggcgtgaacaatagccaatcagaagctggaagaggcgtggccccgggcgtcccacgaggtgaagatgctgctggcggaacctgcaggagctagcgggattcgggggcgctaaagtcgcaggggcagggcgggaaggaagatccggcgcggggcacaggatccggagctggagcccccaggtgagtaccggggagaccccggcggggcgcgctttccaccaagctgctccgggacggcggcggcgggtatccgcgaggcccgcgctgcggcaggcgccgcggtcccgtctccatctcttcttccccggccctgcgtccctgcctccgccgctgtctcacctcctctccagcctcctcacctccttctccatcgtctcccttcccccatccctttctgtctttccttccctgtcctcccgcccgcccgacccttcagctcgcatccctgacccctgcccctgccgccgtccctcttcccggtgcacctcttccccatctctgcccgctccggtcctagcagcctcgccctcccctttcctccatcctcctctcatcccctctcccggcctctgcgcagccccaccggggcgctgctgttcccggtcctccccatctctcctcctgatcgcttctcaaggctcatccgtcgttctcgctgcctgtccctgtgtcgctccggtccctttccccaccctcccattctgcccccagcccctccgacctctccccgcgggcacgctctcaccaccttaccctgctccccaagactgtgaccctgcttcctgcaccagttcctcgggctgtttacagcacacacaccgccacttctgaccctgagcccctactcctatcttaagcttctccctcctgccaggccttggcrcaaagcacttccgcacctccctacctgctgctgctcccaggatgcaaagaccccactgctgcaccgcgtcctgcggcaktagcagcagccggggtacctgcccrccttcccaccccgccaaccagccgcatcctggtgtccctcctcctggcatttgtcctgggggctcttacagggactgtgctttgcccgcagcatcccggggtgctccaggtggaaagccccttagcacctttcctccctggccaccgtctccttccctccccacccccactttcctgctcagcctcactttgtgattcagcatttttggggttggtaactttcttgcttcctgtcgtgatagggacctggctacggagctgaaggcaggggtcttgaccctgcggttagcagggccaccttaggaaccagacctgagctgcctggttgggagggggctgaggagctggggaccgccactgggggttgtcttttcctccctttcatttgtctgccctgtgytgaactgtgtccaaggggagatgacataagtaatagctcttggggaagtgggctattagcatttatggaaattaatacatccacatccgaggagcaagaacaccaagttcaggccacagctgtcccactgtctgtcgtttcaggattttttctttctctgcaacttctcctccccgacaaaaaccccagcctcacccctcccctttccccmagtgccaagagtaagctcctgctctgctaaggaagccgcattcaggccccgcgttgcaggttgcagggtttggggacctacgtgtggagagtcacatctgcccacctgattctcgcctggcggccgtgtctgctgcagagccctgtgcagctcctggccctgtgctctcgcagtgtggggccctaagagtgcacttggtcctccaggtcctgtcattgtctccacggccacactcggcctcagtggcactgacagtgttcgggccgcagcacatccctcgagagcagcatggtaggggcttccctgttgacacccagggccattttttttttccctgcgccagtcagcaaatgctttgtaggtgctagtcaacacctgggggctgagccaggcactggagttggggggtgtcgtgaaaaagygtgaaacccttttcgtgtgtttcttggttgagaaccgtcttgggtctggatttggagcctggatgggaagcagtgtgcacagaagccattgcacccgggaggtgggacgtgggccatggcgctagagagctggaaaggccgagggtgccatgggctggccagctagagaaggcttcctcgctttcatttttcagtcatcttctaagacccaaatggttcaggaggaagcgagtgccacacagttttgatttggcagtttccggcctgggcttggagggaggggcctcccctagaccttcctgtgtgttggtgctctgccgtggtaactgggaacacatcatctgtgtggaaggagagcctgctccctcgcgagaaccaggggaccgtgcttctgtttccagggactctggccaggtgcggtatgtgtctggtcctcggctaagttctcagtgatattcacgccgccagaggtcccagagtgaatgttttcctggcgtccctgaataaggaggcaggacagtgggcagctcggggcggcaattcgagaaggattgatgccagaggtgtctagggccatagaccccatgttcccgccagtccccctcccaccaccaggaggacttgggtcttggcacccagcagccggtcatccttgctctcagaggactaaacggaaggacaggcttctccagggtcaacagaggcagtgacggagctgggttggaccccctacttcctacttatttgagcccagttcatgccttggctgtccgagctgggggaagccagcaccccgaggacatgaccggctgtcccttcagaaggccacttggaggcattgctgacattcatgggcgcagccagtgcccttgggtgtgtccaggtcactggaggggcttttgggactgggaggtgccactaccatggagatttctcagcgactcagtcctgcctggcatgcaggccctggtgcaagggtactgttgttcgtggccttcaaagagatggccccatagttagagaagagtgagggcaccaggtccgtggtgggatgaaggaaaggagggaccctccccacactggaactacactcatgacctcagttcgcctccggcacttgtaaacaaccctgtgagggaggctggatagggaaactgaggcacagagcagcagtgaaactgatcctggcctcccagctagtgaggaaaccttgattctgttcctgccctgccagaactctgtgagaggtgccccctccgccatcacctgagctccatcgaatgcctgaaatcctcacctctgcaggagtgagtctcccaagaggccctggaggcccaggcccagaccctgggggatatggaagcactcctttgtcgtggcgtgggaagccccacactgctctttccttggtgacgggtgacccgccatgttcaggcccctcctggtctatcttcgggtgagtctattaagggatacaccrtctccgctcagccagtcccgaggaggcaaagggaacaggaccctcttccccaggagagagcacactgggggagatggggtggcacacctgggcttcgtcctgtcactgcccactggctcgaggctttcctgcctgcctgggcttggsagatgcgtgagactccctgtctcatgggcctgagcagatgctgggccctcttgtcctctgccacatcctggggaactcagatgaaggccagcctccctcttcctgcacacccaccatgggatgagccctgggctcaggcccctccctgcctgagggtgccctgccactgccacacccaggtttccactcagacccctgctggccagcgtctcaggaggctactccctgctctgcgcagtgaccacatggttagccccagagacccaggttctgcgtgtcttcagtgacagagcaaccccatgcccaccctgccggcttccccggcacctgtctccttgcaggcagcctcctccacttctccagcacacaggtacccacagagctaactgctttgacgccatgctggttgtagacaaaacaggattgggaaaaggggaaaagtggagaaatggtggggaccaccttcctggccgtccgcctttacctggacccagtgagaaggctttcctggctgtgatcttgagccctgactgccgagcagccgagatctatcatccaactccatggctgggagctgggcacaggtttcttctcagaccccgcaccagattcaacccattccacgtgggccagttttctggagcaacttcctgggtcctgtagacccctgaggtctggtccgcaggggtcctgagtcaccagcctgggctgtttccctgccagagacttagctctctgagtctctggctctctggcctgctaagccacacggatcattcgtgtctccctctatctgaatgggtgaactggtgcctcaatggtaggagcctggggcttccctggcacacagtgggtgctggataactgtcagttccccctcttccagtcggacgaggcgccccagccaccatcctgcctggagctcaggtggttcctgggcagcccaacggagcccccaggaaaaccggagcagaggaacctggctttccttctgcgtggtttcctgggacctcttggcagtctctcagctggagagccctgctgagtgatttcacagtggagaaggatggagggaaggaaggggaagagagggcaggaggggagagcccgttgccctggtctgcagggaatagcctccctctgagggagggacactccttgccctattctccctgaccttgggcctcgtggagggcctgcaagcctgccagacccccactgcacacctgcccacctgtctgtctgattccagcagcccctgggcaccgagtgggttgcagagccatgctctgagcatgctccccctccttcaccatgaatgtgttttcattttccacccccgggcagcttcatgatctttcattgcaatctyaggccctggtatccacaggctctcaatgcagcctaggacagaagactctagaattctgcctcggagccctgtgatcccaaacactcagccgtggcaggggctctctgaaagtgatattcttgccacccctcccagatgcaggagggtaaggaataactagaatgcatgggcaaggagattcagctcgatctattcattataaaacaaatttaaatttaaaacattgcttaaaacctatacatgccagtgaagggcgaaggtcttagcagcagacatttgaaggaccaagaatgagcaagacccacctccctcctctagggctgagacccaggaaagggatgcagtgaccacatgcctggaatggtcagagaaaaccctgctgatagggaaggagagacgggggcagtggggacatttgacctggaccttgaaagacaggcaggttgtgataggcagagctaggaaaggatggtctggaaaagggctctgcatgggcaaggtcacagagggaggaccaggcaggctggatgatggccagaggcccagtgcggtcacaggctagggcatgaatatgggtgaataggataactaggggagggcatcagggccaaggccaccatgggctggacagtgatggggagggagggaagaggagagccctggagccccccaagcttttctggctgggtccacctgggctgcacagactgaaagaggcagagccagaatcggggcctctggatggggaggactgggctcggttgaccttgggtttcgaggtctgtgtcttggacagcagtgcccactgacattgagaaggtagggctggggttcacaggagaggtgggacctggaggtgactgccacctacctactggtcacagccctgacagtgtcacctgggggtagtgccaagggtcgccaagggtacgggtttgagagggaagatgaaggtcaagacagacagtagggaaccctggattcttccagagcccggggaggagaggaaaatagaggatgaggcaggtatctgctgcatccrgtgggccagctgctgccaaggaggcagcctctgttgagaggggaagcagagctgggctcccaggagcagcgagggggcgcaggaccccagattcagcaccaccagcttccaagcactcgccaaccaacttatacccatctgactgaggcagaaacactgaaagtcaaagtggcttccctaaggcctccaagctactaggcgcaggagccaggaccccaagccagagtcccaccctggtgacctttggactttgccgccaatggctctggagagatttgaccgtgaaaggaggaaaaggaaggtgagggcacagggtggctccggggctggcgggcgtagacgaagccgctttgctgcttaaccgcaactgccagcagcaccctctttcgtccgcccctttagaracgatttcaacggcgcattcttccatttcctgccttaatggggggcatttctggggacacccgtgaactgcgggctggggcttagccttgttggtkgccctgcataggttggctgcgtagtgctttacgttctgtgtaagaattgtggagtcttggggcctgggtgggccgagggtcctgagatatcgrtgtgcccagcaggcttgtagggtgtggcacctgcccagccctcaggggtcctggtgcagcttagcaagctccttggccaccagtccctggtgactcagatcaggggttccaagarcatgctttgagaaacactccctagccctagccgtttcagtctgtcagtgaacctgcccacctctacttcttaaggaagcacacgaggaagctgtttgtgatggttgaaagctccggcgagaagggctttgcgggggtttctgtaattcttgggaacatgtgaagcccacattctactggaatgacctgctgcacttttgtgagcttcaaatctgagatgtgctttcatcctcccgtgtgtggcagggcgccttgttagtgtccaggcctcttggaatgtggtttggttcaggggtactgatggcccgagtgcttgcccacggcagaggaggccaggggtcagtacaggagccagtcctcgccaccctgttcctgaccatacagagtctgtcacctgcctgtgccctgattgtaccccatctgcaccgtgtctgcaccctgcctgcgccctgtctgtaccccatgtgcgccccatccgtaccctgcctgcgccatctgcgccctctccgcaccctgtctgtgtcgtctgtgccctgtctgtgccccgtccgcatcccgcctgcgccctgtctgtgccccgtccgcaccctgcctgcaccccatccatatcctgctctgctgtctgcaccctctctgcaccctgtctgcgccgtccgtgccccgtctgcaccttgtctgtgccccgtccacaccctgcctgcactctgtctgtgccccatctgggccctctgcacgccctacctgtgccctgtctgtctagatagatcctgcagcgcctcccgcctctgctcagccagccccccgcaccccctagagggtattgcctttccatggaaatgagtagcaggtatttttagtcacccagaccaggaggtattcaggtgtcacagacacaaggcccggagccatgttgtccctttgctcctacaaaggaaacaggatgcccaaaacaggacttgtaaatcccaactcaaaacctccccgttccgcagggacacagggtgctttgctccttgaaggagtagtggatgcctccttatttacatccttcgtgcttacaaggcagtgggggtgtccaggggacatcagccaccctgtgctggggcacttcagaggctccggggagctgccatgctctctctccatcccaaaagatgggtctggggaggccactggggcaggcgagcccgctcctgtgaggagtgaaccccaccccccgccgctctgctggtgtgagtgacagttatcaacagaccctgaatgggggcttcccagaaaagaaaaaaaaaaaaaaagaaaacagtgatatccctgggagaaaggggcctgtttacatgaagcctataggccgttggaatctgaagtagcacctgggggtcctggtgacgccagcacagacagccctctccagggcagtgctacagtgagaccagggtctggggaatgtcacttgctcctcattaactcatgaatcgggagccaggataaggtcgctgccctcagggccaacatcagagcgggaggaggtgtatggtccagggcaccaaggcgtcactcaggccaccaccaaagcatcacaccaaagcattgacagcgtccatctcacatcgtcaggaaagggggaagcactggatggctgtggcctcacaggcagggagagtggggtccaaaggcgcagagacagcatggggtgtcagggcactgcagggagagggacaagggcaggtaaggagggaccttggaggccggaacatctttcacggaggcctcctgcttcctctgtgctgctgagctgggccattcatctggcctgggtggagggaagctgaacagggtccctctgcgacctggaggccccaggccctaccctgagcccttggtgctcttggagccctgagctgctccagctgcatgtgatcaccacacacacacacacacacacacacacacactctcccaacacacacacagacacacagagcctgtgccaccagccctcattctctgcctcacccagggccggaaggttctggctaagcctccgggggtgccactgggagggatgcctaggagagggtctccccaaccctctagcaacctgataatcatgatcaccggttgttggagtggcctggccacctgctgggctgtatgggtgctgagggcctggctgagccccgtgatacacccatgggggtgggtctctgargagcagtctgtgtgagcagcaggagaggtggcacctcaggtcaggggacgcttccccccaggctctggaggggacaggataacacctgtccccaggcttggcggaattcctggtctctaacgcagcccggaacacacagagaaatgatccagtgtggggcagtgttgctcacatggtggtaggactgggtcctaggctcctggagccagcggcctcagaaagcccctctaggttctctgagtctttgacactgtgcagcccagactcctcattttatagacagggaaactgaggccagatgactcatccttgacagagccgggatcatggtgcagctctctgactgagccccctcgatgtcctgtagtctctccaagcatgccctgcagtggtcatgactgctgacatctgtccctgcctagactgtgggcctcgtgaggacagaacatgcctgctgtccccatcacctctgtcccccagctcagcctgactggtaatgccccggccatgtcatgaggccttggaaccaagcctaagcttcctacaggccagcaaacatcgtccccagcactggctccctgatttcatctcccctggccgtggcaggcagagagaagccttcagaaccagggaggaccagagggctcctggcccaacggaggccaactgtgacaccaagggatcctccccaaggggtcttccccgccagatacaatcctgctctgagcaccctgaacaacaggcagtgcccaagggaggccagagacagccgtggcctctggggcctggcactcagccagagctggcaggaggcggggatgcacctcctgcagctgaggttgagacaaagccaggtgcctgccacggcagctgtggcctgagctggcatcrgtggctgatggccacagactccctgatgcctgtcatctgtactgagggctctgtcccagcccctgaaccgtacgtgatgcccacaccaccgatgaggacacagcttgtgtttttacaaacgaggcacttaattatgtggaggtaaatcctttgaactgcagaaaccatcccagcacgtccccatcaggtgttcccaggtggcaggcagagaaggccaaggtcccttgagtggatttccaggggagctgaagggctacrgccctgccaggactgggaggtactgggaggggctggacagctgagagcggctgcccccctgcaggaagaggaggcaggcgcttcacccgactctggacgacgctgacagcagtgtcaaggactctgccgtcactgttgtcctttgagttggcagctgccctgtgttgcagatttgctctggctctggccccctgcttcgtcccctccacacatttgttcttagtcctcagctcctcccgtctctgtgtcccgggtgagaacaggtcctagaccttgtctcaggtcacacagctaccagaggacagagctagaacatgaccgcagcagacgcctgatcctgcgccccaggcgacccgttcacggggcgggcgctcgcccttggcctcgctcctgagccacagtcaccagggtgccaggtaaagggaaaccacatgggggcgaggccagcgcacagccccagcagcctggcccctgctggctgcaggggctccagagcctgtgctacaagcccgggtggccggagcctcctgcgggattccccatcccacccctggaacttgctttccctgcttcccacacacagatcctccccaccagagcagggtcatggggtcagaggcagggtccgtgtggtgtggagcaggggttcctccccactcgctcgctcggctgccttcagcccctgcagacacgcaggcaccgtccaccttctccactcttagcgcgagccctgccccagccaggagcactcactgagtggccacattataccctcccgtttgtctatagttcacttaaacattatttcctgggagatccggcagctcttcactcttccgaatcaggctgtgggaaacrtttgtgtgcatctcgctttatttcctctcttgaactattaggataaagtcacagaggtaggattcctggaccccaagctctggacctctactacccaatttcaaaaaggtcgtagtatatagctcatgtcccagaaccagccacgtctcctcgtcgtcgtttcacygcaacctcgccagcaatgagtattttcatttaaaaatgtttttgtctgctggctatgtgattgcagaggcatggctggccccagcttgcagcggtcgcttctgcatctctttttattcagcggggcctttaatggatgtggtggagtaaagctgcctttcaaattgctgccgcagcgctgcctggcaagatgttaatcgttcatgccctgtcacgtggtcatgggacggtaatcctctttgaagccatttgttatttattcttacagtcccccggagagcagggaggagcccccagtgcctggatcacaaacgcaaatacagagagggctgcagacatttcagcctcgaggttggagcagaagcagggctggggcccaccagggtccagacccctagtaaagaggtcacttcccacaaaagaaggttgtttgtctgcttctcatagaacctgctctggttagagggtttttttttttttttaagagacacgatcttgctgtgttaccgagtctggtctgaaactcctgggctcaagtgatcctcccgccttggcctcccaagtagctgggactgcagatgggcattgctgcacccagcttggttagagggtttttaagcctagggggtgcatttgtttcctagtaccacaagcagggtggcttgaaacagcattatttattctctcatggatcaggaagccagaaggcaaggtgtgggcagggttggttccctctggagaccgaggtagcatgtgttccaggcctcgctcctggttcctggtggctgcccgtagtgttccttggcttgtagaaacacccccccgagattctgcccccatcgccacatggccttttctgtgtctgtctcctctttttatatggacacttgtcattggatttagggcccatcctaatccaggatggcctcatcgcaggatttccaccttaattacatctgcaaaaacccttttgccaaataattccacatcgacaggtaactgggattatgacttgggtggatctttcagggaacacagtccaccccacacaataggtttctacccccgagtcccacctccagccccgtctccctccagagtctggctgcttcttcctcatcagacagttccttccctctgtagggattgcatacaagtgttgctggctgaggggtgagggtggagtggggggatgtgggagctgagctgagggatgagggtgcaggcagagatctgggagctgagctaaggggtgagggtggagtagggggacgcgggggctgagctgaggggtgagggtrkagtgggggacatggaagctgagctgaggrgtgagggtagagtggggggatgtgggagctgagctgaggggtgagggtgcagtggggggacgtgkgagctgagctgaggggtgagggtagagtggggggatgtgggagctgagctgaggggtgrgggtggagtagggggacgtgtgagctgagctgaggggtgrgggtggagttgggggatgtgggatctgagctgaggggtgagggtagagtgggggacatggaagctgagctgaggggtgagggtagagtggggggatgtgggagctgagctgaggagtgagggtgaactgggggatgtgggagctgagctgaggggtgggggtggagttgtgggttgtgtragctgagctgaggggtgagggtggaggcggggacgtggcagcccagctgagggccttggagcacacctggtaggaagccagcctgtggacctggagccgactgagggtcccccctaccccccatgagtaggagtgggatccaacctgggtcccctctctcccctcctgctggtgtatttgtagttggaaggcagcacaccctcctggctcagagagatgggtttagtggcccggggaggcacggaagcccaggtctgtcttttcccagcggtcactgtgaggatgcagggcccccacgtggggagacagggcacagcctcccattggggcagatgggggtctccctgcccaggatgccggccggagtttcccctggcagggaccacgggtgctgtgactggagggaggtcccagggctggcaccctggggctctgttctgatgttctgatccattccaccctcacccctcagctcagctcccacatccccccactccaccctcacccctcagctcagctcctacatttcccactccaccctcacccctcagctcagctcctacatttcccactccaccctcacccctcagctcagctcccacatccccccactccaccctcacccctcagctcagctcctacatttcccactccaccctcacccctcagctcagctcccacgtccccccactccaccctcacccctcagctcagctcccacatccccccactccaccctcacccctcagctcagctcctacatttcccactccaccctcacccctcagctcagctcctacatttcccactccaccctcacccctcagctcagctcccacatccccccactccaccctcacccctcagctcagctcctacatttcccactccaccctcacccctcagctcagctcccacgtccccccactccacccccacccctcagctcagctcccacatccccccactccaccctcacccctcaattcagctcctacatttcccactccaccctcacccctcagctcagctcccacgtccccccactgcaccctcacccctcagccccactccactcccacccctcagctcagctcccacatcacccactcctcccctacccctcagctcagctcccacatccccccacttcaccctcacccctcagctcagctcccacatcccccacttcaccctcacccctcagctcagctcccacatcccccacttcaccctcacccctcagctcagctcccacatcccccacttcaccctcactcctcagctcagctcccacattcccctactccaccctcacccctcagtgctctgtcagaagcgctacctgaccacatccctcctctgggctctgagttcccctgtgcaagtggaaccaatctttcccctcaacttcttccaagggccgtgattgaaacccacctaaaatacaatgataagagctgttgtcgagggatcagacagcagcctgtgtaagatgagcactgggttctggggaaggacggtaaacagttcgccttattctgtgctgggcactgtgcttaagcccagcagcgggccctggctggactcagtgtccagagtgtctctgctcagggctggccgagagtcagcgctttctgtccctgtggcggacagtccgacctctccgaggctgccatagagactcatatcagccaggcgagctgggagcgccaccactccccagatagttactgcccgggcctccctgcccagtcactgcatgggggggggctcagctcctgggtgtgagtttgtgccaggctccagagaggtggggaccccagccacacccagggacagggccaagtggccaagagaccacttaaatgccagcgtggccaccccatgtaaagcaatgatctctctgaaattgctcatctggtatacaccaggacactggcctcttcttccttctcccatcctgggatttaagaagttaaaacccaccccctctgcccaggaagccgaggcagcagcttggagccagagccggaggcagagcggctccatccgtggggagccgcgccacctctgcgcctcctccgcgcctcctctgcgccccgcgccgtgctgagtcaggctctgaaacgcagtcatcatcsggaagtggttcttgctgtggccccatccccctgtgtgattttcctaccttggctcacttaaaatttcaatctggctctgagaggagactcagcatttcctttatctccttttactgtggatgcttggaaaggagtgggagaagctgggcgccgcagtgtgtgcgcgtcactgttgcccttacccccgaaggaggggatggccaagagaacctggaacctcccctcccgtccctgtgcccgccgcttcccttggccctcactgatgagcccaacagatgcagaggctccttctctccctggcactgcagccaggtagaggcagctgcagccgcagccctgagaggggctggagacgctgaggcaggggcagtggtggggtctggctcccctcagttcaaagtggcctgcagatgctgcctggagctgtctggtttgacatggctccctctgagggagctgatgagtgagggccaggagcactacttcatcaggcatcccctcacctgcaccaatggggaggcgaacctggagctgggccattaagacccacagattgttttctccatgttgcgaagggcagggcttggatttcacgaggcagatggtgagccaagtccggttccgctgcgctgggtcccccatggcagaaaggacccgcccccccatcaccctgacagtggcttgcatgcccaagagcagccagcayccaggacaggcttccctcgttcctctgttcatcctctttaagaatcactcagagccaggcacggtggttcacgcctgtaatcccagcactttggtaggccaaggtgggcggatcacctgaggtcaggagttcgagaccagcctggccaacacggtgaaaccccgtctctactaaaaatacaaaaattacccaggcatgatggcgtgcacctgtaatcccagctactcgggaggctgaagcaagagaattgcttgaacccgggtggcgtggtggaagttgcaatgaaccaagattgcaccgctgcactccagcctggagacggagcgagactgtctcaaaaaaaaaaaaaaaaggatcactcaggacaccaacatgggctgagaaatgctcctggtatcaacagaactgcagcagatgatgaaaacaaggctgtgatcagggaagtggctgagggagtgaggcccccgaaccrccaccccagagctctgtcccaggcccctggggtctcatgctgtgacctcctgcgccacatggggagaggtcacctgggggacttgtttccgtgggaacctcaggccttgggcctgagtgaggagatgtctgaagcctctggcctgggcsgagagtgagaccccagagcagccctgcccattcctctgggagcagcctcagtgaaagctgtaaagcagggaaattggacacgtccaggccagaaagagcaaagcaaaagtgcccctgggtgcactgcaccccacagtccaacccttctcccccaggagctgcaggccacgctctgagcctctgtttgaagtggtccctgactggacattctcatctcgggacatgagctagggtcacccagcaccactatgcagctctccaagtccccctggccaccccgccctctgtaggggtgctgggccttgctctgcacctatcccttggagtatctgctttccagagcggcaggaggcccgcctggtatgcccatgggggcatccacctgtgcagagtgtggcctctccccagcagatcgctgggtacatgagcaggcagcagaccataagcaggctggctaacgggtggagggggcccggtggtgtccgtgtgcgtgtatgtgtgcacacgtgtgcatatgtgtatgcacacacctgcacacacaccttcagatgcacgtcccctgtctagaccccatcaaagcctcttgccaggactggcctggaacacactgtccagcctgattctgttctctccctggcttctcttgatcaacttcctgtaatgggaggaactctgacacacttcacaaaagggtgtcaaattagttttaaagggaaaaagaactgcagcatgatctggaattcgctttctgccctgcggttccactgtgaaggcaacacgccttcgaggagttgggggatgaggcagtggggccctgtgaggccctgcggtttctatcggagtgctctctgacccccggtgttccctctctgtctctctatgtctttascaggtgtttcccacactttagtcattggcctttcatctcatgatttgggtcatctgtgctatttcttttctttttttctttttttttttttttccgacagggtctcactctgccgcccaggctggaatgcagtggcgcaatcttatctcactgcaacctccaactcccaggctcaggcgattctcctgcctcggcctctggtgtagctgggattacaggcacacatcaccacacccagctaatttttgtatttttagtagagaaggggtttcggtttcaccacgttggccaggctggtctcaaactcctggccccaagtgatccacccgcctcagcctcccaaagtgctggcattacaggtgtgagccaccgtgtccagtcatatgtgccatttcttagcttgcatttcctttttagttagttaaacttatttcttaaataagcttattttaaactgaaacttgatgtccctgcaataaagaaccagcattacttgtcatcaataaaaggtaactggaggcaggcatggtggctcacacctgtagtcccatctgctttcgaggctgaggcaggaggatctcttgaacccgagagttcaagttcaacctgggcaacatagcaagacctccggcccttaaaaaaataaaaagtaactggaaaaataagtggatcaatattaacttcaaggcctgtctcaagtgtggccaaggctgtctcaaggcagcacaggccttgctctgaacagccctggatgagccacagctgtgtctggggattgaagagagtgcccctggcccctccctgctccggtcacccccagttcctttagttcacagccctccatgttgtcaagggctgaggagtccctcctcgtccctgctcaggtgaacacaggaaatggggaagcccagggtggggtgggccgccccatcttccccttagctgatgggcaggctggatgggcagggagggtctttcctgggaaggtagtggcccgggagctgggctggccctygagtgttgaagatttaacttgaaagccatgagggcgctcttccccagaaatcatcgtggaagcggcgaatgagtggcaggaggtgcatggasagtcctggctctgcaggcgagcagcctgccccagctctttcctccttaraattgtgtgactttagccacatcatttagaagacacagatgatagaggtggtagaaatggaaagtgcaactctctacctgctgttgcccaccaccaggacgaccactgcaaatagtgtgggtgacccgttcagacctgggactcagccacacattggcccctgaggcagatgaagtccccagcagatggggagatgcagcattgctctgagggagcagcaggagtgaggacaggagctgccacgtgcacaggagcaggagggaaacaggcaggcagctgtgcccagggccaagtgtgcaggaggcgaggcaggcagctgtgcccagggccaggtgtgcgggagacaggcaggcggctgtgcccagggccaagtgtgcgggagacaggcaggcggctgtgcccagggccaggtgtgcgggaggcgaggcaggcagctgtgcccagggccaggtgtgcgggaggcgaggcaggcagctgtgcccagggccaggtgtgtgggagagaggcaggcacgtgtgcccagggccaggtgtgcaggaggagaggcaggcagatgtgcaggggcagagggggttgaaggatggaaaggtagacaggagaggctgtgaatggctctggatgccgagctgaggcacttggacgtcatgctgacagccctggacctccacgaagggcttttgagaaaagcatggcatgaaaagatctgctgttgagaaatagaaacggggctctggtggcaggttgacaaccatggtccaggcaggrgcttccaaggcaagtggtggaggtgggcgagagggagagttccagggatatccgcgtggatggagccaacacctggagcccagggcaggggggtgggctgaaggggcacctgtggggcccttgcctgtggaggtgagaactgcagcttggagagcagcagaattgccccccggaaggttgctaggggaagattcccagagaagctgaaagcagtagtgctcagaggacaatgagctggcctaggatggtggaggtggaggtgatgaaggcagagggggcagaggccatggtggtggtagaggtggaggtgatggaggtgaaggtggaggtggtgggtggaggtgataaaggtggaggtgatgaaggtggaggtgatgaaagtagagatgatgggtggaggtgatgaaggtggaggtgacgggtggaagtggaggtgatgaaggtggaggtggtgggtggaggtggagatggaggtaatggtggaggtgatgaaggcggaggtgatgggtggaggtggaggtgatgaaggcggaggtggtgggtggaggtggagatggaggcagtggtggaggtgatgaaggcagaggtggtgggtggaggtggagatggaggtagtggtggaggtgatgaaggcggagggtgggtggaggtggagatggaggtagtggtggaggtgatgaaggcggaggtggaggtgatgaaggcggaggtggtgggtggaggtggagatggaggtagtggtggaggtgatgaaggcggaggtggaggtgatgaaggcggaggtgggtggaggtggagatggaggtagtggtggaggtgatgaaggcggaggtggatgaggtgggtggaggtggagatggaggtcagtggtggaggtgatgaaggcggaggtggaggtgatgaaggcggaggtggtgggtggaggtggagatggaggttgtggtggaggtgatgaaggtggaggtggagatggaggtagtggtggaggtgatgaaggtggagagggtagaggtcatggtggaggtgatgggggaggaggaggtgatggtgacagagatagagatgattgagatggaggggcagagatcatggtagaggtggaggtgacagcagtggtggtcgtgagctgtgtgtgtgtttctgtgcaggtgctcacccatgcacgcatgcccatgagatgcctggctctccacacacgccctgtgagccaggcatcctctcggtcagggatataagcctgggcctgtgcaggctgccctctcccactgtggatccccttggaggagactgctgcagctgcagggcaccctctgtcgccctaagaggagcagcagaacatgacctcccatcgctccrcttcccactgctctgcttggcttcagcctcatgctggcatctgtgttatctataagcagaaagctgcttgttcagagcgggctgagacaccttcgtgcgttcatcaaaagcgtgctgggcaccaatgaggtgtcagttcctgttccgggcatgagggattcagcaggaaacgagacagacccaccccctgccctcagtgtcccgctggggccagtcaggtgaacagtcacacaggctggggtaggcgcttggcagaagacacacttgtgacgctcagagctctctggagcagcctctccgaagagatgaaatttkagcaggaaccccaaggaacagcatccsaggtagagggatctgagtctgcaaaggccctgggcacaaaagaaacaaccacscaatccagggctggggargagccctgtcagaggacagcaccagcctccccacgtggatgcccgaccagcatctgaggycagacacagccgccactggctccagggctcccccacaccactgcacccacaactcccctgtttcagaaactgaccactcacctctggaaacccaggagccacctgcacccctgtcttccccctacaccccgcatctgtccgaagaccctgcggtctcagcctcttggattgccagccactggtcacctctgtctccccgcccttgcccaggtggccccagctcacacctgcattgcctcggagactcctgacracacccaccccctgctgctgcccrggcccccccagcagtcggttctcagtgatcttgagaagcaccactcagctcaccctacgaggaggcctttggctgttcccgtatttgtctctggacttctctgctggccatagaacaagactgtgctttagagggtggactcccagaactgccactcaccaggtgaccaaggcaggccagctttacctctccaagcctcagttttctcagctgtcatttgtgcctaaaacatagtactaacctcataggattatggggcaaaaattacgctgaatgaacgcacgggaaagcccttatcccgaggcctcattcagactgcactgggtcgccagcagctctgacatcgctgcccacacattaatacagcccagggctgctgctcagatgggtgtccttctcctgcacccactgtactgggagggcacttcctggatgtccctggacccccgccatccaatgtccagcttcagcgtaggacttggtgtccgcaagaatgaggcccacatccaggagcaggccagtttcacrtgaagcccagggctgaagccagaggccacgcrgcaccacgtcggacagtgtttatctgtgctaatcatgaagtaacacaagtgaggtttaaaaatactacgcttatttcatttcagtgcaggagggagaaagaacacacagtctgtatgagcaactcaaatcaaaaataaatgaggcaaaagagtcaccaaaaatagtgtggcattagaracagcagcctgcgtggctcggccagctgtcctcggctctctgccggcaagcagcaccacagagagggctgcgaggatgccttgatggtgtttactccagagaagatgaacctgatgcctgcgatctgatgagaagtcacagttaccagcagggaaggtagcactgaggggacacacagggcacccaaaggtctctggcatcctctcctcctcccgtcaccctcgccaggcagtgaggtcagaggctaggctcgcaggcagcatgggaaccacttggccagaagtttcctctttgacctgaaggagttcccccttccagactcagagtgtccccacagaagggcagggctgtggcttggacccatgtggggctccagcccccagaggagcaggacagcatgtgctgtacacagcaagaggatttgcacttttgccttaattttattacagacggggtcaccttccyttttttttttttttttttttttttttgttttttgagatggagtctcactctgtcacccaggctggagtgcagtggcgggatctcagctcaccacaacttccacctcccaggttcaagtgattctcctgcctcagcctaccaagtagccaggactacaggtgcccgccaccatgcccagctactttttgtatttttagtagagacggtttcatcatgttggccaggctgatttcgaactcttgacctccggtgatccacccacctcggcctcccaaagtgctcagattacaggcgtgagcccctgtgcctggcctcaccttccttttttaatgtgtcagaggtctgcaaattatggcccaggggccagatcaggcccaccgtttgtttttgtaaataaggttttattggaacacagccacgcccttcatttacatatttgctgcttttgcacccagagttgagtaatcgtaatcgagatggactggcccgaaatgcctaaaatatttactgtctgtcccattgctgcaaaagtttgcccttccctgccatagctgcgtaagcaccctggggaagcgtcctgtccgctgaagacagctccagtgtcgatggggcttgggtcagtgttgggtttgctatgctaatattgatttggagctttagagatttttggttgattggttggttggttggtttttgggggttttttgagacaggatctcgatctgtcacccaggttggagtgcagtgtcgcagtcatggcccagtgcagcctccacctccccgggctcaagtgatcctcccactcagcctcccaagtagctgggaccacaggcatgcgccaccacrcctggctaatttttgtatttttttgtagagacggggttttaccatgttgcccagactggtctggaactcctgggctcaatctgcccacctcggcctcccaaagtgttaggattacaggtgtgagccatcacacccagcccctagagatgtttttatttaaaaaagaaaggagattctgcaataatgaggtttctctgatgcaaggaacatcttttgtccagagacatttagtcactcgatgggcctcaaaccccaccgtaaaggaagcactacattccagccaccagcacccacctgctgcctgctgcctgctgacagcttcagctttcagagcgaaggaggcttcccacggactcccaggggccaagcagggtcccccagaccaccctgctgggccaccctccaacatctccgagtgaggggtgggtgggactccacaggccagggctcagggaggacctcgctcctggcgggtcctttcctgggatgcactgacgtcccttggctcttccccagcttccatgagtcacaatggagctatttaaacctggggctgtgagaacatgtcaatgtgtccacccccttgagaccacagggctttcaagacagagcatcctttcaatagaccgtggagccaagtactgaatttgatgaggcgttttcacgaggcctgtgtgaaacacttaaaaattgtgcataacatgtgactggacaggcgtctaccagaaaacagtgcaaggagcttttaagccatgaggtttgcatctgtaggaaggctttggggtgctgctcacacgcggtgtgactcgggcggggcaggcagtagacggcagcggtgacactgcagtgacgctatggagcatggacactaatacgtcccactggacttctgcgtgrgccccagacaggagcttgaccagcgtcaactggacctgctgcatctgatcctctcccagagtgaggttttgaacagagatgggcagaacaccactaatcacaccgctgctgaaataggtctgccttctgggtaccggttatgaaagcggatttgtgtgtcacatccccaggagaggaggttatggtctcacaagaggaaaacccagcagaatcccagagttggctggaaagtcaacaaaccrcctaaaactcacccacaaaataccgtgaccaggagtatgcatggagacagtgccgagctccgtacaggccgtctgacttcagtgagaccccctccccaccaagacagaggaaaagtcctagactcaggcccacaaggatgggcaaatagggctggggacgcagggtgcgtagagcagaggtgtagattctgcaagggtgtgtgcaaagcagataggggagcacaggtgtctgcaggggaagcatggccttcttattgagctttttttgagatgaggtctcacactgtcacccaggatggagtgcagtggcacgatcttagctcactgcaacctgaggctcaggccatcctcccatctcggcctcccaggttgctgggaccacaggtgcacatcaccatacctggctgtgtgtgtgtgtgtgtgtgtgtgtgtgtgtatttttagtagagatgggttttcagtatgttgctgggctggtctagaattccagggctcaagagatttacccaccaggcatgggtggctcacatctgtaatcccagcactttgggaggccgaggcaggcagatcacttgaggtcaggagttcgagaccatcttggccaacatagtgaaaccccattgtaaaaaatacaaaaattagccgggcatggtggcaggtgcctgcaatcccagctactcgagaggctgaggcaggagaattgcttgaacctgggaggcggaggttgcagtgagccaagatagcgcctctgcactgcagcctgggcgtcagagcaagactgtctcaaaaaaaaaaaaaaacttggcctcccaaagtgctgggattacaggcataagccaccacacccagccaggcgtggcctaaaaggctgtgttcctggaggagatgttgtcctggaacagggttcagcaaaaaaaaatttytttttagacaagatctcactcagttgcctaggcgggaatgcaatagtgtgatcataggcgactgcagccttgacctgccaggctcaagcagtcttcccacctgagccttgcaagtagttggtactacaggcacacacctgtaatcccatagctgtaaaccacacccaactaattttttttgtaattttgtagaaaaggtgtctcactgtgttgcccaggctggttttgaactcagctcaagcaatcctcccaccacagcctcccaatcccaaagtgctgggattacaagcatgagccactgcgcccagccaggcaaatgttttcatagaggaccagatagtcgatgttttcagcttgcaggaaattcagtctctattgcaactactcaggtctgccatagtagcgtgaaagcagccccgggcaatatgtaaataggtgctgtgtactgaatgtttctgtcccccaagattgatagccctaatcctcaatgtgatggtattaagaggtggggctctgggggtgataaggtttagataagctcaggtcttgctctgttgcccaggctggagtgcagtggagtgatcatggctcactgcagcctgggcctcctgggatcgctcaagcgatcctccaacctcagcatcccaagtagctgggaccacaggtatgcaccacgacgcccagctaattttttttattttgggatagaggcctcacgacaggactagtgccttggtaagaagaggaaaaggccagagctccctccctaccctgtgtggacccagcaggaaggaattctgtctgcaagagagagccctcacctggaaccaaatcagccaggaccctgatgttggatttaccagcctccagcaccgtgagacagaaacgtctgctgtttcagccacccaggttgtggtatttcattatggcattcccaagctcactaagataacaagatagcttggctacctggcaataaaactttatttatggatgctgagattgggaactttatataaattttgtgtgttatgaaatgttattcttcttttggttttctttcgtttaaaactgtaaaaattggactgggcacagtggttcacacctgtaagcccagcactatgggaggctgaggcaagaggacagtgtaaggccaagagtctgagaccagcctgggcaacataacaagattctgtctctataaaaaattataaaattagccgggggtggtggcacacacatgtagttccagctacttgggaggctgaggcagacggatcacttgagcccaggagttcaaggctgcagtgagctgtgatcatgccactgtactccagcctgggcaacagagtaagttcccttctcctaaaaaaaattaaatgaaataaataaaactgtaaaaactrttcttagctcgagggctgcacaaacacaggtgacaggctggcgcagcagttttccaacccctgtcctacagcaaggagggaagccgtcacactgcactctctgctggccagccggtgtgcagtgttgctcaggttctgggtgcctctgtcatttaggaaggaatcagcaccattaaaagagagtggcagggtgctgatgttccagagagaaactgtgccgaatgatggctaattaaggctctggagttgggcactggagcaccggactccctgctctccaaagcccagcttgccagcctcgacctgagcgtcttcactgatacagcaccaacccgaggctggcctgtaaggtttggcgagggtccagtgtcacagcccacgtgcagcacgtgctgcacagtgtcggccaaaattatattcatggcttaagtcagaaaccttgtgtggaaggagggaaagaagcaaggtttgctctcaagaacaaagggcccggttgtagatggggtgagctatggcaggtgtcctcagatgctccagggattgtcctagacagagggactcacttcgttgtcaatctccggagggcggagcaggcccagcaggtgaaagttatgaggaagctggtttccaatcagcatgcaaaggaccatgttgtcatttcagttgtccccagtgggatgatctgcctagagtttcccacaggtggaggtcttgcggaggggggtcatgcatcccccggagccctgtacctggggtcccgtctctgcatgctcggaggcttcacgacatgtaaacctagttatcttggtaacacttgggggatgtgccccctccccacagtcctggcccagaggaatgaagttacatcaaagcaaattgattcggtcgttgatccttatgttgtagaaatagctagaagctataaggagaaccactgtgaggtccccattaaaggagaagaattttggtggtccccagacagggctggctcgggatctcgttctgtggtcaggaccacctgctgcagtacagcctcccacctcagcctctcagactgccaccttctgcccccaatccagcctgagatgcccccagcaccacccctgctgaaaacagaagcagaacctgatactcagcctcttccatgacaagaacacaccaggatcgcgtccctttccaagcagaattttcccgaagccccaccctcctggactcgggttatggaccgccacaggccaccccagctggaagaaaattcaggaaatataggggtcatgggtgacaggtgggccagccagcaaccgtatctaccacatttttaaaatttctatttttattatttatttatttttgagacggagtctcgctctgtcacccaggctggagtgcaatagtgcgatctcggctcgctgcaacctctgcytcctggattcaagtgattctcttgcttcagcctcctgagtagctgggattacaagtgcccaccaycatgcctggctaatttttgtgtagagatggggtttcaccatgttggccaggctggtctcgaactcctgacctcaggtgatctgcccgcctcggcctcccaaagtgttgggattacaggcatgtaatcccacctgtaaacctgtaaggccaccacacccagcctaaaatttttattttcatatatattttttgagacaaagttttgttctgtcacccagctgaagtacagtggcacaatcacagctcactgcagcctcgaccttccaggctcaagccatcctcctgcctcagcctcccaagtagcctggactgcaggtrcacatcaccatgcccagctaatttttttattttattttttgtagagacagggtttctccatgttgcccaggctggtcttaagttcctgggctcaagcgatccacccaccacgggctcccaaagtgctgagattacagagatttcaggcacgagccaccatgtgccatgtttattgagccagcttaaatatttggcttaaacacatacacccaaatgtggagctgctgttgactccatgatgcagaagtttctttttctttttcttttttcccagttttttctattgtggtaaaggtacatataaaatgtgccatcttaaccacttttaagtgtacagtttagtggtattaagtataaaattcaatagtattaagtgtatagttcagtggtattaagtgtacagttcagtggtattgagtatacagttcagtggtattgagggtaaagtgcagtggtattgagggtatggttcagtggtattgagtatacagttcagtggtattgagtatacagttcagtggtattgagggtaaagtgcagtggtattgagggtatggttcagtggtactgagtgtgtagttcagtggtatgagtgtgtagttcggtggtattgagtgtacagttcaatggtattgagtgtacagttcagtggtattgagtgtacagttcagtggtattgagggtaaagtgcagtggtattgagggtaaagtgcagtggtattgagggtatggttcagtggtattgagtgtacagttcagtggtattgagggtaaagtgcagtggtattgagggtaaagtgcagtagcattgagggtatggttcagtggtactgagtgtgtagttcagtggtacgagtgtatagttcggtggtattgagtgtacagttcagtggtattgagggcacagttcagtggtattgagtgtgtcattcagtggcattgagtgtacagttcagtggtattaggtgtatagttcagtggtatcgagtgtgtagttcagtggtattgagtgtacagttcagtggtattgagtgtctagttcagtggtattgagtgcgtaaattcagtggtattgagtgtacagttcagtggtatccagtgggtagttcagtggtattgagtgtatagttcagtggtattgagtgtacagttcagtggtactgagtgtatggctcagtggtattgagtgtacagttcattggtaytgagtgtacagttyggtggtattaaggatacagctagttggtattgagggtacagctcagtggtattgagtgtataattcagtggtatcgagtgtgtaattcagtggcattgagtgtacagttcagtggtattgagtgtgtagttcagtggtattgagtgtacagttcagtggtattgagtgtacagttcagcggtattaagtacattcataatatatgcactaccatcaccaccatccatctccagaacctttttattctcccaaactgaaattctgtccccattaaactggaacttcccattccccctcccctgcccctgagggccaccattctgctttctgtctctaggcacgtgactactctagggacctcagatcattggaattgtacagtatttgtcattttgtgactggcttatttcacctagcagaatgttctcgagactcatccgtgttgtaccatatgtcagcatttccttcctttgtatgactgagggatgttcccttgcatgtgtgtgccacattttgcttatctttttttttttttttttttttttgagacagggtctcgctgtcacccaggctggagggcagtggcgcgatcttggctcactgcaacccctgcctcctgggttcaagtgattctcatgcctcagcctcctgagcagctgggattacaggtgcctgccatgacacccagctaattttgtatttttagtagagacggggtttcgccatgttggccaggctggtcttgaactcctgacctcaagtgatctgcctgccttggcctcccaaagtgctgggattacagacatgagccaccatgttcagcctttgcgtatctttttatccatcagtgaacctgggttgtttccatgttttagctattgcaaatcatgctactgtgaacacacgggtacaaatatccctttgagaccctgtttgcaattatttagggtatatccccagaagtggaattgctagatcatatagtaattcgacttttagttttcaaagaaccaccatactgttttccatagtggctgtaccattttacattcccaccaacdgtgcacagggtccccatttctccacatcttgccaacccttattattctgggcttttttatagcggccatcctaatggctgygagrtagtatctcactgtggttttgatttgcatttccctaatggttactgacgttgagcaccttttaatgtgtttattagccatttgtgtcttgtctttggagaagtatctattcaagtcctttgccgtttttgtaattgggctgtttggttttctgttgaattttagttctctatgtattctggatattaattccttatcagatatgggatttgcaagtattttcactcactctgggttgccttattactgttgatagtgccttctatttttctttacctatttatttatagaggtgggtcttcttatgttgcccaggctggagtccagtggcatgatcataactcactgtagcctcaaactcctgggttcaagggatcctcccacctcagcctcctaaatagctgggaccactggcatgcaccaccatgaatgactaattttttttttttttycgagatggaaagtttcactcttgtctcccaggctggagtgcaatggcacaatctaggctcactgcgacctccrcctcctgggttcaagcaattctcctgcctcagccttccgagtagctgggattacaggcgcccaccaccatgtccagctaatttttgtatttttagtagagacggggtttcaccatgttggtcaggctggtctcgaactcctgacctcaggtgatccacccatctcggcctcccaaagttctgggattacaggcgtgagacaccatgcccagctgccaggctaatttttaaattttttgttagagattgggtctcactatgttgcccagactggtctcgaactcctggcctcaagcaatcctcccaccctggcctccaaagtgctgggttacaggtgtgagccaccgcacccagccagtagtgtcttttaaatgaagtatctctaattttgccactcagcatttaccagtcacctgccttcctggtccaaagaaactttttaaaaaaagagttggcaaatatctgaaaatacaatttatttttaagagccaggaatgaagctgaggtttgagggctggttcagtgtgtctgaaactgcgaagcagccagtgaggttactttcgcatcccctagcttttacctctgctcgtgagattcagcatctgcagctgtggtctgtgatagccgtgaatacagtctgtgtttggagacccacagagtcagggcaacatctccgtgctgggggccaagaggataacggctgttctctggctctgggaggcagcagaggtcacctgtccagagccagagttccatggggggctccagggcaggaggtcaaggtatgtgtgaggaaagaaccccaatttcgagctggacacacctaggctctggttccagctttgccactaatttcaccaagcgaccttggatgttatttaatattcttgggcctcaatttccccatctgtaaaaagcatgtcatagtcagggttgggagcaaggcccagagctggctcaacatgggttgctgtcccccagctctccgtcatggcgcctcgctctttctttttcattttcccattcgttcgccttcctccttctcccttctccctcctgtttgtctctcgacacctctactttcctagtgagcacccagactattttattttcccttccttttcctctttctacctcccctaaccactgtctttatctttatcctgccgggaacacacagcagcacccctggtgtaggcttcagagctgtgtacctatgccaggagagggggtgccagcctccctcctggaatcacacacacgggkgtggcctgggaccagggactcaacacggtgcaggtggcyggcaccatgggagatggaatgttccacccgagtcctccctttgcctggtaccccaaagagcttgggctgtgcccagagtgagtcaccagagagcctggccccaggctcagcagctggcgtaggagggaggaggggcctccccaagaaggaatgaggggcctccccaagaaggaatggcagagcagggagaggccgcggggagggagaaaaaccccgcagagggtgctcttacctctggcccgtcctccccagggccacctgtcccctcaaggcggctgccccctctgtgtcctggcacaaagttgggagatggagtggcagagcctgccctgggcttctcagcagtgcacagctcagagcacactttagagtcagccagccctgagtccagggctctctgacccttcgtgttgtcacctgtagcatgggggggcagcagtaccccttcccagggcagcagggaagataagatgagggagcgcaggtaaaaggtgggcagcccaccccagcacacagccgatcccggcacacagccgatcccggcacacagccgatcccggcacacagccgatcccggcacacagccgatcccggcacacagccgatcccggcacacagccgatcccggcacactgctggcagcagtgaggggagctcttcaacatcaccagaaccctctgccctgagaaaggggctcctgggccgacagggaaggtctgcctcctactctggaggggccgcttggggacaggcccgggctgtctcctcacagccacctgcttcctgtcctctgcctgtctcctgccccatctggccgctgctcatccaggaaggtcggagatgtcgggccctcccacctgggtcacgcgctaggcatgcctgagagcaaaggccacgccccgacaccccacggggccctggcgcgccaggcttctcagccctgcggcggcagtgcatagctctggcacgcgctgcaccaacttcctgttgggtgctgtggtcccaaggcgcgtgctttgcagcagatgtgtgacctggcgttcccctgagtgctcggaaaatggccttgtctccggtcgttcccgttcaggagcaggtacctggggtgctccggggatcccgttgtctaggatgggttttctgtctgacgggtgggcagcctcagctccctgagcagggcttaggtcccccgtaatgtccagggttaattgtgccagcctgaacccctgagccccgcatgcccgcctagggattggcctcagcctggggtgagctgaccccaaagacaccctgcccaacgcagcccggcccttcactgcttcctgttgctgctgctggacagagtgggcctggcacccagcagagatgtctgacggccgcacattctcccctggcttctgccttcatccctgggatgatgttgagggagacgccggaagatggagagccatgtggggccacctctgtccctctgcagggggcagggctggcagctcctggggagagccctgcccatcttgtctgctgtctctcgggaggccctggcctggggattcccatctctgagtggaaggcgcgaaggcccctgccttgaacatggatggcgtgggtccccagtccctcctctctcccctcccccttggggctgagcacagggcagtggtgggggataaagacccctcagaacacttccccaccctgcaaccccttgcacagccctgagtcactgtcccagaggggagggcaaggggctccctggtgatggcttcctgcgtcccctctcacttgcctcctccatttcccctgggcaggatatgggtgcagggtgtggtcttggagggaggaggctgtaagcctcctgggggacacagtgtgtgtgtgtgtgtgtgtgtgtgtgtgtgtggacggctgaagggaggaggccgggggcctgggtgtgcggctatggggactgaactgtcgagggctcctgctgcctccgcaggggacaggccctgccagctactgagtgagcagcctgcggcagccctgactcactgcgggtcgtgccgtctgtgcagcactggggtacccaccacccagtgccaggtgagcggccctgcacggcaccgtagtttccacctgtggtcactgagaggcaggatggagctagggcaggcatgggaattttttggctgtggtctattttttgttcattgcagcattgattacatgtgaatgtggactgttcttgcaaaagtctagacctgtcgtatttgtaatcagggaacaggcattgaacgttgctttgaagagattgaaatttctagcttgtgatcttcttgaaaattgttaatgaggcgttgatgtgatgtaccatcaaatgctccgttcggcagtcatgaccttgggcaccgtggttaggtcccaatgcttctgctgttgactgaaccatgtgacatctgtcgccgtgccactggtcccctcggctcaggcctcaggagattggaggagagactgaggtttctctgtgacaaacacagggaatcctgactgggatctccaatctctagtaaggtttgcacagttcttctcctcrcatttctttggctgcatctgagccaaagtctggatggagctgtcggggaactgggttatgttgacctcccaacccctgcccaccctctggggtgtccttctgacaaatgggcctttcttccagatccccatcatgacccaccaggccaacggccccctagggtcttgaccccagtgcactcagagtcagcacctgccttcgttgcagcattgaccctctgccatcagatcccacccagggaaggaatgggctcctgtgtgggckcctggcttctgggtgagaggggaagtgtgtgttgtgtaagtgcccttctgtgtcatgcggttttgagcagttatacctcttcctgtctccgctggaagcacagtcactgccatggctcctctaggctctggcacgcagaacaagcagaccatggttttgtgttatacagtagtcacggcagatacttcgggggcttggcaggggggacctccggggttccagaagcaacatgcaaaataacatcagttcaacaagcaggtgctggagtcctcgccccgaggccttccggaagacacccaggacgtcacacctagcccagaacagcccccctctctccatcccttctgcgatgttcactaggcattaccacatgctggtggccgctctgggtgcggggktacatccgtgaaggaaagagatgaagctccctgcccagaggagctgacctcccagcagtcttacaggatatggttacagaggtgaatctgggggagagtccatcgttggtgttgctccactgacctccaggatggcctccagggaccccgcctcctggtggccactgtccccatcgtattagagttggccttttgaaagctgtgagtccaagttgcctggcaaatagataaggaatacaaggtgatcattcttaagacctcggggatctgcaaaccagccttctggaacctttgagcttccaggatgattcggaatttggatgcagccacagaaagcctaagcgccacaagtcccgccatgacgccctgaggcgtgggttcacacttgggtgtggctggtcacgtctataaaaatgagccttcactttgggaggcccaggcgagtggatcacaaggtcaggagatcaagaccatcctggccaacatggtgaaaccctgtctctactaaaaaatacaaaaaaattagccaggcatggcagcgtgtgcctgtagtcccagctactcagaaggctgaggcaggagacttgcttgaacccaggaggcagaggctgcagtgagccgagatcgcgccattgcactccagcccgggcgactgaagagactccatctcaaaaaaaaaaaaaaaaaaaagatgagccttttctgggaaagtggaaaagacagagaagcctcctgacagccaaggagaccagcagccagtagagcaggtgttgtaacaaggccgaggaccctcagacaccaattttkctggtaagaccgctgcccaggatgcaccgtacaagagcagcttcacctgccttcatgcagatggcacagatgtccaggaagcagctgtggtcagtgactccccaggagtcacacccagacctggggccagagccatccctgcacctctgcctgatgtgacaccagggcggggcacaggctagtcccagctcctgcagcccccgctgcacacccctacctgttagcacactgagtcctccctcattatcatcccattttacagatggagaaactgacacagggaaggctgagagaattgcccaaggtcatagaccagcacatggcagagccagtgccaactccaaagcccagatccgaaccactgagtgggcctaacctccttcccaggaacccagactgatcrcctcaggtcacccaaaggggatggaatagtgtcatcaaccagctcccaaagaagatcagagcatgtgcagtcagcactggcaagatttcagcttagagagagatcctctccagcctcaaagtaccgactttggatcaagacttctcactaaaggaaggttccggccagctcaaattttttgtactccagaatctgcaataaagagacagataatgtcttttgcagaaactggaagtaggtttccaggtacccactggacttataattcaatgtttataagtatgaccctggagattaaatcaaagcagaacttgctccctggagccctggggttaagcgctaagatgaattctgtataatgatgctgctggtagctacagcgagcatttatttatcatgcactcatggagcagctggttccatgtcacagagaagctggggttgcctggtccaggtggggtggctcttgcatatgtagcagggtggactggggcgtgcctgtcccatgatcatggcagaggttcaggggcaagtctcctgtgactgagacatctgatcaccttccggtggccaaagcaagtcacatggttgcacaggagcgcaaggctaggaattcacccctccaacktgtgtgtgtgtgtgtgtgtatgtgcatatgtacgtgtgtctgtgcattgtgtatatgtgttatgtatgtatgtgtgtakgtgtgtgtacatatgtgtgtatgtgtgtatgtctatgtgtgtatgtgtgtaggtatgtttgtatgtgtatgtatctgtatgtgtgtaggtatgtgtgtatgtgtgtgtaggtatgtgtatatgtatgtacgtgtataggggtgtgtgtatgtgtgtttgtgtgtatgtgtgtgtgtatgtgtgtaggtatgtgtatgtttatgtgtgtttatgtgtgtatatgtgtgtatgtgtacgtgtgtgtagatatgtgtgtgtatgtgtgtaggtgtgtaggtgtgtgtgtatatgtgtgtatgtgtaagtatatgtgtgtaggtatgtgtgtgtatgtatgtgtaggtgtgtgtatgtatgtgtaggtgtgtgtatgtgaataggtatgtttgtatgtgtaggggtgtgtgtgtgtgtgtgtgtgttgggagaggcagcaaagtcacacagcaaaggacatggatgctgggagaagtgaggcattgggtgtcagtaactccacctcccatacccttatgccctccctatgcaaatcaggtgccagctccatcaaccagaacatgtgggtaaccataacaggttgtccccacaccaggtcaaatcagaaagtgtcttctattattttgtgtctctgtccttgactcctgggctcagtcctgacctttccttgtggtttcttggcttaagccattcatttatttccttctctcacctgggtgcactgacttcttcccatctcatgcaagcagctcaggtggctccgacagggtacagattccctttgatgctgaggttgaaggaatcagagacagtgcccccaaagctcctactcagacctcccagggcacatttgcgcccaatataatagtcatttaccattaactccaacagagaaattgtggtcccaggccccccattctgcagatgagaaaactgaggctccaagagaggccctcgccttggttggctgtgcccccgggagttttgctccatttatccatttagtctggggctgctcttccttgtgtgtccttgcctagaattatgtatgggtccaccttttccaaaaatctgccagccctggccgggtgcagtggctcacgcctgtaatcccaaccctttgggagactgaggcaggaggatggcttgagcccaggagtttgagaccagcctgggctgcagagtaaggcctcatctctattaaaaaaaaaaaaaaatagccaggctgggtggcacacatctctgatcccagctaattgggaggctgaggtggaaggatcccttgagccccataggtcagggctgcagtgagccrtgatcatgccactgcactccagcctggggaacaaagcaagaccctgtctcaaaaaaagaaagaaagagagaggggcatggggcagcgtggagaggaaactgccagccctaaatctcatgacttaggcttgccccaggagccagagtcccataaaggggcactatgggccttccatcagtccctgaaagagtctcaccagcaatgccttcctggggctatggctttgatgacagttcaagacccccaggatccctttctgtgtttaaacaaacttggcttcctgtcctctcaccaactcttgcattcagagctcaaactggcaacatacttggcctttctagaaaaactgcagttgagaaaacacctccactgaggggtcataggggaaccgaatattcacacagccttcaagaacctcccctgtgattcctggttaatcatgaaaaaaagaaagagcagtggccggttgcggtggctcacacctgtaatcccagcactttgggaggccaaggcaggcagatcacaaggtcaagagattgagaccatcctggccaacatggtgaaaccatgtctactaaaaatacaagaattagctgggcatggtggcacgcgcctgtagtcccagctacttgggaggctgaggcaggagaatcacttgaacccaggaggcagaggttgcagtgagcyaagatcatgccactgcagtccagcctggcaacagactgagactctgttaaaaaaaaaaragagagagagagagaaagcaagcaagaaagaaagagaaagaaagaaaaggaaggaaagaaggaaggaaaaagaaaagaaaagaaagagctatgccctggcagacaccaccttaaccaaatggccagacctggtcttgccctcgatgggcaaacttgcttgttcgcccctgcctggacgcatgaaaaggaaaagacctccccaaaaaggttcagctaaattgaatcctgaagctacaatcagacaaatccaaagcaagggactgtcagcaggacagatgacctaaacgtttcaaaaaaggtcaatgtcataaaaaacaaaaatgaaaaatatggggggttgcttctagattgagagagatgagagagaaataaccaatgccatttgtgagccttgaatggatcccagatttttgtaaagctgtaggagttatttttggaataattgggaacacctaatagaggatcaggcgatattgaactaagtatcttaggtacaatgctggtgctgtggttaagacaaaattctcagatgagtgctgaggtattgaggggtggagctcaggggattgctacgcactttcaaacagttcagagaaaagtgtgtgtgtgcatgtgcgtgtgtgtgcatgtgggtgtgtgcgcatgtgtgcatgtgggtgtgcgtgtatgtgtgtgtgtgcctgtgtgcatgtgcgtgtgtgggcatgtgggtgtgcatatgtgtgtgtgcattgcatgtgtgcctgtattgtgcatgtgtgtgtgtgcgtgtgggtgtgtgtgcatatgtgtgcgtgtatgtgtgcattgcatgtgtgcctgtatgtgtgcatgtctgtgcatgtggatgtggtgtgcgtgtgtgtgcctgtgcatatgtaggtgtgtgcctgtgcatgtatgcatgtgtatgtgtgtacatatgtgtgtggagagaggaaaaggggaagagaggagcgggaatgcatacaagtgagacaagaggtaaacaattggtgtatgattgcgatcaagagtatatgggtatttattgctattctaattatttccacttttatgaggtttgaaagttttcaaagtagtgagttggyaggaagaaagaaaatgcccaaagagggagcctaccgaccttcctgggtcccctgtccttgtcagccaaccacgtaaagggaaagagctaggatttaatgaccggattccttcctgggctccaagcattttcacatcttgcttctcattgctccgtgagaagttgggcaggcctttctaaatgctccatgcttcagtttctccaaatctaaatccggaagatttgctccaggtcacacgcagaccaagtggaagtggagctgatgggagggacctagcctgtgggctccctgcttggaccctgggccctgcaccccgtcagctgctaggctcccctcttgggtctggtgtgttkgtttctgaagcctgttctcccaagtcccggaggtgtcagggatcccrgggccacccagcttagctgtgcctgcctccctctgcgctaaaggagccactgtgccagcctggaactcacggcatcccctttaggatgttggctccacagggattggctccttggcagatgcagtcgctcctgattggacagtggtgtctgcagctcgacaaggtggactctgggccagtcggctctgcctgtgtgtcttgcgtcctgaaatgcaaagcaggggctgtggggaaatctcaccaacccctcctcccctgggaggtggcaaaggtggtggactgggctgctgggaccctggggaggaatgaaacagaggctgtgttgatggcctgcagttccttgtaatgtggtcatcaaacggtgtacagttcccgtctgtggctgcaggctggagagctgactgctggcacagatacagcctgacctcgggtcaacacttctcggagtccagaggggtkgggagtgggacaggtggcctcccagggacgcctccctgagtggccagtggtgccgcttgtccctgcacctgtagctgccctgagcacccccactggacacagtgggcattgcaccctccggagaaagctgcccttgttccacgtgcgagccctgtccccagcgccatgggctgtgctacctgcagtaacgcagactgcgagccccggctgcctctcyagtgctctctctcctctggccttcagcaggctgggtcacagaggtatccatccactcattcattcactcaacaaatatctgttccatgtctactaggtgccaggcacagctgggaaccagcagacaaaactccctgctttcccggagccggcatcttggtgggcagacagcataagcgagacgagtaggtggaggagaaggcgtgtgagcaggtgacaggcgctggggagaaacagcccaggggagggaccagggagtgtgggggagacggggactgygatgaaagggaggcgtccagggaagacctccatgagaaggtgaccttggcataaagaggcaaacgtgggagcatgctcaggcagaccacggtggtcagaagttgaattcrggccggaggaggaggagtgcatgaagccctgaggtgggagtgagtctgtctgctgggttcacagaccccccagggagccagtgtggcaggggccagtgtgtgaggggctcagcgggggatgtggctagaaaggttgtggacccactgttgagattggactttggctctgaatggaatggaagccattggaaggtttggagtgaagcagtgacataatctgacttatgttctgggaggatcaccctggccgcgtagagtctgccggcgggggtggaggtgggcgcagggaatgctgtgaggagcagcatgagagccggtggcagctgggcaggagaggagacagggagaggcacggggcccctggcccagggatggattggatgtgggaggcgggacgtgggaggaagggaggagtcrgggtgactcccgggagtgggactgacacctgggagggtggggagctcgttactcatctggggccaccctgggaagaactgggctgggggtgagggcagtcgggagctcagtgtctgacccaggaatccgaggcacacgttccccaccctcatagctgagccacacaggcaggaaataaacagctctggggttcaggggagtggtagagggggtggggtctgcagcatggggacggggttcagagccacgagatgggtggaaatctgaggggctttgtggggatggaaaagaatatattcaagagctgagcaagggcagccactggaggacagcgatgagcaggaagaagcccaggagactgagaaggagtggctggagggatgagaggggagcgtggagtcctgggagctggggaagccgcaggcagcacctctgtcaccccgatacgatgggcaccgctggacctagcaacgaagaggtcaccgcaaccttggcaagtgcagtttccacggagtggtgagggcagaggctgattggagttggtttataagccggaagaagaagaggaatcgcagataagtgaaggaaaactttttgaggaattttctcaaatggaaggcragaaacagtggagaagaaagtgggtctaagaaactgcttttttaggccgagtgaggtggctcacatctgtaatcccagcatttagggaggccgaggcgggcggatcacttgaggccgggagttggagaccagcctggccaacatggtgaaactccgtctctactaaaaatacaaaacttagccaggcatggtggtgcaygtctgtaatcccagctatttgggaggctggggcatgagaatcgcttgaacccaggaggcggaggttgcagtgagctgagattgtgccactgtactccagcctgggtgacagagtgagactctgtctcaaaaaaagaaaaaagaaactgtgttttttgttttctttggagatgagagaaataataacttattgggtgcagctggcagtgcgtcctgaagaaggaggaatgggcttgggatgcccttgagtgggtgtggggctggggacagccaygtgaccatggacactgtggggccggttcactgggtagccacaggagggaaggcaggtggctttgagcacagatcgtgtcgctgtgtgtggaaggtggcttctgattgcttgtgttttctcaggggtctgggaagcagcagtggcagctgagggtggggtgggaagggaggagcagcgaggtgtcccctgaacctgggagagaggatgccgtagagcaggtgcccatagactctttctgtaaaggaccagatagtaaataatttaggctttgccagccagccagtctctgttgcagctcctcagccctgcccttggagcccagaagcagcctgagaggattcgtaaacaggcatggaggtgttctaatgaaactttatttacaaaaataggcagcaggctggctctggcctgcttagactcctggccctcaacctcgcctctaggccaggggtcttcaaagcatggtccctgggcctgcagcatcagcgttacctggaacttgtgggaaatgcagattcttggacccccaccctatgttcatggarccagtgactcagtccctgcactgttttccaacccaagttgagtttgtgattccggaattctggaagttagctcagcacctagacccaagagagagtgaagtgtggggtgggctacatgccctgttaaaggcacaggcatcccagcccccatccccttctgcaaggctgtgtgaggacatcctgcctcccgtgggccrtgtttgcttatgcagcatccatgggagggctccctggggacgggctgtggtgatgactctgctctcagcagaaccctccactctgaagccctggtttcctgtccacgtccctcagctactcaggggagcctgggggcaggaactccattgcttgtaggggagcctcccacagcagcagggctcagccagtgttccatgcaagaagaaatgcactgtcctccgatcgaaagcacagcatctttaggagtttaacgacagttttttaacgactttagtgagatgatttgatttcctgcctctgagtcatctaagagcaaaatgcgtgagctgctaatgggctcaaagagaggctgcctttgaggcccctccagccccccagtgctgcagggattcaatcaccccaaagccaggtaaccagccttggcctcccaaagttctgggattacaggcatgatccatcgtgcctggcctgaatgagggtcttttttttttttttttttttgaggcggggtctcgctctgtcacccaggctggagtgcagtggcgcgaactcggctcactgcaagctccgtctcccgggttcacgccattctcctgcctcaccctcccaagtagctgggactacaggcgcccgccatcacacccagctaattttttttgtattttttagtagagacggggtttcactgtgttagccaggatggtctcgatctcctgacctcgtgatccacccacctcagcctcccaaagttctgggattacaggtgtgatccaccatgcctggcccaaatgagggtctttaagaataaaactccrggggatcgtcaccaagccccaccacttcctctgaggttagcatagtgctggatcttctctgcatcttctgtccttgtttttggttttcattttggtttacttgaaacaggatcttgctccatcacccaggctggagtgcagtgacacgatcatagcactctgcagcctcaatctcccaggctcaagcaatcctcccacctcagcctcccgagtagctgggattacagacatgcatcaccacgcccagctaatttttttattttttaatttttttgtagagactgggtctctacaaaacaaatgtctctgtgttgcccaggctggtctcaaactcctgtgctcaagcaatcctcctgcctcggcctcccgaagtgctggtattccaggctggtcccattttaccagcaggtctacacatgtgctcacatcgctcactcagaggagacctccgttattagggggacctagacctgtgctgccttgaccccagggacagaggttgtttgggaatcccctcccttactttgatttcttccgaggaagccggcttcctggtgacgggaggtcactgttctggggaaaaagagtgggaaaaacaaagccaatcagccacttggctaagtgtcaggtttcccaacaacttcatgggttgctgtggatgggcggggctgttttgagcccagaccatccctttgcctgtgggtgtgggaccacgtgattttggatcaggggtcatttgtccttccagaagccaagccctgttccaggcatgggggtgcagcagtgagtgagacccacagaaccactgccctcctggaacacaccccccccagagagggaactggggcaccacagacccgtgtgcaggcagcaagggcgtggtgtcggccggggagcagcagggacccctgagccccacagtcggggctcatggcgctgagaagcactgcagcaagggcgcagccagtaggagaggagcygcaagcgcaagcatccgcagacagtgtgagctcagcgtgctgggaaggcgggggcctgggtcaagggccaggcggcagagcataggggcctgrgggggcagtgcctaggagtgggaggaaagagcatgggaccagattcactttggaaatagaagcccccaaccagcagccagccaggtggaggaaggcrtgcagagctgagagggttcaggaggcggtggggggagccactgggaggggacccaggggttcaggtgaaagacagcagtggctcagcccaagggtggcagccagagatgtgggtggacggctggatattggcagccatactcattatcaatgctgctgtaacagytcatcacaaaccctgcagcttccaactgcccagagtgagatctcctggttcttgtgggtcaggcattggggcagagcagggctgggtctgctgttttgggacccctgagctgcagtcgaggttcttgccgggactgggctcaccttggaaacctctggtaggaaaggatccacttccaggctccctcgttcgtttgaaggactcctttctttgggctgttgggctgagggctcagcttctcgccagctgtcggcccgaggctgccctcagttcctgccccargggcctctccaacaccacagcttgcttcatcagagccaggagggacagtctctagcaagacagaagtgacagtcttgccattacctttgccgtgttctgctggttagaagcgacttgctaggtgcagcccacactccaggacaggggctgcccaagggcaggaatcccaggagctgcggacatcagtggcatctgagaagctgcctgacttaggagctcaatggmagcaccaggaagctgcactgggctggagtcagggcaagggacagtgtcagcgatgaccctgggggacagcagtgcagtcaggagctcagaaagtacacagatgccccctgggcggtctcttctgcaccatgtgggcagcagaaactacacctayggtttcagaacaacagttggggtggtgtggaaggacctccacgacatatarggtgggagtgtggagtgatggagtgtggaaacccttctcacagttgtcacctgctctccagcccctcctgagcccrtggacctgcctgcctgccgtgtgtctgtctgtcgtctgtctgtctgtctctctgctgaggggctccccratgccctgaacccagacagcctcctcagcctttgtgatcccagagtctcccggccaaacctggttgatcttttttaaccaccaccctcttcccctcccttattttgcttttcttccagaattttcccactgtaaaaaaccgagcaagtctggataagtgaggctggctccatgtatccagaatcaacgacgggctccccggctcggctctcgctgcggcagacgggctcccccgggatgatctacaggtgaccccctgccccctcayccaggccccctcccagggtcagtcctgcttcgaggacgggttcccaaggccactgtcctcccctctggaggtggaagggcccaagcagggcccacaggcttctgccttccacggggttttgaggtgcacgctggtgagcgttttctccaagaaaggagcaggggctttaaaaacccaagtgggaaagaaaaaccaaaacttttccagggcgtttgagccagagtagactcctttcttgtccctgacccttccgaaatatctcgtttgaggttaacagagcggccggacagtgagtgcacggccaaccccggcatcctgttcctcccactttatacatcgcagcccctgtggccctgccagtttctcctgagcgaggatgacraccttgcaggcctttggggaaccacgtctgccggtttcccaacactggagggagtgggggcggccaaatgctcctggggcatcctgaccccctccttgtggaactcacttccgcttgcagccctgggtgtttctgtctgcaccataaacagcgctgaacatcagcgacagctgcggagggcgttcagtgagagctgagcctctggggacagagcatagaacccacgaaagacgcaggcacaggcagtaccccagcagcccatcagtcttgggaagccagacctttccggataatcactggggcctgagccagagcccgtgtctgtgacagccacagggaaaggcagtgtctgtcctaagaagagccaggcgggcaggtgcgggtttgccagcacgcgggtgctctgcacgtctgggttggagggttttcagccattgcccacaagcatattgcaaagcaagtcctgaagcacattcaatccaaaccaaccctcactcggaggttcaccacggaaaacagggcctggcatggaaggagcccttggtgtccaggaaactggctccgggtctctgccccgtggccaccgggtggcgctgctgcagagcacttggcaccggctgcgcttcctcagagactgccctgagcaggcgactggtgggggccygggggcatgggacattggtggttctttctgacctgcacctgctkgggttgatgccaactgtggactctctctcttctctccctttctcctttttctcttttctccattgctgtccgaagtactcggtatgggagtcccaaaagacagctccagttttacaggtaatgagtcttcattctccctaaaacccagcgagccgaaggccagggagcgggtgggaggactgcacccttgccgagcagggtgtgctggtgtattctctgaagccaaagcccccgagacccccaggctctgctcatcaccctctgtgcctacccacaggatgctgtgcaatgtcctgatggaaaatgtgaagtcaggttaattgtatgtgttggtctgccagaagtttgctttgatttgagcaaatgggcttttgatgactgccaagctctcagccaaatctaccgttaaagcttcactcatcaggcagtgagggagatgtcttcctgtggtcaccagcttgccctgcttccattatcagagtacaggacgtggcgagcccatccgttccccctttgcctgtgggtttgacctgatctggaactcacagagctcctcaggctcattgaaggttaatgcctgcttgggggtgtgcagtactgataygacgtggatcagtgacatctttctgatatgtttttctgttggtgaattaacaaaccgggcacctggcgagagactgtgccccagcaggatgtgacatcaagatgccaggcttagggccctgcagggtgctcttggggagacccgttcctctctctgggctgcctctccctcacctgtaaggyaggggatgcatgttcttggtgcagcctccaaccctaggaagtaaaatgtcagggctgcctggagcccatgggcagcagcctccccatgccttgggactgtttggggaattggcacggcttctggcagcaggtccctggtatgcattgctgcatcttggcggtcaggccgggaggtctctctattcggacccggacatctggtaacagtgctttggggatcgttgccaatgtgccaggcagtggtcatggaggtggcaatgtatttccatgtagcttttctctccccgcgcccccactccccacccccccccccgtttgccagccatagcacctctgatggggaccgtggacctagatgctcagagtgatctgtgccacgccttcagtgcctcctcggaggtcctgctccttacagggagctctgaagacatggccaactcttagawcctactgaaattttggtagataagattttgcttaagatagttaaatctgaactccggcttgcaaatgctttccctggatgaaatgtttgtattgtgatgtatgtacacatggtataacagatcctaacaaacatatgccgctcatcccaggggatttcatcagtgaaacaaaacatgtacctgaactgcatcctcagagagccgggagcagcctcagtcctcagaagggaaggggtgaggtctgatgagcagrcaggaaaatcccaggtgcagacctgccagctcaaaagggctgcccacaggtacagaccatccagctccaagggcctgcccctaggaggggccaagtaaattatccagtgaccaagtgagagccttccagcccactcaaggccctcaaaaccccacaggctcaacatgttgtcccccccgccgggatccctgtgcttaagaaccttcatttccaggtggccttcctggccccaagggaagctctgaagcttaccctctaggctctcagccccaattctggtgcccacaggctctggccatcctacccgttggatctccagggggtcacttgggtgtctcttgtgggggctctggagatgacctctaagggctagggtctttgtttgttaacaggctgggggccactcctagtagggcaccctcatcacaccaagcataccactaaacatggctattggatggttctttcagttacttaggcctggccctctcacagggcagaggcgttcaaggcatgtgccctgcccccatgcagctcccaggcaaggaattggcataggacactgtgccaatcagctgtccaccaagtgctgcataacaaacaactccaaaactcagygccacgcagcaatcagcatctcttccttgctcccgtgtctgcgggttgaccaggcagctcgtctaagctggcttggctgggttygtctccaagctgcaagttggatccccrtgtcctccatcttcccatgcttaactggggcctaycccaggcatgtccttcccatggcaaaagtaccagaggaaaagcagaaacatgcagggtctcttacggcctatggttggggtcagagcgctgtcacctctgctcacgtgcttttggccaaagtaagtctcaggaaccagcccacagtcaaggggctggaaatatatygcccccaccagtgggaggagctataaagtcacatggcaaagggcatgggtacagagaggggtgaaggattgggagcaatacttccatgtaccccaggtctcaaatagccctgatgatctccagaaggcagagcacgtcacaggagaagcccaaagagcatttggggtccaaggaaggaggggccacagccagctgagagccaagaagacttcacggagaaggcagcaggggcttggatctggtccttgaaggctgggcaggattcaacgcagaggctgggaagcatattccagtagatacaacagcctgagccacagctcagaggtgtgcacagagaacaggaagtgacagttacccagcctgggccatcagggacatgatggagaataaagagaggctggctgtagaggtggatgttggtggggggcctcgaatgcctagcgatggggcacagatgcactcagagggcactggggagccatctrtggtgtttgagcagggcaggggtcagagatctgctctaggaaggaagcctggtagcagggagtaagacagggaagagagaggctaatgcaaggagaccagacagtgcccaggaaaggtgcaggacggctgagctccaggaactgcacagagagagaatgaaggggtgcagggcctgaaaaaaggacgtcagaagccacgtccacagggcttggccactgatgggcaggtgctgagacagaaagggacagagaggagcagtggacccagggaaggagagggcctcattcggagcatgttaggctgcagctaccacccagtagtgaggcgcaggccccccgaccagggcgacatgtggggatctgacagagtgggcttgggcctttggggacaaaycatttcaattgccaaggccttcgcagctagtcacccgcagccagrcacctccagactctacgtgctctcccagcctcccacttcatttaccttccacactgcgactggggcactgatttcctgtcccccaccttcccccatggcagctaccactgtttgctcattcatcatggggggacggttctgcctccattcaaaatcccacattcactggcgcgctttctcagccggaagatgatgtcacgctgggactttgctggcatcctgtgacacgcagtgaccctgggggtcatgaccctggggttggggctcagcacttagcctcatcccagagctcagccttgtttggcctagtctcaaagcatttcccaaaccccaggtcaggacatgtgccgtggagaagggctcctgtgtccctgcctggagtgagtggcagtgtggagtccaaatagcaggttctggggccttcctgccatttatagctaccggtagtatcagatatacccatctcgggtgtatccccagaggacaggaggagcatgcgcgtgtgctgagcagaggcctctccagacccccttggctgtgggtggtggccccatacgacggggcccccagctcccctgctgcagacacagttcagagttgagtggtatgcggaagccacaggctctgtgtcccgcactcagataccaaagagcaaggcctgcccctttcgacctgtgggtccaaaggtttgtgtttctggcacgcggggatggtggaggcagcaagggtaggcctgagggacgggcaggacctccccctcaccttgggctgcaccccaaccccacgcaccgggagtcagccttgccaggttgcagcacggaactgcacttcccgagcttttaggggaagaggcactcgtgaataattcagcctctttcactgagatgaaaacgccctaatagaactaatggactcgctgcctcaaaactcgactctggtgggactcatctcattcaccaattgcttctgacgtcctgcagtgacactccctaatgaaaaagccgctgtgccagatccttagagtgtctggtgatccctaataaaccagactgtggcctttttaacgagcagacgcccccacgaaggcaggtgagtcctcccttcagccgctaccttcctagtggagatgccgcttgggggcacgcatccgcgggaatgaaaaataacagaggagaccatattttggggtggttttgtctgatccggaattagaccctccgtgtttttgcaaagcagaagaccttaaaaaagagccagcctgaggtaaacttggaatgaccgtgatggatggggtggtgggsggcaggtttcagccgggcagcacctctcgcttgagtctgctcacagcccagacctgcccaaggctgactgttttcccatctgccggagacacgggcgtctagctcgtacctcgctgtgttcaccattgattaagattcagcattttccagttttgcccagagcgctgtcagggaggtttggtcttgtctgaaatgtctgtgcaggaagcacgtgctgagggagccaggggctgcttgtttgggcctcagtttgctgattgtccttgagcgaaaatcattctgtgtttgcactgaagcaatgccgtgtcttgtagagccgcaccccggaatggtagcagctccccttccatttccgctttggagaactctggctgggctctctgctctctggacaggtgtcaccattcagaagagatgctcagggttccttctcaatctcaggttgtatgctttgttggctttcagtaaacagaacaattcagaaattccaggtagaggagtctggggtgaggtagtgattcctactgacttaatgaggttaacatcttccttgcatttttccatgtcacggtgttaattcacgtgaattcccctgggcccctgatctacaggaatagatttgcaccaggcaggcccagcccaggaaagaacttgtgggttccacgtaattagcaatggctrttgaggaggggctcgtttttcttggtaccagggtggtgagggagtgtcagggctcagagaccctcactctggaaagcggccgggatttgggatattttgaattggaagtcaggggtcactgtgctcttgagcacaggagaagtggggaccctgaggcaggagcccggcagtggggccactctctcctccctgcagtgtcttaccggggggcccttcgtccaaggacctgacgctgctagagtctcggcaaaagcccagaatagagccccagtgtgagggagtccagaggtgtcctctgtccccaggcaccgctggtaacgggcagagcctctttgccttctgcctgtacctatccttcttcccctggggcagccctcccagagtcatgagccttcaggaccacagggagcccccgctgtacagagtcctggcatgggagtcccccccacacaagagagggtgacctgcaaagagctgctgggtctgaggtaggaagccagccccgcccccaccaacagctgcctggcactgccaggaaatgcccaggtatagccctggttggccttttggagcctgggccttggttactgttctacaaatatctgagcccctcctctgtgcacgggacactcccgtgggcactggtcagggggcagtggcagcaggcagaagagtccttgccctcctggacccaaccttcaggggagtccagcggccatgggctcctcatggcaccagccctgctcctcaccccaccaccccatgccaaaggctgccatttctgtgcccgcaagttccctggcccaagccctgccctggcaccatggggacaagctcgtagcaagaggctctgggctccctccgtgccgcagggctcccacctgcaggtctgctcccagggctgcaacatgagctctaaggaaagattgcaagcgggcccccacagggagggacgccctctaaatcctggccacaaaacccattctgtcctgccctctctcccctctcccactcacatccccaaactcrgccttccaccatcttgttgtgaagggggcgattattcacatctgtgttctcttcccttaagcattttctagggagatttggtgtctgtgtggctcactcctctcactcaaacctgtggtcacaagttccttcccgccctgcctgctggcccctggtggtggatttttctttccacagcatttatcataattggtgtcttatcccacgccccmcaacagactgtcttctggctgcgtcaccaactcccacccagttgtccaaagcctcatctcatgcagcccacagcagcctggtacaacaggcctctgcccagcctacctcacagatgtggaggctgaggccgggagcggtcaaggtgcctgcctgggccacaccatgagcaggtgacaagcagagctgcccctgtccagaagctgggcactcagccaccccgtcctccagccccggggccttggctatatttctagagccaaaccagacccggattgctttttgtgagtaatgtcttgaaagctaatggctattgatctcagcctggtcgggccaggcagggaacttgcgtgtctgaggctggtcctgcctttcagaaagagccctggggctacagcctgcccagctggccttctttctaaacacagacctcagggaagtgagggttggcccccatttgccccacaccggactggcagctagccacrtggccacctcagaagcagctgcctgccacgcgcatggagggaagggagtggccggccagtaggcagggaagggaagctggtgctgctgtctgtgggtgccaagggcctcatttcctaaggtgaacctctcctggagtccgggcctctctgccctccagagcgattctcctggaaggcagacggctttccatgccagggtacccgcctgctttagcgtccagaggtccagcagccaccacccctcccagcatagaaatgagcagtggtgaatgcaactcctggcatgggaaccccccagcaagagaggacgacctgcaaagagccactgggcctgaggcaggaagccagccccgcccccaccaacagctgcctggcactgccaggaaatgcccaggtatagccctggttggccttttggagcctgggccttggttgctgttctacaagtatctgagtccctcctctgtacacgaggggcactcccatgggcactgagcagggggcagtggcagtggcaggaggcagaagggtccctgccctcctggactcaaccttcaggrgagtgaattcagcacacaggacagctagaaaggaatcagcaaggtggatgatggcgagcgccatggagacagatcacagcaggaaagaggcacatggtgtggtttgtgtgggacagagggtaggatgggaaacgcagcccccccacccccgggagccatgcccatcagacagaggtgcagaggtgcagacagcacagcaggctccccaaggacgactggttgctcgcctttagggagggggccatccagccctgaccagggtggtggggccaaggcctgtgtggacactgctacccagctccctgtaggggctcctcgggggctccttgcctgctggtctctctttagctcttctctgagcccaccttccctacctcaattgcatgttcatgcaacaggcatttgtaggctctgctctgagctaggcctcatgctgggcacaacagggcagacatgaatgaaggtccctgcaaataagatacagacgaatacttgcagggaaacccccatgaaagaggcagctgtggggctcctggaggtggcccccctctctgggtgcacatataggcagagcagtgaaaggtcagcaggctggtcacccattctggaaggaccccagcacatggggctcatcacaaactcctgccccttgtgggtctttcctttggcccctggagctcaccccaggaaaggcccagcctggggcaactccaggacatctcaacccccttcaaggaccgtgctaaagcctctgtagctgcctcagctcccaggatagccctcccagctccttcccagggataatcgaacttttcctctcttggggcagaaggtggggacagtgctggttcctttccagctcccaggccaggttccaggatcccactgtgcagctgacccagctgaaatggtgacttcccctctgcaccttctctctctggtgatgatgcagagctgcagtgcaggccacctgggccatggccgaggctgcagtcaggtggggtgagggtcactggactggggacctcctttgtgttgagcctgcctccatgtcctcattgcgctgtcacagactctgcagggtgaggactcagccccgaggctgccctcactggtccactcactgttgtgcacatgaattaacaccagtggttgcgttctggacacacgctttctcccttggccttttaattgtccactatctctcagggctcactcactcactatgttgagatgcctcattcttgacagcagcacaaattcccactatgtggatggactgtcacttaggtaaccagtttccctactgatggacatttacattgcttttagtttccaagaatgtgcattcatcatttcagctatwtttcagtggttcttcacatagaaactttgaaactcccctgtcccaactaagcctatttccccaggccactctcctccgcaacctgcttaaatgcattctgctcagtttttcttttgcaaaaagcatgaagcccaaagatctctgcggtgcaatgatgcgttcaacaagcagggaatgtgttgtatagatagcatttccctttacaaggctaagagcaaataggaccttcccatgttggggccacctggcatgcgggggtgaggtgcctccctggcataattacaggagagtttacttcagcaacaggtgtgccctgcgctgctttcccagggacagcttttgacccagttttaccctgggaaccacctcaagagaccaccatgacatggtaccgcagtcaccacggaacagcaaccctggtcttcagcatttggggggctcaggctctgcatgctctctgtgctcccgttttcatttggacacttggggtgcagctgtcctgcctggaatgcagctttgcctgtgcttgtctcacagatgcaggggrcagaaaagggcagcttagccagagttcctggcaagcactgctttgcggactgagaatctcatgccaagaggtgtttacatccaggggccgggtcccactcctagacaccaagacctggtggtggcactagttaaaggatgtttcgctgcagctgccccctgccccagggccagccatccagcctggggcacgtggggcattggcacactgtctaactcatcaccgtctggacagtggcagctcccaagccaggcggcaccatgctgtccatgacgtacagcgagagtctgcggagcgtgagcagcaggtgccactctgaatgggccctgcaccccgtccgccagacggacacgctggaactgcagcggctgcgggaggtgcgggcggctgcccaggccaggaacatggagagcttcctccrcatgcacggcctttccctggacggctgcaccgcccagcgcacaggcatgaagtatcggtaagggccgggcaggggggcggtggggtgggaagtctgatttcagccatataaatatgtataaaagggctgggcacggtggttcacacctgtaatcccagcacttggggaggcagaggcgggtggatcacctgagatcaggagctcgagaccagcctggccaacctggtgaaacaccacctactaaaaatacaaaaaatagccaggcatagtggggcgcacctgtagtcccaactactcaggaggctgaggcagaagaattgcttgaactcaggaggcagagattgcagtgatccaagatcataccactgcactccagcctgggcgacaagagtgagacactgtctcaacaacaacaacaaaaatgtataaaggaagaaaatgaggccaggcacggtggctcatgcctgtaataccagcactttgggaggccgaggtgggtggattgcttgagcccagaagtctgagaccagcctaggcaacatggcaaaaccccatctctaccccaaaatacaaagaaattaggtaggcatggtgccatgcacctgtagtcccagctacttgggaggctgaggtgggaggattacctgagcccaaagaatctgatgctgcagtgagccgtgatcgcaccactgcactccaggctgggtgacagagcgagactccattgcgcaaaaaaaaaaaaaaagtttagtaaattctccatggggtaaaaatgtgtgggtgtgtttctccatggggaaaaatgtgtttctgggtgttggagacccctgctcttaatgataggcacgtaggtctgaattttcttggaacctccaaaggacattctttttagtgcgcttgtctttgaattcagcacctcggacagcgctctgctagccaccgttctctggctggtgtaaatccctctcaattgcaaattgacagctttatcttctgtgcctctcaggaacatgcccttgtgagagccattcagccaaagaggaccctccccacccagtccttgtagagttgccagttaaatttgaagttcagataaacgcgtaactttttagcataaatacgttccatgcaatatttgggtcatacttatactaaaaagttcctcattgtttatctgaacttcaaatttaactgggcgtcctgtgttttatctggcaacactaaatatctggcttccgtctgagacagaccctagggatcatctgcgtgctctgtgcagagtggagtgcaggccaggaccgctcctttaacgttttctcctgtggacggcgtgtttggtccttcagcccattgtttgaatatgtggttgtaatttagaaacaaaacacttctcctgtgagtccattagatggcagtgtttttcaggctttgtatcctaaatccagctgtaaaggaaggacaaagggtccgctagtttggccacagctgacctccttgttctgctggaaatttctcaagaaggagacgctgggcattcatgaggggctggtcattgattccttttgtttattcagtaaatgtttattgagagtctgcttggcaccaggcgctgagccagatcctggagctgctgcatgaacaagagcaaccaggtccccaacctcacggcagccatggcctgggggtgtggggggcagagaagcagcgagcttgcacggagacaagttccaacagcgaccactggccgaggcagcaaagcaggacaatgcaatgaagaaagaccagggaggccragggggaaccctctgagagagggatcatctgaagatgtggagaacattccagcccaagaggagaggggtctggaatggatgcctctctcagctggaggagcgaagagaaggcccaggcggctaggctggagggaggaaggtggaggacacaaggcgatgatgcaggaggggccagaccccatcctccaaactcagggaaacctcagctctctcctatgtggacaggatttgtgatggaggatagtttagtgggttaaatcaagaccccccaaaattcacattcatcctaaacctcagaatatgacgttaggctgggtgtggtggctcacgcccgtagtctcagcactttaggaggcagcctgggtaacatggcgaaaccccatctctaaatacaatcaaaaaattagccaggcatggtgacacatgcctgtggtcccagctacacaggcggctgatgcaggaggatcacttgaacccaggatttcaacgctgcagtgagccctatttgtgccactgcactccagcctgggcggcagagtgagaccctgtcttaaaaaaaaaaaaaraagaagaagaagaagaatgtgacattatttggaaatagggtcattgcagatatcattaagatggggcaatggggccatacaagactagaatggaccctaattcctacgactggtgtccttataagaaggccatgtggtgatagagagtggagtgacgggtccacaacccaagggactctgaggagtctcggtgttaccggtggagggtgtgcagccaggttcctggcatcttgaacaaagaattggacaaaacgcacatacaaagcaaggaaagaatgaagcaacaaaagcagccgggtgaggtggctcacgcctgtaatcccaacagtttgggaggccaagacgggtgggttacatgaggccaggagttcgagagcagcctgggcaacatggcaaaagcctgtctctactaaaaatacaaaaattaaccagtcgtggtggcgggcacctgtagtcccagctattcgggaggctgaggcaggagaatcacttgaacctgggaggyggaggttgcagtgagccaagatggaacaaaagtacactccacaggatgggagtgggcaagcggctcaagaacctggatacagaattttctggggtttaaataccttctagaggtttcccattggttacctggtgtacatcttatgtaaatgaagtagtggcctgtgatcattctgattggttgcagaaagtgaccaattagaggctgaaatgaagttacaaagttacacttctatgcaaatgaagacttggcccacagccagcctgattggttgcgggaggggacaaatcagaggtattttccatttttcgtctgccacacagaaaagggggcgccatgcaaagagagtagcctctggttcttttgttacttgggcgtggaaagttggggttttccttttgacttagttataggaaatcagcgggaattggccttcagttccctgcctccagaccctggtctcctgccccaacaggagccacgagatgctggaagggacaggaaaggacacctcatgagggtgtttggagggaacactgcccacacctggacttcagactccagaagtgggagagaagacattcctgttgttgtaagtcctctaatttggggatctttgtaatggcagccgcagggaactaacacaggtggagagaacatatcttttatttgcctgaagccccgaggaaaatgcctgagcagcctcggagacactgcaggtcccactgtggggctgaaacgcccttggggatctcgcttctcagggagtggaggagaccagaagacaaacgcttttttttttttttttttttgagttggagtttcgctgtatcgcccaggctacagtgcagtggcacagtctcggctcactacaacctctgcctcccaggttcaagcgattctcctgcctcagcctcccaagtagctgggactgcagggatgcaccaccatgcctgactaatttttgtatttttggtagagacagagttttgtcatgttgaccacgctggtctcaaactcctgacctcaggtgatctgcccaccttggcatcccaaagtgctgggattacaggcatgagccatctcaccccaccaacaaagtccctttagcagttgatgggccagaggttgttgttacacccaggtcagggtgaaggtggggcggggagggtggtggcctcactctatctggtgaatttcattttgctgcaccagggytgacggggtgggtgggatgctccgtgactcagaccaccagttattaaagatcccagataaatttattctgtgcttacctcttctccgtcagcgactgggctgggtcaccattaaacttggtcttaaatatgaatatagaaaagatgatacctggggataggcactgcccggtgccgcaagaaaccagctgtgcccctggcctgggcatttcatcagctgaactgagctgtagctgatggaggtggacggcagcatgcctgttacacttccccagtttttttttgagacagagtctcactctgtcacccaggctggagtgcagtggtgcaatctcagctcactgcaacctctgcctcctgggttcaagcgattctcctgcctcagcctcccgagtagctgggactacaggcgcgagccaccatgcccggctattttttgtatttttagtagaaacggggtttcaccacgttggccaggctgatctcaaactcctgacctcaagtgacccactcgcctcggcctcccaaagtgctgggattacaggcgtgagccaccgcgcccggcctacacttccccattgtttaaactgtcctcaattattgctgttaaaaagaattttaagatgaatttttaaatccacacagcccctgtgtaagcatgagggagcagggtgagggcagctggcctagcacacacttcccctcccctgtggacgttagggttcagagatgtggcctcagaatggcaggccagaagctgtggccgggcccacactgtgctgactggacaccagccctcagttcagctgtgttttcctctgctccccatggtgctgggagtgaacccaaactccccgcaaggctctacgtggccctagcctgcctccttggtttcaactcggacccctctccctcccgctcaggaggctctggacgccgccccttccttctgtatccccaaaggggaactcattccatccacagggtcatcgcactttctgttccctcttcctggaggctgcctccccagacgtggcctggttccttcccattgtcacatctaagcttggtccccaaagagactgtcccaagcacccactctaaacaagcacctatgaagtcatcagaagcccctctcctgagtgagtgtcttcctcacccctcctccatctcggttgccttgctctttgcccatctgcactgctttgagatcagagctttgtctgtccctggcacccggaacacccccagcctctgtgagtttaggtcggaaggcgctgcgtggtcttggtcttaatctactttccaaagcacatgtctcgttcgggctgcrtcctagatggtgggaagacaggactgactggaagctggtctgaggctctctctgcagtccagatgtggatggcagggagcctctgcggtccttgggcactgacccttggtcatgaactcctggcagggcaggagtcctgatttcctgtgctttctgactctagatcccaggctcttaccacaagctcaggttcaccaggaagtacttggttggttgccaggttcattgagcagactgtagttgctcagttaaccataggccatcacttccagctgggaagagctgggaatccaggtgtgtcttaaaggacaggcgggaaggagggcactgagggcaggaggaggggaaggagaaaaacagcagagaccaggggggatggcaagttaacctgtctacaaggccaagtgcatcctgggaaagaggggtccccaaggaacggggtccatcttgggaaagatcctgttttactttcctgaggctgctgtaacaagctgggtggtttacaacagaagctttttctttcccagttctgggaggtgaaagtccaacggccaggtgcagccgggccatacttcctccgaaggccccagggagggtcctttttgcctcccccagtttctggtggtgccggcaggcctgggcattcctcagcttgtggccacatcgctccaacctctgcctctgccgtcccatggccattttctctctgtgggcctctgtctccaaatctctctctccttataagaacaccagtcatggccaggcacagtggctcatgcttataatcccagcatcttgggaggctgaggcaagtggatcacttgagtccaggggttcaagaccagcctgagcaatgtggcaaaactctgtctctacaaaaaatgcaaaaaatggccaggcatggtggcaagtgcctatgatcccagctattcctgaggctgaagtgaggatcactgagcccaggaggcagagtctgcagtgagccgagatcgaaccactggcactccagcctgggtgacagaacaagaccctgcctcaaaaacaaaaagcaaaaaacaaaaacccagtcattggattgaaggctgaccctaatccaggaccatcgcatcttaacttgattacatttgcaaagaccttgtttccaaataaagtcacactcacaggtatcaggaattaggatctcaactgtcttttggggacacatttcgacctgccacaggccccaaggattgactcaacaccttgagcctgcggggacatccctgagtgtcctgggaggaacccgggctcccaccggctacctgtgtgacctcagacaagtcccctggcctctccatgactcgatttccttacccggaaagtggagaccggggtcactacagcagaattgtcctgaggactaaataagctccaggtgacataactcaaagctccaggcttggctcattgtgggagagaaatgcaggcccttcccgtccctggaaaagggaccttcccacacagcagtcgctgtccaggcacytggactgtcccctgtctatccatcttggggtctcactcgtgcacctagtctcacttagagatgtagttcagtgccgcgcagacaaggggcggaggcatcaggaaggaacaggaggagggagggaggcgagcagccagtcattccggaagagctgccgggccagacgcaggggctgggagaaagccagctggcaggcccagtgctctccttgagggcctgcccaggaccacggctggcagctgtgtggggcttgggtcggggctgggagggcttctgctggcagcgggcaccacattggagcctcggtggtcatggtcatcccaggcctggaaacagcatccgtctgcagccccagcctctccagccccagcttccctaaagggacagaacagcccttccctcccccacagggctgctgcaggagaggtgggaggaaaggcagagagacccagactcctgcactgggtggttgccttgtaaccgactgatgatgtgctaggtgtttctggagctgacctggccacaggaatcacgggccatacctgtttttcctgttttttgttgttttttgtgttgagacagcgccttgctctgtcgcccaggctggagtgcagtggtgcaatcatagctcactgcagcctcagcctcctgggctcaagtaatcctccagcctcagcctccctagtagctgggaccacaggtgcgcaccaccacacctggctaatttttgtgctttttgtagagatgagtctcactaggttccccaggctagctgggaacccctgggctcaagcgatccacccaccttggcctcccaaagtgctgagattataggcatgagccactgtgcccagccacacctgttacactaccgatccccaggccccttcctggaggtttggggcatcttcccctggaggctcttcggacaagcaaggagagggagcaccacccatgtgctggcgccgtggtcattgttgttggtcttgttacgtctcaaagggtgcttctgaggacagaaggaggaagagaaagagaggtgctcgcttggggctggagagttgcatgggaaacagcagcaactcagagcagagccggccatctcacagccrcgggcctctctcccctttctgggctcctagagttggaagtgagtggggccatgaggtcctggtgagcaagaggaaggaggaggaactggctttgcagaccgtgcaaagccggttcccgggaagcacacacatggcctgcaggaggccttgtcctagcatcacctgcagcttcaagcacagtccactcagcccaaccacagaatgggccccgccagtgggatgtgcgctctgggcaaggctcacatgtcctgtcatcggtcctgtggcctcctccttccctcggcctcccactgtccctccgtgtcaagtctcccaccatctgatgcgccctctggcaaggccagtgagtcaccctactccagacacagaacctgctgctgcctcacaggctcccgccatctgccctcctgcctctgctctcaggagaaggacactcctggaattccacatggatcccaccttctccctggagccctgccatactcctgggcaccgctgatgygctctcctgctggctgacttggccttgaacacgggtggctcaggcctttcccagggacccttgcttcatgccccagctggaggaagccacactcacagcacttagcccctatggggtcttcagctcttactctcctggtggactcctcctccaggaaggccaccggccctgcctccctttgttcttagaaactgctcctttggggcagcccctcaactgttcaacatcctctgcccttccttgggcaagaagccacctttgggtgtaaaccacactccgttcagcacggacaaggcggtctctgcaggatgcagaccctcagtctcactctcggaggagctgctggaggctgtgcttttaaaagccatgtcaggccaagcgtggtggctcacgcctgcaatcccattactttgggaggcccaggcaggtggcggatcacaaggtcaagagatcgagaccatcctagccaacatgctgaaaccccgtctctactaaaaatacaaaaattagctgggcatggtggcacgtgcctgtagtctcagctactcaggtggctgaggcaggagaattgcttgaacccaggaggtggaggttgcagtgagccaaggtcgcaccactgcactccagcctggcaacagagcaagactccgtctcaaaaaaaaaaaaaaaaaaaaagccatatctaaaaccttctccagaccttgagccctccacaggcctcgttctgtgcatgagagggcatccgcccccttccactgcgagcctgttgccattgtaggggaggagctggccggccccagctttccagcctctccaggcccaagggggaggagtggaccccaggcactgagccggaagcctccgctacagcagggatgctgtctgtggtgcactccagggacacagagcagagcttttaatgggggtggctgctctccagtgaatcacagcaagagctagctgcttcatcttatcaacagcaggtaccggagagacagaaaaagaaccagaaatgggttgtaggttgaagtcaaccagccacgctccatgcctctgaccaaagcctaccagcactgggccgggcggtggctcacgcctgtaaccccagcaccgggccgggcgggggctcacgcctgtcatcccagcaccgggccgggcgtgtccccacacatgaatgttccaggcttcccttgtctggacgatgtgatcagggagacaccatcccagattctggctggtaacagagcaggcctcctcaaccctggyaccattgacacttgggctggacaattctctgtcatggggcagcatccgtggcctctgcctactgccagtagcacctcctgcccagttgggacaaccaaaaatgcctccctatgctgcccagtgttccctggggaacaaaacccctcccaggtaacatgcactgatacagagtaatcatctctgccaccaattttcacagattataacggaatataatgtgcataatgcaaaaattatattgaattctttttaaaattaccctccaccccaccttattccaaaaaggattgtaggtgacgttgttaaattaatctgctaccatgaaatttttaaaataaataatagcaaatatggggaaaatggaaaataagggtaggtcagtaaaataagtcggtggtaaaaataaaataccaaattcacccactagatgaccaggcagtgactggtgagggctgtgtgttttatacagactttccggcaaagaataaacccactgattgcttagaagtccagtgtcagccaagcgcggtggctcacgcctgtaatcccagcattttagaagcccaaggcaggcggatcgcctgaggtcgggagttcaagaccagcctgaccaacatggagaaactctgtctctactaaaaatacaaaaaattagccgagcgcggtggcacatgcctgtaatcccagctactcgggaggctgaggtaggagaatcacttgaacccgggaggtggaggttgcagtgagccaagattgcaccattgctctccagcctgggcaacaagaaaaaaaaaaagaagtccaaaaaaaaaaagtccagtgtctctaaaatttctaccttgggttctcaaaaaagaacacaatgtgagctaggaaacgccattcccccagtaagtgggcatttgtctagcagctgtttgtgtcccttagtatcatatcataaggaacataaattagtctttcctgggtccattgatccaatatttattgaaggcttttgggcacgtgacatggtgctggacggtggagacaccaagatgaccacatgcaaactgctccccaccccctggtgtccctgggaagaacatggtcagtggcgctcggagaagggaggggttacttgtgctgggggcctagcttcatagcgcacacacactgtctgagctgatgtcacaagtgactccgagttcaaaggcagagaaacaggaaaggcacttccacagggaacagcaggaatagaagcccagagggttttcaggcaggtgacttttttgggggagatgggaacagctttattgaaatataattcacgtgccatacaattcatttaatgcaattatatggaattaagtgcaattcagcagttttcatgtattcagagctgtgcaaacattgccacaattttaggatatgttcatcaaccccagaaagaagccccatacccttcaactctcactccccattcccaccccctgcaaccaccaagctttctgtctctacggattcgcctatttggattttttttttttttttgagacggaatctcactgtcgcccaggctagagtgcagtagcgcaacctcggcttactgcagcctccaggtgcaagcgattctcctgcctcagcctcccgagtagctgggattacaggcgcccaccaccacacctggctaattttttatttttatttttaatagagacggggtttcgccatgttggccaggctggtctcaaactcctgacctcacgatccacctgcctcagcctcccaaagttctgggattacaagtgtgagccaccgtggatatttcatatgaatggaatcatacgtgttctttcatgaccgtctttaacttagcatcatgttttcaaggttcatctgtgcctgtgccagtaattttttttttttttttttgagacagagtcttgccctgtcacccaggctggagtgcagtggcatgatctcagctcactgcaacctccacctcccgagttcaagcaattctcctgcctcagcctcccgagtagctggcattacaggtgtgtgccaccacagccagctaattttttgtatttttagtagaaatggggtttcaccatgttagccaggctggtctcaaattcctgacctcaggtgatccacccacctcagcctcccacagtgctgggattacaggcatgagccaccacactggacacttccttctttttatggctgaataacacttcattttctggagagggctayatcctgtttctccatttgtcggttgatgggtgtttgggttgtttccagtttggggctattgtgaataaggctgctgtggacatttgtgttgaagtttttgtgtgggcgtatgttttcagttatttgaggacatagctagcggggggattgcctggtcatgtggtgaggccgatgacattttacacttggtgactgaaagtctcgtgagtctccctgaactctgtgctgcttaacgtgcaccactggggtaagaacacccctggggaagagtaagatgccagccattgtgggatccgatgttgccagcctttgtgggatccgacggtttaccagagtgcagagaatgcgtaaggaagaggtagaggatttctgcgtctcactaggccagcatgcgtagcaccacttgaagctcttggtagaaacgccgccttccgggctgaacaccgccttctgggctgggcctcagagccactgattccgtaggtcagggggatgcccaggaccctgcctttgtaataagttcccctgacatgatcagatgttgaacagccctgtcctagacggtgagcgccatgagagcaggtgccttgtgatacacagtaggcacccagaggctctttgaacaaatcaatgtgatcctttttataaatagggaagggggctgttgaaaaattctgttagatagtctgagcaaattccatcttggccctggctttgcacatttaggggaagtagggatgctaagatttgctgctggtcacaccctataaagagcctccaagtagggagaagggtagggggcaaaagacttaacctgagccctaggtaggggccaaaggtggaatggttgccatctgtgcctcttcagcagcccatgagctcccgggaggccagggctgtggcctttgaatcctggggtccagcctcaaggaggggtgggctgtgcatagggttgcctatcccccgtcaccccaccaccttccagtgcccttagtacctcctggcaggacaagagggggcccagaaggcagctctgaccagggtccacctgcagggtgtgagggggacacttgggatcagagggcagagccagcccctccggatgctgaagaggatgaagtaaagtagggcaggggcttcattcagccattcactcactgattgcagagtatgtattgagcgtctgctgtaacctaagttttactgggagtgttggaatctctctgtccctttgacccccgcgtttccttccttgggccatctktgtcataaccatcaagacgcagtggcttcttcacatttctggtgatgttgcttctccatgtgccaatcccccagcggataccccactctccggagggagaaccccaagcaggtgccgctgggcatgcgccagggaggctgtgaccggagcargcactgccttgcttggagctggctgcctacaagctcagacatccagcccgcagagtccaccctggctgcagcgcctgcccaggcctcaggccagtcctggctcagcagctgtcagcccggagcagccagcgatggcctcaggggaccagccaaggcaggcggcttgtgcatcctgcttcattaataatgaatggccagacgctgcccgcgcctctccctggtcgcctcattgacatggtgggagcctcagccgcccacagcgcgcagagccaggagctggatcccaggccccctcagaaagactcaagaagccccgagaagcagctgctccccaagaccccctgagctgctgccccagaagagcagtcacagcggccctgcgcagccccccaggccatcacctccggctccacaagtgacaccagagagagccctcccttctccagtccaaggaaggygggtgtgctcatcacccgtcactcatcatcaggagtaactcacagcccagccctgcccaacacttttggagactgttgggctgaggacttgggcagccagggctggttgagggtggggacagaggaaggacctgcagagacgagagatgtgaggggaggagaaaatgcgcaccccccaacctccagccgcgcttccagcaggtcttctgtacctcgggcctggaaatgtgactccctccctcagagctgtgcagccttcttccccaccgttgccttcggaaatcctcactcctcaaggaatgcctgcagcttccttggcttctggataaagtctcgtcctggtcgggggagaagagtttcttggggacagatggctcctgagcccaaggggacaggggacgcagccaggatctgagcacccggcctcagcatgcaggtgtccttcgtttgctcggagcacagcctcaagggccggggccctgaggatcggctgggccgaccggcggccagcagtcccagcctgggctcccgaggccgcttccgcgccgtggccatggtggcccggagcctgggacagctgtcggtgcagagcctcccgtgtgccggtgacaccagcgtgaagcagcaaaggatgaaatataggtacgggggcacacagctttgcagggtgggggctgacctcccggcctccccaactccccacctcctcactttcgagagcgcataaaatctgcaaatccccatttgtcagacttgggcagtttgtgctgagggccrggaggggctgtgcttagtgcttggtagatgatgagaaacagcgtggagaatccggtcagtgctaagtttctttcttcccagtttcagggggagatggtgagggcgccgtcttccttccttctgcctctgttttctttctgagggtcgtttacaatagccaagccaccaatgctcccttttcctggggaaccctgaggcatgggccacagggcccccccaacatcctcctgccctcccctgggcacacaggctccacaagatgccctgggggtggtctgatatctttccagccaggccaccatgacaaacatccgtttgatagtgagggactgtggggtgaaccctgtgatggaatgaatcttccctcctccacctgagccaggcccagggcccaattcctctagcaggcgggactcttgctccagcaggcacaggcagccaggccgcatctggagtttcccgatggtcagcccaggcaccttgcttccctccacccgggctcagcccccatctggctcccggtgctgtgacttgtatgtggggaggatgscgaccactcatgtcaggagcagggcctccctcctcttccctgccggggcctttctccaaggctgggtgaatgtgcccaggatggaaaagggagggtcccagctttgtacaaagggtcccgggagcagggttctggggcacccttctgggggccggccttcctcactccccatgtaagtctctgagtccagagccttgattgcgtccagaaccatcctccaggcataaaggaagtctccacaacacgtggtctacagaagctggaaaagctaaattargtctctggttcccaggtttcctgggaaagttttcccaaaacaggaaccgaactggggacaactctgcttttcagtgacctgaaactggagtgcaggccaccagcctcagaaacagccacaaactgttctcattgcatttgggaatcttctgggtttatagctggtatgggtgccaacctgaaaagcattgtgagtccatcctgatgcctgagctgtgtggcttaaacctctacaaaaccaatgcctgagagttgggcctcgtgtgaaaaccgtgtcatctaagccaacccttgctggaggtgaattctgggatgactctgggggtcctgcatccacattcgtgtctcttccttccctgcgtcctgggagggtgagacatgctttaatgaacctctgggctgaaagtgtccaatcctctaagcttaatgacagtccagaatggaattctctgttctagaagctctggggtttacatcttttgttaagtagggatcaaaagctaaaattagagccaggagaggtggctcatgcctgtgatcccagcactttgggagactgaggagggtggatcacttgagctcaggagatcaagaccagcctggccaacataatgaaaccctgtctctaccaaaaaatacaaaaattagctgggcatggtggtgtgcacctgtagtcccaactacttgggaggctgaggtgggagaattacttgaactcaggaggcagaggttgcagtgaaccaagatcacgccacagcactccagcctgggtgacagaatgagagcctgtctcaaaaaaaataaagctaggagtaaaccgaacatgtatatgtatattttttggttcagatacctattgccttctgcaacttttatgtcagtcctaggatctcaaaggagttaaaagcgggactatttctaaacataaggcactatgtaattggaaagtgtggctgttaacactgtttccctcctaaaactcattgaggagtggctctcagagggtgaatgctcaccacgcccatgtgtgtgcttatgtgtgcatgcacacacgtgcgtgctggaggcagggagggcaagacagggcagtgaaggggggtgttcatcaggctggcaggtttgcagtctgtggaccagagttcaaatcccagccctggcactctctgactgagggcgggtttgcagtctgcagaccagagttcaaatcmcagccctagcactctctgactgagggacccccatctctccagtggagttgcaaacaccgccttatacctggccaggcctgggagctttccttgctgctgtcacggcgggagggtaggttcatagccctgtaggatgaggtgcagtttcacaggggctgagatgggccttagaatccaaagcctgtgccatcgggcacccccgccccgggcctctcccatcccactcatgcggtacctgcgtcatgagttgctgcacagggactgtcccagggccacagccagggtgcaagaggggggcagcagggactgagggggagcctgatcccagcctccctgtgactctggcctcctccctgggaagctggcccttcccagtggtgtgctccaggcacagctgtccagtgacacgcacagtccacaggtactaggaaactaaaggtgcatggccagtaccaggcgccacattcttgcccaagggcctaaggcgtgctcagtgtaggatggcgggaggccaagcctgataagtaagggaggggccagcacttggtcccgagagtctgaccccagggcctgggcttctcacccctgaattactacccaacatcgtcccaaacaagcactccctgggaccctgccactgccagctccaattagaagacaaagactggaagcccagcctgtccttagggagcctggaatctcggagcagggcaggcgtgcaaacatcatcactgcacggagcagacaggcgagcagggcactaacaggagccaccccatgtgccttcctccgcaaccagctagccaaggccacggtgcttgcccttcacctgatcacagttttgtcctctgcccaggtggctccaatgaaaggccccaaactcctctttgtaaaatgacctgtcatttcccggagccttccagctccggcccttcccaagtctgaagtgcagtttttaggggtgtgcagcagccgggggctccacgatgggcatcagtgctcccctccggcagaggttatgtctgtgagtcctcactccaggagtccagaccccaggagagacatgaggcaaattaatgaagaccgacagtatttgggtttcgagatgttgaccacctgcttcattaggatgtcaggtttcaacgatggggaagaaatcggtagaaaatgatctctgtgtctgggaagtttcaagtacagcagggagcagccccatccagacccggctgagacgtgtgctccccaccccacacgcagcagccatgcttacaaagcgttcagcctggaggcgccctgtcccttcgcatcccttctcccgaggcctggcagcggatggcagaaccaataccatcattttcrcagggaaacaagttgagcagggtaattgyggcatcacgtggtgccctagttttgttaaattagtcctgtgggtggtgggtggaagagcggctgaacccagagcccactcggggaagtgggcccatttcccaacactcagaccaggaacagatatggaatcaggggcaggggcaccttttgccagccctccccaaactggtgaccaaggggtgcctcttctcttcagccctgacctggccttcagcagagccttttcaagcaactgttccccacagtcactcgtggaggtggttttgcagaggtgggggccaggcctcccttctcgatgcccagacatatctagaccagtggggtccagggctctgtgaacacccagacattgcaagcaaggttcgttctgagggcattcgtatctaggcatatttccaggctttatctgtttttgcaaaggggttatgaccccaaagcagctgagaggcactgatcagaacctccagccctttgcttcattattggactcctactaagcatttataatttcttaccacagttactttctagccagcatgggggaaattacstaaacttctaaactgaccaggcttatgtggaatgtattagtggtacagttgggctgttctccccagcagccacagacacgagttattctgggttggaacatgccagcaattcagagggtactatcaagagtatttcactgatgtataaggaggaaaaaggaaacttcagttcctttttaacatggtaatagttaaagcttatttgatttgtccattgtttttgaataaagaaaaggttaccctcctgctctctttgggaaatgagacacatgtgagtcagtgtcctgtggccttctatcctcatggatcttcttctgtcctcgtggcagccaccgtgagaaaggcagcctcgtgagcccattctgcagatgagaacactgaggcwtcgggccactccataaaatgcccggtgtcctccagccaggaaagttgtaccaggatttgggctctggcttcagagcctcagcccatagccgccacccggtgcgcccctttcctgaaagaaaactcagcttttcttatgttctcctttagggaaaatcccagctctgcctacaggagcaataktgctggcagctggagtggttttaataggaaattgaaaaataaacctaggcaattttaaagtaccttcagtttggtgacacgttcaactgttttcaagctgcttacaaatattatatccactcatgagttaggagtccaggagccttataaccagggaaaccgaggctgagagggacagagtgggctcgtgtcagaagtcgggggttcagaatgaggcttgagccccatgccgccttcccaggggccaggcttggacaggaaagaggataaactgaggacatcgcatcctccgaagttggaagtgtcatggccccagggaaatgcagggcccttgggccaggaggctgggcctcacccgctggtaactcatggctctcactccccaccgcctagaaccagctgccccttgaccagatgctggcagctggattccacaagggaagtggaatctgaccccagatgggtcaaggcctggctgcagctgtgagatccacccggccacttgtcaacctcaccatctgggcagatcacgccctgcttaacaggctggggtgtgggatgcatgccaccatggtggggaacgtgagctggcagccaactgcctgggtgggatccagctcctccgcgtgctgggcaggtatcgtaacgtgggaatcgatgtcacgacaagcaaggcgcctgctgcgtagggcacctgccgcttaggactcctgccaccgcgtagggctctgctgcgtaggactcctgccgccgcatagggctctgctgcgtargactcctgcggcgagggctccctcctgccgcgtgggctcctcctgccgcgtgggctcctcctgccacrtagggcacctcctgccgcgagggcacctcctgccgcatagggcacctcctgccgcgagggcacctcctgccgcgtgggctcctcctgccgcgtagggctcctcctgccgcgtagggctcccgggaggatccggggacaggatgcctggggacygcctggcctgctgcaaccctgcaggctcctaggcaacctgtgccaggacatacgggcatgccrgtcctcagcagagggctgccaccctccttcacctcctaaggacagtcatgatggcccaaggcctgttcctgtggaccctgggatgcaccacagtgggcaggtgcctcagtggccccgggaaggagcccgggcagctgtgcttggttaggaggcctacgctgccaggctctgccgctgctgttgggcctggctgtggctgtaacaaaggaagggctggccttgcttgagaactggcagcccyaccatggagctccccgcaccccgagggacagatgcacaggccatgtggtccagtgaagtgggacgatctcctgccccagtcgctggagacaggaagaagagacacaaaatcacaaatgcagccttagagaggarggaagaaggggcttctctgcaaggggcgccgcatggatggtgccatgggggtgagaccagtccagtttcgccataaaacagacagcgtccctgtgcatttccatctgtccttgagaccactctgcagacccccactgggcaccagcagggcccrtgccagcagcatggtgtgggccgggggcagttggcactttacccccggggtgggtgagcagaggcacctctctgaaggtccccggtgcctttcggagcctccaaacacacattgactsttgggggagtgggtggggggctggccctggcgggaactgagcctggctggcagggtcctgcctgggtgctgagaactcacgtggcgtttgtttttcaggaacctgggcaagtctggcctgcgggtctcctgcctgggacttggtgagtgtgggggtcccctccgtcccaccagggaaacaggctgtggggaggccgggcatggactgaactggacaccccttgggaggcagggtggcccaaaccttggcactccccagggagtagctgcacccagagcccaggattcaggggggctcggttgccatggcaacaaagaggcaggtgggagsggggctgggatagagggagagagacacagtctcagcagaggaggtgaggcggatactaggggcccctccacacatggtccccaccccacaccacaaaatcagaggcccttagggccccgggagtgcaacgaagacaccttaccttccaaggcaggctcagctcgtgagtccctcctggagcgccattggatttggccctttttcctctcctgtcagatacaaggcctgtttccagaatgtgcagtccccacctcccctctgcatgcagtacacacacccccacacacacaccgcccactgcagtacacacaccccgccccccaccagcacccactgccctgacaccgccctccccgctctgtcccagcaggagcacgcagacgcggctgtcagacctggtgtgttttcagagaggcatcccttgtgccatttcttgcggcatgtccttggaactagagctgcctcagtacagctctgaccagcatttcaaaagccccagacctcctggacccatagccagcagcccgctctagagacttttgtcccctcagtttattgaccccaggagagcaggactttctctgaaggccagctgtccacacacactaaggacaccctggccacagagcagcacagagggacacctgtggctgcyccctgtgccctacagcctgaggtctgagcaccgacgggataatctggcttcctgccaggttcctaacttgagcccctgtgtctccttccaggaacatgggtgaccttcggaggccagatcaccgatgaggtaagatggggctctcccagcaccccagaacccagcacgrgctcgccagagcacatggttaagtctgccgcgtggaccagtgagcacgtgctcccgggagccagcgcagcagcctccctccctctttctgttttgtgagggcgccctgccccaggggagagtagaaaggtgagccaggtggccatggccagaggggatgccgagtctggtgccatcacccagcagtggatgcctcgggcctcagcatgtcccttaagctccccaggactcagatttcccacacgcgtgacccccattccacagttaacgaggagaattcagggtgcacacgcttcccaaattctgaagccggatgcaggtcctagctgcccccatggaggctccagtaactgtctgtcttggtcattgggaatgcagcccctgcagtgtcacaagctgaagaacctgagatctgcatttcacccaacatccactgtccatttcccagctgccgcgaaccgtgcggatcgcagtcagatgtatttgctggggctcatgtccccacaattggaacaagaaagtgaacactaacaaaaagccagcttgtatgccgccagcgcctctgggtctctcggaaggacagggacggcacacgcccagacatgtgtgcttctggacagtgaggcagcatctcagaaatgagagcagtggcatttgctcagacagctctgggcatctgcacaagaagcagttttcacatttatcctacttagcactagaaaggttgcgtttaaaaattgatcagcgaattgatgtgagaccttgttagctgcgattgctcagtttccaagggaaagctttgcttctatcaaaatttaaatgcgtacagtttgtgtttgaggtcacttttatctttaagacactagctggccgggcgcggtgactcacacctgtaaccccagcactttggaaggctggggcgggcggatcacctgaggtcaggagttccagcctggccaacatggtgaaaccccatgtctactaaaaatacaaaaattagctgggcgtggtaggggcgcctgtaatcccagctactcaggaggctgaggcaggagaattgcttgaacccagaagggggaggttgcagtgagccgagatcatatcactgcactccagcctasgccgtagagtaagactctgtctcgaaaaaaaaaaaaaaagacaatagctggttatagaatgatttgccccttgctttgaagttgctggataggcgctatctcagggtgaagtctggagttattaaggcaaaaggaattgccttacctcagcccaccagattggttcagttggagccctggggcccatatggttcaatctgaatcagccttgcctgacttggcctcgtttccctttcgatgtggtttctaaaccaggatgggagaattctgtagaacggcataacttcatttccaaacaatattagctgggtggcctgtatgtccttgtgggaaagataaaaacaagcagacagactagacccatccaatgagatgacgttttcaccagcaaaccaggcatacccttagagcattaatgaatggcccagtggcagccccgctggcccaggcctctgcagtgtctccatcaggaacacagtgatggacatgtgtgaagatattggaggtcatttctagatgacaccaagctggaaggacagagaataaaatagatggcagtgtcagggttctgaatggttgtggcaggtgaaaatggcttagcaaaggagcaagacaaatttttgtattaatcctatagttagtgtcaaaaaagaaatcaatacatctagaagggggggcccgcctggctgcggttcagatgaaaagggtttgtgcacttcaggtgctgcggctcagtccgagccagcagggaagcaaggaccgtcctggactgctttttttgtttttcagttttttattacatatatgaaacataaaatttgccattttaaccatttttaagtctacagttcagtggcattaagtacattcacatactgtgccacccttaccaatatctgtttccaaaatatttcatcaccccaaacaggagctctgcacccttaaacaacaactccccatcccctggtcacctctagtctacttcctgtctctatgaactctgcacactgtttgtataaataaagttttattaggacatagccacgcccatcatttacacatagtggctgctttcactccacaagggcagagctgagtaattgcaacagagactctctggcccacagtgcctgaagcatttactatgtggccctttacagaaaagacttgacgtctcctgttctttgggccgcagcagctgtaccctgcactatctgcagggctgctgtgtgaactgctcagcccagttctatgccatgccagggacaaaatgaaagcttgcccaggggtggaacaaaccacctggtgaggcaggaatgacagccaccctcacatggcacagggcagagtccacagtttgtaggacaccatcacactctcagccagtgctcacaggagcccatgaagggatcaaactatgctaggaaccctaaaatgacgtaatgcctgtcggagccaccacggtggtttcaggtctccagccctcccattgttaggtgccctttctgtggcctcacactccccattagaagcatgtgttcaagacaagctggacaataaaaatttaatagatgtaatggttgagaacctaacacttattatctcacctaatcctctatcaacccagggaggcaggtgctattcccagttcagggaagctgagcctctggctataaacaggtgcaggggcctcacctggcctctggccacagggggttccacctggtgctctttgcctcaacgcttgcggccagtgctcagctgtggggtaaccgtactggggtagggacagattccttgtccccccagatgagggtgacagggaggtggcctgtatgtctcctgagcttccttctgacttcagtgtctgggacccagatactggaaggaaccaaaaagtcacaacataaaggctgcgtaaactgaaccaggatgcagccacagagcrgagggctttagaagtcatgttttaggtctaggggcggtggctcatgcccgtaatcccagcactttgggagattgaggcgggtggatcacaaggataggagttcgagaccagcctggccaatatggtgaaaccccatctctactaaaaatacaaaaaaattagcggggcgtggtggcaggcacctgtaatcccagctactcaggaggctgaggcaggagaattgcttgaatctgggaggcggaggttgcagtgagccatgatcgcaccactgcactccagcctggatgacagagcgacactccatctcaaaaaaaaaagaaaagcatgttttgaagaacagcatgggaaaggcccgtgacagccaatggaaaatgcagccagcatagacagcagtctgtggagtagagctgcagttttctagggaaagggcagaaaaacctggaagagaaagtacagcaaaatcakagccgtcaaaacataaataaataaaatagtgagaaagcagagccccacagtgccgtgagtcgctccctctctttcctgcctctggtcctgccaatcccaggcgccaccctggatgtagctggaattgtatggtggcttcgtttttgctgagggacaggtgaggttagggttggtgtctgcagtgccggaccctgctgatccggctgtctgcacgccttcgggggtctgtgatgaccacaggtttctgtgattggccgggctttcctcccaggagggagccaggtgtgttcagggccaccgtgctccggagcggagagcgccgagccctttgttcttagtctatgagcaggagtgggaggcctcccggtgggcagagcagagccaggagcatccggggccccgcctcaggcttgcggagcccctgcctagcgccagctccctgcctgcttccagcctcttcccagtcactgtctttctagagagggcgacagggtaaagaggcaggcaagacaccgtctccagtggtcgaacagcatgctgtggagagggtgcgagctgcctgtggctgctgtaacaaatagccaccaatgcgcggctgaaaacagcagcaacgtattctctcacagctctggggtccagagatccaaactcggtacccctgagcctaagtccaggagtcagccgggccgggcttccttctcccggccaggacctttcccggcctaagtccaggagtcagccgggccgggctcccttctccaggccaggacccttcccagcctcttcagcgtctggcgctgctggccttccttggcctgtgcccgcatcccccagtctctgcccctgtggatactctccgtcctcctcttctgtcagtcaagtctccgtctgtctcgtcctcataaggtcacctgtgatggcactgagggcccacttagctaagccaggacattctccccactgcagagtactcacgttaatcccatctgcaaagtccctctttctacctaaggtcacattcccaggttccagggacgtgatacctttggagaaccattatttagttgactgcagagaagaaagtagaaaaaggagggcaggggggcgggggtcctgacgacagggtggtcaggaagcagaagcgagcaaggamgccacgtggtggtccagagaaagagccttcgggggccaaggggacaaccaaggcacagccctaaggccgagtgttggggagaaggggatgcaggggatagagctgggggtcagggtgcagatctggtggagactttggctttgaccctctgcgagatggaagcccctggagggcttttgcatggaggaaatttgacctgatttaaaaggtctgccaaggctcgccctggctgctgcactgggaatggcgagtcatgaggatgtcccagagttcagcgtgtgcacgatcccatgtactcggaaggcacatcctgatgtggcagggctgtcgtggagcctgggaggccgcatttctgatctcatgctgatgctggcccatggaccacsctttgcctggggaaggtgcagggagagaggatggaagcagagagctaggaggctattgtgagaaaccacccaagagccgctggaggctcagagcagggtgggcaccrtggaggtggggagacgggtcagattctggactaatttgcaggggaagccgcggcaggggctgaacttcaggctccagtgatgggaggattagtcaaggagggctccccagggtttgacckgagcacaggtgagcgagacctcccgggagctgatgctgccgcaggctgccctccctggcccacaccagccccagggcctagagtgcccctcccccacccacyctctccttgcctgcctgacaaactcctaaacacccttcaaaacccagtctttgtcggccgcactttgggaggctgaggcgggcagatcacttgaggtcaggagttcgagaccagcctggccaacatggtgaaacctcatctctactaaaaatagaaaaatcagctgggcttggtggcatgcacctgtagtccagctactcaggagactgaagcaggagaatctcctgaagccaggaggcaaaggttgcagcgagccaagatygtgccactgcactcccgcctgggcaacagaatgagactccatctcccaaaaaaaaaaaaataaccccagtcttggatattctggacatgtgataccccttggatgaaccttgaaccttgaggacattacactcactgaaacaagccacaaaaaggacacacggtgtgactgcatttgtctaaggtgcctagagtagttaaattcataaataycagagaatgatgggtgctggggctggaggcagggagcggggaaggggagttactgttcaatgggtacagtttcagtttaggaatatgacagggagatggatggtggtgatggttacacaactatgcgaatgtacttactgccattgaactatgcttgaaaaaggttaaaatagtaaatttcatcatatatattttaccacaacttaaagtctctttgataaatgcagtaatgttttaattaaacaaaaagaatgaaagggatcttcatgagcaggtgtggattggtttytaggatgtattgtgagtgaaaaaatcaaagtgcagaaacatatgggtagtgtgccacccctcctggaagaaagatgggggataagaaaatacatgtgtctgaaatayaaaaacagaaaacggagccctgggtcccctcctctgagaagccctgccaggagcgtgagtgccctaaccacagacttagccccttcggggcccagcgcaccgtgccctcctgggctctctcctcctgggcctggatgtgggaggcatctgrgaaaagtcaggaggaagacgaggaggaagcagtgagcaggtgaacaagccacccgtctgtccgtgctggagccctggtgctgggaaggaaagtgctagaggtggggagagattcctgggctctccctgggtgggcacatccgggaggaggaggctgggggggcagcagcaggtccctcgggcggcggatgcatttgatgcatggatgcatttgatacctcagggcagttgagctgcagcaggaagacarcaacagagccccgrcaggtggatcctgaaaaccgacggcctccacccccgggcttcctgactcaaatcacagccgctcactaaccggggctcagcttcagctgtgctgtatttcagtgtctgagatgtttggggatgagtgccagygtcgccaggctgccggccagatttccatacaccccccacccacaaacatgctgcctttctggcttctcttgagaggttggcagatctctagcaccaggtccgccttcccacgtgcagcatttgggcatgggccttctcccatgggtgccccccagtggtggctactccgtcctcactctccatacctcctggccacaagggcttctgagttcagaaaggagagacgcagccctgtgaagccacccctggctggttttctgtcctrtggtttttgagggttattaagaattattcaccccacgctgggcttgttgctggtgaggcccagtgctctgagccgcacctggggaagcgtgacactcagagggaagcagccctgtycgagagccagaagctcaggggcacctttctctccggcctcttggagggagctgtcacttgcagaggggctcccctcgctccatgagtcccaccccacgaccagttctttgctcatggagcacaatcgcgtcctgacagcagccatggagcaaagtctgatgcacagcgcatttagctcgggcagtcattcatcsatcttgcccatgaggcagccaccaccacagcagtgccgctcagggccgggagtatgtgccgttrgagaaacactggacaagaggccagaatggatgtcacccaccatgcaccagctgtgggatgtcagttgctccatctacaaaaataacaattcagtcctcatgtgcaggtgctgggaaagattcaatgagrtacaactgaatacaccgccctggctttaaggacatagactcatcccagcaacrtccacagagcccctgctggggactgccttggtttcctaggactgctgtaacaaagtaacataacctgggggcctgaaacaacagacaccgttctgtcaccttctggaggccagaggtctgataccaaggtgttggcagggcmaggttccctgtaaaggctcgggggagggtccgccccatgcctctttcagctcctgggggttgccaacagtccttggcttgtagacgtgtcactctggtctctgccttcgtagtctcatggacttctgtgtctgcattttctctccttgtaaatcaccagtcacatagggtgtaggacccaccctaacacagtacgacctcatcttcgctaattacattgaagaaggccctattcccaaatgaggtcacctctaagcttctaagtagacatgaattctgtggggatactgttcgacccagtacaggtgctaagccctgtgatgaccccaactgatggggtccctgctctcaagaaattcacagtccttggcagtttcttcattccttttgccttctttattcttctcaatgggtttgttactgagagctgcctccatccctgtcctgtggcaggagagggcaaggagacagcccacaggggagcctgtcgggcccgggagggcagggcctggacacggggaggcctcccaggccgagagggtggtgctccagagcctctgggccccacccccggctggcaggacagtgtcggttttctcgtttcagatggcagagcagctcatgaccttggcctatgataatggcatcaacctcttcgayacagcagaagtctacgcagccggcaagtacgtgtcttttcacacgggaaaamgtggttcagaatgcctgggcagagccggagctacagggattcctgccgctcgcgttcccaagagtgctcacaaatgcaycttgcaccctgctttcatttttaaactctgaatggctttaggaggtgctattttcatggggctggaattgcagaacacttggacactgatcacttgctgaactccccgtggagccaccagggggaccacagtccctctggtgccaaagatgctgtgctgggtgagaggcgcratggagctgctgtcctgggctctcctgatgtgcctgacattttgacatttcatgtctcacttgtgcaactagggctgcagggcctcagagctggggagggcaggctccggccragtgctgtggggagcacttcccatcttggcggtgaactttcctgctcaattatgtaaaagctcagccttcttcagccaggctgttggcttcaattttaaagactggctgtaatcaaatcatccactctcctgcatcgggtttccagaagtcagcttttgtttgtgaaatcatttgttggccctctcttcatcctccttctgcccycctcctgcctggggccagccaagttcccgtcagccgggcaggctgcaggcctgggctgctgtgcaccatagctgcttggcccgcagctgcttcgtgggccctgggtggttacctgcaactgcagcggggcccagagcacccggcggcagggaacccaactgggccctgctcaagttcccacccagagcctggggagcgcacagccctgggggctgcygctgggaccctcaaaccgcctccagcccccatctgcagcccttttggccctccggatggcacagccccctcccactccctccatactggcagcagcttcccatcaaagtgaacygctttccagacagatgagcccagcggaggggtctgaggtcaaaaagcccagtgcagatgccaagccgagaggcacctcccgtcccgagccccccacctctycgctgcctgctttggcctgggttatgctgccctgaagaatgtgtgggaggcagctccgtgcagcctccgtggatgaggccgggcacaccccatgtcacagcagccacactccgtcctctgtcactcgcagtttccatgttcccctgtttaactggacacccagagctggtgagctgggcaagttccctgggtctccggcagcctcgggcctctcggaagccgcttgccagaagaccggggagtcagggagcagcttcccctcaggtcgccgtttctgtggaatcccctgccctctgctcctgggccggccactgcggtccctctgtccagctcagagctgagcccccggtggacgcccatcagtgccctcacaggggagctgggcgctgcgtgccggggataggcagggagaaactgctttggggagtttgggggaggctgagaggcagcttgcagggggccaaacccgtatcttcccgaggccccttgcttctcctgctgacactaatttgcacgcttctcagagagctgcaggatttctgtgtcccgcgaacagatgtgagtcctaccaaatcacagccagagccacaagccacaggcttagataactcactgtctgctgctcctctgccccagagatcgctgctagcttttctctcttcctcctcctttcctgatccccaaatcagggaccaaggaataaaaggaagaggcctagggctgagtgaattttctgtgtgtcttgaccataaatgaggagcattcagagcgcatgctaaacagcttgcaaatcagagcccattatttctgagtggatgactcaggcgcttttataattggaatgtagcacagagtatggatcattctccgtctgttgttttgctcagaaacattttgctacaagcagaaagttcttcaaagttaatccagtgctgcagtgccaggcaaggctgggacggccgcccatgcccccagctggcctgggtttggtgcaggacccagtgatgccaaacaggacagacagtggtccgcctagcatctgactctgccgttcagtgcaggaaatgagagggacacgtgcacccacacacatgcacacatgtatacacacacatatacacaagcatgcacagatctgctggaaatccagcccttgaccctgagtacatgttgattgtctctcaaaacagagcgtgacttgatgaataatttacctttgaaaaaagatacttgtcccggcgcggtggctcacgcctggaatcccagcactttgggaggccrmrgygggcggatcactcgagatgaggagttcgagaccagcctggccaacatrgtgaaaccccgtctctactaaaaatacaaaaattagccggrcgtggtggcaggtgcctgtagtcccagctacttgggaggctgaggcaggagaactgcttgaacccaggaggcagaggttgcagagagccgagatctcgccactacattccagcttgggtgatagagcgagactccatttcaaaaaaaaaaaaacaagatacttctctggaaattttgcccacctaatgttgccaggcattttccctggtgaattttcagctgactaggaaatgggatgctcgacagcagctccttccttctgtgtgagagctggggccgccactgcttaracacgtgtctgcaggggaacatgccacagccatcctagtggggggcaataacacagctgctcccactccctcgggccaaccctgtctgtggaatgagctactgagccaaggcgggtgttaacagcctggctctctggccccagtgacattttcacagagggaaccaagtggccagtggccacagtgggtctgggtttgatttttctgtttggctgtgatgagagctcggtgtcttgttttgcagggctgaagtrgtactgggaaacatcattaagaagaaaggatggaggtaacggccctgctctctgcggcctgtccctggggtgggtgcgggcgaactatcccrgggtcagcctcgtyrgcctgtcgtgcagtgtcgtaaggcccrcaagtccccacatctttcttgctgggaagtggagaggaaaattcagttctccaagaggaggaggtgactctgcttgagaaagaagttgaagggaggccgaatacactgtccacccccaccctagcctgcccactccgcctctgtcccaactcatccacagagacccagagcaccagggtccctgcttgcaaagtgtcaggccaaaaagagcttggcgtgagaacgggcctgggtacagcaaaggcgtgctgctacagaagatgtgggtgcaaagcrcttccacttctttggctggagcacttagggtcaggggagccagggggccagagaagggagtggctcagagagcttgggggcctggggttggatcccaccctgcaccttgtccacaggatcttcgcggcrtctcagcctctccggagctcactgttcccatctgtaagagggtgtgtgtgggaccgttccggcagggcyatcctgagggtcagtggccccaagtctgtaaatcacccacccagctcagggcgggacgtgtcacactcctctgggaagtggtcccctccagcacagaccggggagcggtccccgggtgtgatggagcccaaaggtcgcagatcgggggccatccacccttctctcccaggagcctatgggcccttcccaggccaaggtcctcacccaccttgggaccaactgggctgagcacttgcctacattttgaggctccccagacccctggacacagctttatctgaaggtgctgacaagccccggggccctgttccttaataaatgcgtctttattttcagaaacatcagaagcagttataaagttgggcctccctcctccctcccctcgaaatgccactcagaatcccagtgccaaggggagcccccgccccctcccccatggattcctgacaccccttcctcttgtcccatcaaatttgttttttggcaactctgatcccaaaacaaattcctcctcaccctgtaattaaacgaaattgcacgtattagcaaatcccctgatcacgtctttggcgaatgtgcatggaggtggtgtggggtgatcccccttcctggaggtgacgctgcctctgccagagctctgtggccgatgcttcggggcagaggaggcctcctactccagcctcgtgagctgcttccctgagcagcccgggacccgggtgggaaagaagctcagccatggggcaccaggaggtcattgtcaccccctgggtgggaagtactccctcctctgggaggggtcaaggtcaaacgtggctgggaggggccatcattatcccccatcccaccaggacaaagccactggtatgggcatttgtctcgtgtggacttagagcagaagaacgaattacttccctttgcgctgctcaagcccaaatcctcagaattctctgcctcagctactcaaacccagaaccccactggcctggccacacttgggctccctatgcctcccctccctcctttggtgccccccaagttaccccgaccaggccgtccttatgcctcccctccctcccttggtgcccctcaagttaccccgaccaggccgtcccacacagattttctgcaacacgtgtcacattctgtagggaacgttgcagagagcttccctgcctgcctcccacctacatctttccatcctcaactcctgccagatccccccagagcccgcccctgccccctggcccacaccsggcctcctccagccttggctcttgccacttcctctacctggatcaaatccatgcacccctcatagtccctgagccaggcccccctcccacatcctgggcggaaggcatctcctccrgactccggtcacactaggccccccactgtccaactcccactgcctgaytcacagttactgcctcggtggctgcctcctggctccatgaggmgcccacgcaccccggctgggcacgtggtacacatcatatgatggagaagtgcccatttcatgcccyaggctcctgggtgggagggctttcaggacctctgtgtgagagatgaggacgtcggggatgaaggaggaccccccaggggccgggcttatcacaccccttctttctcttctgttccacaggcggtccagcctcgtcatcaccaccaagatcttctggggcggaaagtaggtgcaacagctggcgatgcttccagccccggcccagcagccacggccccgtgctccccagagacccctgacctagaaggctcctggggtggcgggaggacagtcctccttgagaagggagagtggtcggggtctgtcctggacaggccccggcccagtgccatttcctgtccccagcaggggcagagctggtgtttctgcagccatcagctatgcctggtgcctgtccctgttaagggacgtcaaatccagaaaagaagctgtggccgagtttgccttttacaaaaacctcgcttaactttccttttwactcacatggattattttttcctggtcactatggtaacatcataaaaattatagagaaaacagaaaatttgtgaactgcccaaacccccaaagcactccaaattccctgggccgcctgtcacccctgcaggtctccaagtgtctagctccatagtttctgggctggacacacttgggctcataggaattataactacgattcattcattcattcttttttttatttttattttgtttttattttttatttttttgagacagggtctcgctttgtaatccaggttggagcgcagtgccacaatcacagctcactgtagcttcaaactcctgggctcgagcgagcctcccacctcagcctacagggatgagccaccatgcctgactaatttgtcctttttctctctctctcttttttttttttttttgagacagggtctcactttgtcacccaggctggagtacagtggcgtagtcccagctcactgcagcctcaacctcctgggttcaagtgaccttcctgcctcaagtagctggttctacaggcacatgccaccatgcccagctaatttttttatttttatttatatttttatttttgtattttgtagagatggggtttcatcatgttgtccagcctggtctcaaactcctgagttcaagtaatctgcccacctcagcttcccaaagcactaggattgcaggcgtgagccaccacgcctggcattaatttgtccttttttaagatatggggtctcactatgttgcccaggctggtcttgaactcctgggctcaagtgatcctcctgccttagcctcccaaagtgctgggattacaggcgtgagccactgtgcccagcctgatgtgttcttaatttaaaaaataataataataataataataataagtccaaatcaaacagacgggttaggttgaaaatcaaagccccccaccccctgctgctgcccccctcccctctgagccctgtgaccaggcctctccctgggcctctgggagttcagccctgtagcctcggstccctacccccaaagtggaatccgactccacacggcatttgctgaccctgtttttgcgtctaacattgcatcgtaaacgttttttgggaggggccagggtgccaaaaccgctggtgacatcacacgcggtyggcctgttttccagggcggagacggagcggggcctgtccaggaagcacataatcgaaggtgaggacgcrctcgggcacctcagggcccccatacctgtgggatcatcctcggaggccaaagtgatggcagcacagggcccgacccccccagttaacccactgagggcccaatcccggggcacccggtgctctggcctgaccttctccttccacccaggtagcacagcgggaccctgcagagaacgagggcagcccggtggctgagcacagaccacagaccagcctgggtttcaatccaggtttggccccacactggctgagtgggtcttcagcaggggcaccctgccccatgcctctgccacagtatctgtgcaatagggacagtaagagcgcacccggcgagggtggctgggatgccygcagcgcccaggagaaggtgccacacagccyggggctcagcactcgcaggcaccggagcaaggcaccggggtgtctggctcttgctgtatctttattgtcttcatgcctttcctgtccgtgttcattttcttcgaggtaatagatcattccattgaaaatcacctggcggggcaagccacccactcccatcctccccaccccaacccagcgtttcactctgccggctgtgtgtcctgagctgctctaagcaccagcgggtggcttgggcgttttagacactattgccattgtttttgtttttgagatggagttttgctcttgttgcccaggctggagtgcagcggcacgatcttggctcactgcaacccccacctcctgggttcaagcaattctcctgcctcagcctcctgagtagctgggattacaggtgcccaccaccacatctggttaattttttttgtatttttagtagacacagggtttcactatgttggccaggctggtctcaaactcctggccctcaagtgatgcgcccgccttggccccccagagtgctgggattacaggcatgggccaccacgcccgaccatagacactattgcctttgatgggacgggcagcaggtgtagccctccctccacatgtgatagataaagtcatctccctgttgtaatacacagtggcctcagaggagggtatattgtctgagggaggaggggcttccccttcatttagwcaaggacacgtggcctgtggtcccccgatgtcctcctgaagggaagatccccccactccctgtgggatgtgcccccacctctgccgtggcatttcacsacctccatcagcttctggaagcttccagatgccagaggcctcttctccatctcttgttccctgagccgggcatggatgggcccaggtgcctgtggagatggagccacagcagtgacgcccccccacctggtcctcccccaggtctgaaagcttccctggagcgactgcagctggagtacgtggatgtggtgtttgccaaccgcccggaccccaacaccccgatggaaggtaggtggtctgcggcggcgccaccggttaggcctgggcggggtctgaagggtctgaacctggggttgtagaggccgccagcatgggccctgctgggcaccygggtgagccgtgagaggaggccgggtccagggtggggggcgagggggcaggcctcccctcagtagggggtgaactcagcctctggctgcagacccctcgccaggtgcacctggcacctccaggctgagtccctgtcctggctttggacccaggccgatccgccctccgagtcagagccgcagtggaactgtcccctcccctctgcggctgctattttgcagctaagtgaagtcgcagtgtggggactccaactgcagtgttctctccaatcaccatccattgggaagcttggggggacttttttgctctgggggataaattactacatagaggagaagaagcgttcagcgctttgaaaatcggttttggttactttggcgttttttattctttctactcctgcgatctcagccccctccgctcccccatcctcctgctacaggcgtctttccatgtgtgctttgctgctgcagggacttgaaagttaaattgtgttccagttattgttttttatttgttcatatacagcacgcacgtgcgtgtgttgatatatttttttcctttttaactaaacgcgtgttctgcacggtgatttgtgcctccccgctgtgccttcgtcgtgccacgcctctcagtgctcccagctatcaactctggtctctttaaatctttcttctatcaccaggggacccatttagttcctccaagtcaaggacattcatcatagaaggtacacagtgcccccagcctgactattgacttctgtgtccaagctgcattttatgagacagtatttttatttacatgattcttttaccccatgagaaacttctccataaaatgcataaagaggggaaagagcaccctatgagaacaccttgcaagtgaaggaaaagcaaagtggtgttggagcccctcgcccccagccccccatcccctygttcctccttcctcccgtgcatggcccccacccctgggcttgcactgctgagctccgcggcggccgggggtcctcttgatctgaggatgctgtgatccccacctggagccttgaccctggatggtgccatgggaagggttggggaagaccaggtttccacaaggagcaaagccatcagggaccccaaaacacgcggccccccaccgagtcttagctcctccatggtttatgtttgctaagctcctgtctctcctggaggcagagatcacctggcttgtcacgctgccccgtccacagcacgctgctcctcggacggcatgctggctgcgtgtcccctctcaccaggttgccaaagcgctccatcaacgtggaatcattttcctcctgaaagaataaccacaggagccggcagccttctgaaaccagggggtggcctctggccacgcacagtctctctgccctccccacagctaacggccccaggaccccaccccaagggcaggtgtcgatctccctgggcctgggcccctgtctgccaactggtgctgccacctgaacccccatgtattatttgtgatgcggcaggagatgctgtgagttttggcagcagctagaaggattcagtcttcctacttccgttcaaccccattaaatattgaggtgaaggacagttgtccctaattgtccctgggtctggggccactgatatcacacttgggcacaagtgcagggtgctccctcatgtgggctccctgtccagcctgcttctgcccagatcctccagggagcccaggggcctttgcctaggactccccacctcaggacagccagaggctcctgccccgtcagccccgtctctccatcactgcatggaaggggcgccgcagggcagcatgcggtttcactggctgggaccttggagacctgagacagctgccggggagggagagtgagggaacggggctggccttgggggccttggcttccctctgtctggcatgtggacctaagccttggctgagaagaatcgggaactgatgctgcatgctcacaggtgccccgagagtgtttctaaaaaaccacaaggccgggcaggccaggagcccggacctgggcaggatgtagtcagagattctcctgggaccctctaggttctcctcaaactttcccaaccaggcacttcctgagggtctatcggagttggcagttaaagcaggtggcccagggaggtggcccagagagttcagactccctcccagatctccacccccaggaggggacagagaggattcccaggagctacaacctctgaccttggaagtaagcagagagcagggctgggcctgcaagcgtggaagccaagggtggtttgccaggggtcctgggtgagtctgccgagaccaccactccagaaaccccagtggcctcagctctagcctttaggaggccccaggttctgctcagggtggacctcagtaaaggggcactcagggagcgacccccaaaacagaagtggacgggaagccagcactgccactttgtggcctcgttgccattccaggggggagcctgcagaacaaacccagcatcttccatccttccttccttcccatcagccccactcccagcattttcaggacctcagcttccacgcagcatgggcaaaggacaagcaggcactgagggagagccagggcttttccagggtcaacgttgttgctgtctttagaaacacttgcactcccactcactcccacactgcctttggcggtcgaacttgcaagcactgtatccgacccgtgagaagcctagcgccatagtccctcgcyctgcaaagctcagaggcttctgaaatttgaaatttcgacgccaagttctgtttttaaaatcacaatatccccatgaggctgagagggagctataaccagcagattgctgtgtctcaaarccatgtttgaatattgggaagaatccactgtgtcgctggggcgagggtccctcctctcttctttaaaaggccagcgtgaagtctccgcgatttcatcctcagggccttaggagtctccgccgtccacgattcaggttgttcccagggctcatggagcctcaaaactgtcctactccaggccctggcccctcacaggaggagcacccagacccctgtggccctgggaccaccccttgccaggggacaggcgggttgggactctggcctggtgctgggctggtttgagaacctgggccatggtcttacaaggctttccacgcccacttctcagtctcctggacatgacaggaaacatgagctcagccccgaagccctattctccgggaccatatggcgccccaggtcctgccacatctccttatccagcccactctctgttccaattagactttggaatagcccgaagtaggagaccagaaacgcaaaaacacatgtccctcctgccgccaatctgactgtaacgttcatgcattcacctggtccttcctgagtgatcggggccctcgaatcttccccagaccagagaacctccagttctagagtccagagccacattctttgattgtcccctctaatctaccatagaaacatcacggtccatccataacccatttttcaacatttccataggcctgtaaccagtcggggaaattgttttcacgaccaacttctaggattgtggttcacttttctctttcatcccaaaaaacccctcccacacccaacttcagagccaggaagtacactgcttgcaagacatcttcgcagcccctgtccctcctcccagcgtcctgcctgtatttgcagaatgtcccraggctggccctgagcyctggctgccccccacctgcggtttccctttctctcacgacagagaccgtccgcgccatgacccacgtcatcaaccaggggatggccatgtactggggcacgtcacgctggagctccatggagatcatggtacggtggccgcgcagcatgtgtgtgtccaggcacagactcccggcaccggctgcgtatggagaccccaaagctctggcggggtctgtgcctttggtcccaactgcaccgatgcctgggtgctaagggagggacaggatggtggagtgtggtggttatgtctgtaggccttgcagacggggattctgcatggatcccagcgctgtgtggccctggacaaatggcttaacgtctctgagcttgtttccccacctgtagaacacatctgctaggtgagcccccatggggccattctaaggagtccctgagagagccagtgtgaagctcttagcagatgccctggagctcagcaagcactctggggtgacaacaccgtcagctgtttccactgggctcctgagacgtgcccggtgctgttagggtcaagggttccacagggaccctctcacatgcaatcctcaccggtgcctttaccaggtgagtgccgcaggcagcccatttttcagatgtggacactgtggcacagagaggttcagtaacatgccaaggtcacacagcttgggccaagattaacatccaggctgtgtggttcagagcctgggctgctcataactggaccctccggcctgggggtcccaccacccacctccttttcccagctcaccagggcctgcctggctcccagggaagctatgagtgtgagcagtggggagcccgggctgcagctgctgggccagcctgctccggggacaccttggtgccctctccatggctgccccggcagccycccgcctgctcacaggcaagggccctcggggtccctttctgccttcacaggaggcctactccgtggcccggcagttcaacctgaccccgcccatctgcgagcaggctgagtaccacatgttccagcgtgagaaagtggaggtgcagctgccggagctgttccacaagataggtgggcaccctcgggcccctcgccccgccccaccccacccctgctctcgggcccagggcttgactccacctgcttttcctcttcaggagtgggcgccatgacctggtcccctctggcctgtggcattgtttctggcaagtacgacagtggcatcccaccctactcaagagcctccttgaaggtgaaggaacagcctggtggggagggacgggcaggggataggcattttggacgggtgggacctttgggccgactgctttggtgctgggcaggggttccgggagctgcagctgttcccacctcggtctgctgggggcgggctccttggcgtgagaacatggagcccctcctggcctgatcccatgtgtagaggggctgcccagcctgtggcacaggcccaagtggagaggccctttcacatccccccccctgcccccaccacatccccccatctctaccccctaccacatcccccacctctgccccccaccacagcccagcattcagaactctgagacccctgggcctgggctccgagatgggggctgcaaagccacatggaggtgaccctgggagaggcgcccctccccaccacacaacctctgagtggggactcaggagggtccccagactgcaggatctggagaacaaggagcaggccaagaaagtctgcccagccagcagtctcagcactggggcccacagccctgggttccagggcaacgtggcctggcccccgactcctcccatcccatggcaaggtcagggcccccctccaggaggccctgcaatcctctgggggggatggccaggggagagagcactcccctagggccaggaggttcttctgggccacgggtggcagccgagaccccaggctgccaagtttcctaagagaaggaaggccagcacctcgcctccttgtcctgacttggggttgggccagcaccacagtctttgcacttcagagcctggacaggccccgctcatccaccagcccgtgcccggcccactgcccactctcccctacttgagaggcctggggcaggggcactgccctggcttcaagatgagaagagcccctatgagggagaagggtccagaaggaatgagcccatcggccccctgcacgtgggggtccaggtgacctgctctcatctgtagctgtgctgctcccctcccccgcaaccagggctaccagtggctgaaggacaagatcctcagtgaggagggccggcgccagcaagccaagctgaaggagctgcaggccatcgccgagcgcctgggctgcaccctgccccagctggccataggtaacggtggggtcgccatggggccagtgcccctggggagaacctgccccarctggccgtaggtaacagggtggggttgccatggggccagtgtctccrgggagagagggaagggatccctggacatcatcccccagccagcctcgggtaatcgggctctaaggggcatggttgggaccccatgcctctagggggatgtcaggagtccctgaggacctgggccaccccctccatctgccagccataggtaatggggctcccgctttcatgggaagaggatggggagcgctaagcacttgggccacctctccatcagggagcagcgggctcccccatgcctcctccagccacctcttagacaaagcccgtgcccagcactgcagggcttcctagaccccctcagayccccagaccaagatgctgggtctctcggcccagtcagaggcaaggcagacccatcaggggyycctgtggtgggtgyttctccctcaccttgggtctcgccgccacagcctggtgcctgaggaatgagggagtcagctccgtgctcctgggggcctccaatgcggaccagctcatggagaacattggggcaatacaggtaagagtgagaggccytgctgggcagagggcccatcccagcccgagccccgtccagtgcatcctcccaggctcgtcctgcgtgccaggctctgttctaggcactcaggatgygcccgtgaaccatcagagttgtgctcctggagagcttgctttccagcaggaacagacatgaacactaactgcacgaaacaaggaggttagaatgtgtgtcagggtggacgagcgctgtaggagagaagccagagataaagggagggagctggggccagggacggtggcgctgcagactcaggttcaagggggcctgtcaggtgggcttgttgagaaggtggtgcttgagcagtcttgagagatgcggagtaagtcacgcaaatgcctgcgggaagaaccttccaccagcaggaagagttgatgcaaaggcccaaaaaggcctggagcagaggggcagatcctgagaggcacgaaacacctccagggacttctgagtgagacgggagccgtggcaaaattgtgggcagaggagggcgagctgcagctcagcctggaaagggaggctgctctccggctgctccaycggggaggctttgggaagcaaaagtcgaagcagagagccctggtgggaagtggcagctgcgggtccgagacgggagtggtggttggatcctggatgtttgggaaggtggggcccccgggactggctgacaaactggatgtgggggtgagaaggcgaggtggaagtcggtccccgggtgtgtcacccggaagggtggcggtgctgtatgctgaggcaggcgcagctggaaaaagcagtcacggacatggaagtccagcatttggcctggagtttccattttatgtcactgctgccaccacccttcaggaaggttctagggcaccttgacatttgagagggagtgcacagacccaggcatgcttcctctctgccccaaaccttctgaaacacaaaagcagcgtggcctccatctgcctcagatggagcccagatgtgatggggcaacccgggcctggccagccgaccatctggaagagcctggccccacctcctccccaggccaggcccgtcttgttggtgggattctgatttgttgttgttcttgcacgcaggtccttccgaaactgtcrtcttccattatccacgagattgatagtattttgggcaataaaccctacagcaaaaaggactacagatcctaagccgcccccgcccrcctgctcggacagtttccgttccctcctagtctctgttcgctygcttaagctgttttgaagccaagtgaagagtgtggtttgcatccaagagaaaacaccacactgtgatgtcatcgggaaatgatctcccaagtcgctgccagacaccacccactgcttcgccggacaatgtcgaagtccagtctgtgccggggaaggcactggttaggaaggatgttcaaacggtcccacccaagcctgtcacctctgctcatcctccaagaccacccagctttctcccagccacagccaagattcccaaagtcaaggcccaaagatttccaaggttcccaaagtcaaggccagrccaaggcctggttgggtccttggggcgggcagggccrgcctctcctctgctgagaatccccacttggtgtagggggagaggggaaaggggtctggcccatcgaggggccccttctgccagggccttggttgctggggcagggcctccccactgggggtcttcctccacctcccactttccaagggctccaggaatctggggcctgaccacagattcctctcccatccttttctgctccaacctgccccactgggtcccggcaggggccatgcctaccaagctcgagctggcccttgacccccacccacccccacccttgctggcaggggcagggaccccagggggattgactctgcagtttgggagccacaaaaagcgtagcggtgtgatttctagctcagcctcccaccgtcttcctcctacacaccaatgatgagcctcatgccagtgaggcccggagcgcttgggaggggtcccagtggggcaggcccctctgtctggccacccctctgtcctggccccggaaggccctgtggtcatgtgctcctagctgcacggtggctgctggccacaccacggcaagtggcagcaggggccggccctgtgcacaaggatgcactcctctcggcccctgtagactttctctaaagccgcccgccagcccaggccgctgctctgcaccgagctggtgggcttgggttttgtggagcgcatgcttggaccctttcagtaaggaagggtctttggggttttctgtgcccatgacttgggggctgcacccccacagcacccccacaatgtaggaaaagacctcagggaacctctccctggaaagacgggcagggctggttagcccctcccactgcctgacacctgggacaggctgggcagaggggagagagggcaggacaggccagagtgacgcccccgtgcagcttgggccggagggcaagggatgccagtaagtctgcaggtgcggggtgccacctacaggcccaggcctgtgtcccaagcagtacccaggctttgcagaccacgcggggcagggctccactgaagccacccccacccctcgccagctagctccatagggaagcctgtgtctcctgcccccagggcrcaccctcagtgcaggcacctctgttcccgctttgcccctggaggagccactattccagaaggctccaccctgccgtcctgcgggagcctgctgtccagtcctggccgggccaaggcctgggaaactgtgaaagtcagaaaggccagcggggagaggctggggcgaggggaggagggggatcagcttctgctattaccgaccccccttcatgctgcccctggcgcctagaacccttgcccctcctcatagaccaagtcccgggggtctccactcagtcctgctgcctgcttcaccagaagcagccctgtgagtgtggggtggggaagtcccttcccaacggaggtcccagcctatggccctgggcccaggtgggggtcgcctgcttccttcccggacagggtcctgcagtggccaatggtgccagagggcaggtggcccaccctcgccgtcagggagggtggctggccccatccccactgccacccagccccacycactgttggaagagggaccagcgcgaggtggtgcccagggtgggcactgctgcttaatgcgaggcacacctggggcagctgagccccccgaaggctgcgggtttgccaaacacagagaggccaggccccagtgtcaggatgcagtcagcctctggcgcagctctttccacgacctggttcctggatgtcctgcttgctccacacccatctacagggaggatgtgagggggctctgcctcctagggccaggtcccccctctcrggaggrggtattgggtaggaccatccaagaaagggcagaagaccaagggcagtcggggtctagaaaggagggcgctggccctgctggrcgcttcggagcccccactgtttcccactcagctttgtgctcagatcccaggtcccaaggagtgacaggggcttcctcccaccttctgtccttgtccagtcatgtaaataatgtgctwtttctctccccgagtctttttttttwaacctaccgtggttcctcagctaactgcattccctacccaggcagagactgtcctatgcctcgagcttccaaacgagactcagaccgcgacacagccmccgtatttatggaatgacaaaataaataaagcccaaacccatcggtctctgtgactttttgctcctctcatttcctcagggtcagggctgggccagggtgacacgggaggggaggaaaaggctgccagcagcagggcctggggcatcccccaaaccggagcctgcagccaagggcaggtgggttggaaagggcccgtggagagagagcggggacagagaatggggacagggtggtcagaagacctgtcccccatctctcccaagcgattcagccaagggagggtgcgtgcctcccctgccgcccccaacacacacattctctttcaccaactctgagggcccaaagctgcttgctgggaggctgctgtccctctggggacctggctggctgctgttctcataaggacagaggtccaggcctggggaagctctcatggtatgtgtttggggtacaggtgagaggggcctcaccccagcacacccctgtttcgggctcccctccttcccagtgagcccctgcacccgtgaaatgaccatcccaggcaagagaaggcttccggacacgcccccaccccccaccactcctccctggccccagcccccacccccattctaaatcttgaatcttaaaaagaaaaagcctctgattaaatcctttcccaaaggatttattaaaacacagaaaaccaaaacatacacacagagtacaaagtaaaggtgattgtgttggctacagcctctgtccagcctcccgtgggcgaagaccagacaagccacggctcacaggggagcctggcttccaaagctggacccgcccccgccggggccaccctggctgggactcctggcgcgccctgcacccagcccagggccctccctttgccagcctggggctgtgcctggggaaaggggtcggccccctcttagctgggcctgggccggtggagtctgctccctccacacccctgaactcagaccccacgggccagtggggaccctcccttcctctccaggggtgcttgggctccaatcgctgcttgaggagttcaggacacacacacacacccaacgggccctttctgggttatcgcacctaaaaaaatactttgtttaaaaaaaaaatctgaaaattaaagaaaaaaaaaacacaacgccagtgagtttgggctgatgcaccacaacctgtaaactttcagacacagaaaacaggacaggaaccagctgccgaggccgaggcgggccttgcacagaagagacttgggggaggggccgaggccaggtcaccaagacggtgagggcagaggggcgtgccagcctcggcccccacccacgccctgtcccctgcccacagaccctgacgcacactggaggctccaagtgaccgacacttgaccaagtccatctggcttctggctcccatgtacccgagcccactctccactccacctccttgggcctcaagtgtcctgggatgacaggagtgagggctgcaggtgtcaccgggccaaggcttggtcagctcctgacctcggcaggggagcacccgggggactctgggaaggcagcccccaaaagcaggaggacttcaatcatagggggcagggaaagtccagcctgcccctgggggaagccaagtttgcaaaaaacgcaggagcttcggaaggtggctttcacgggggacgctgcttctgcctcaggcgtgtatgagagggccctgcagacgtgctcactccaccccgagtcacctgagcccatggggcaatgccttccaagaccttggctcaaacatggctctgcagaagccctactcagcactggcttaaagtggctggaaatttccaatcgcagactggcactttgggctcgcgttcatgcccgaggaccctgattctaccagcagcaaaaaccaaacccagcccaaagacgccaaacatacggacaccaccatcaccacttttggcagagatgactgacaaaccaagaaggacattctcagatcttttctcctctcccaaactggtcagccccaaacccgctctgactctagtagcccacccctcccgggccccggggtgctggccacggacagcaccaccccttctggaccaggcagtgcagggggcccaggcccaaaggagccctggccaggctttcctgggtgcccgagtctaaccaggcagaggagaagggagccctggcgaggcctgggagggaagcagagaggaagggacagagcaagcctgcctgagaggaaggcgcacaggggagggaccatcagcccttggggtggagacacagacccctgccctgaccgccacaggcctccagtcctgctgctcgggacctatctgctgtgggccaaggaaggtgggcactgctcccaacgagggccaaccccagtgcttgccactgcttgtttggggacgagggcacgggagtgagcttctgacccgagccaggaccctttgccaggaggcaccgcagagcacacaacacgcatgtggatgaaccataacatgtgagcccgctgacaatcatctccactccagggtgctccccactacgcccacgtgcagtgtcagggtcgggctggccttgcagacctggatccagactggagtgtgggaatgcgccaagaggaaggacttgtaggtcccgccctccggggttcagagacagcctcattatgagtgaggcatatagggcttagggagggccaggcaattgctccagtgtctgcaacacaagctggtgaatcctgacccagccctggccccctcagtcccaggcaggccctctccaaggagctgagccccagcccgtgtgcacctccaccccaggcccagctgggtttttcacgcagccctttcctaacattcccaggattctgcaccccaaggcaccttccctgggaaggtcccagtacaagactcagaaacgccttccaggtcgacctggggccaggagaaggatcacacacaaacaggcctagggagggcctgacctgctccccatctccgtccccaacttggaggggcagggtccgggggagtgggtgggattccaacaacccacatgtgggaagatggttttgggatgtcagggcgctcctggcaggaaacaaggcagcaagcccttggtgctgcggctgggaggggtctgcagagggcactgggtccagtccccctccaggcagaactctccccacgccttccaagagtgcagcctcaggcaaaaagcccccgggaaggcctttccagggacaggggaatgggacaagtccaggcccccaggggcagcccggttccacctccggaggtgggcagggtaggcatcccagggcacagggcagggggccagggtctcctgggccagctcagggcccatgaccctccttgctggggcgcagctatcactgcccttaaccacacctctggcagaaggcaaacccaacgcagcagtggctccgaggcaagtgctgccccccccccagcccaccctccctgggatcatacgcttctgcctgctgtgaagagccggggccacaggccccccactggtaacagagtccagggccttcaagatgcgctgggccggggacagacacctgctggcagaggatccacctccccacaaggagagagcaaacacctggcggcctccagccttggcaggaaggaggggaaatgtcagccagggtctcaccatagggctggacagcggctccccaaacctgccctgtctggtgctgggaggctccaagcgggcagggggccaaatcagaaggggctgtcacacaggtgcagacaggtcaggtaggggacactgagggctcctagggcaccgggcgccatgtcctccccagctgggctgagtccacagggcagtgccaggactaccttgggtctggaacccatcggtaaagagacatcagtgctgcaggttcgaatcttccatacgtcatccaacttttatcaagacaaacgtgttcaagtcttcaataggaaagtgcaaaagatgtacaaataaatgaaatctcttctaagaagtcgtctggaaaaggtggcgagggggcacgtccggcgtggttgtgggggcaacgctgtgtggaagaacacttgaattatgatgaggtggcacttctgggctctggcccagctgagctgggcctcgtcctccatgtgatggcattactaggtttccctttttgtcccaaggtggcgctggctcctaaaaaggtggcagcttttctctcccatgtgggtcgggcaggtggcccggcaggcgtggctgcaaaacgcaaatcagtgggttaagcaggtgggcagttatagggggcatcagggtggcacccaacagcctgtagctgcttctccacctatcacaaccaactatgatcggggtgccccccagccatgacctcccagccacaggctgccgggccaggccatgagctacacccagagtgccgagagcacccaggaagcagcagtgggcaggggcagccagccaggaagcccctctggagcctcctccagcaagacacggttcccacagggacagacacagcgtagtggaggctggtggccccagagaagaccagaatgaactggcagtttctctgaaataagccccctctcctggccaatagcccccacaaaaccctcagccaccctcctggtcctgggcaggaagtgagggtgtaagacaagatgtgatgtctgccaccagcaggacagcaggggcaggacagggctccaggcgggggcagcagtctctgacttccgctgggaacatgtgtgcaaatgagaacacatgtgcacacacaggagctcacccaagtccaccgaccccttcatgtcctgccaccccagcctcccagtggacagacacgctggccacaaggtggtcccagggccaagggggcaaggtagaggggctccaggcaggtgggtggctctcaaagccgccggaggcagtaaaagctccaggacttagggacgggagtcaagtgcaggggcagggctgactgtggccaggcctggtttgccagcaatggggtggcggggaggaacacagcacccagcagccctcacctcagctggaaatgagcgctgcaacacagggaagtctcgaggacggctagatatctgtcaaaaaaagaggagagccgggcttgcctgacgttggcagcagcaggcaggccgggcccggcgggcacccgtgtgcatgctgcccggagcggacgggcacctaccggtcacatagggccccaggggcatctggttgtagttgacaatccctcccggtccagggccccggaagttgggcccaaagttgttgctgtacatctgggaggagccgaaagcgccctggaggcaaggactcagcttcacaggtggtctcaggccccccacccagcctccacccaggggcacgccagggggctcgggccggggcacacaggccgagcctgacctgctggatggtggggtccccggcgcggttggtcaggcggctcaggatgctgcgctccgacatctgcagccgggcggccaccggggggatgcgggacagcatggatggcagccgggtcacgtcggccttcatgtcgctcagcagctcctccagctggttcaggactgtggtgggaggcggagggatggtaggatgcagggatggaggggtggagggatggaggagtggaaggatggagggatggaggggtggaggggtggaggggtggagcagtggaaggatggagggatggaaggatggagggatggaggggtggaggggtggagggatggaggagaggaggggtggaggggtggaaggatggaggggtggaaggatggagggatgatggagggatgatggagggataatggagggaagatggagggatggaggaatgatggagcgatggaaggatgatggaggggtggaaggacggacgaatggaggggtggaaggacggagggatggagggataatgtagggataatggagcgaagatggagggatggagggaaggtggagggatgggggaagay

SEQ ID NO: 97725 - DNA, 32860 bp, Homo sapiens
gctgtccacaaccaagcggactgatgtgggggtgggtctggcaaccaatcagaccaattgcaagccacctcttcatttacatgaggtgagcatggaatggccaatgggaaacttctagggggtatttggacccaagaagattcggtaaagcagcgggggtcgggggggagtgctgctagggcagctcccacactgtggagtgtacttttgttttcaataaatccctgcttttgttcttttgttgcttcattctttctttgcttggagttttgtccaattctttgttcaaaacgccaagaacctggacagcttgcaatcatgactctactggtgacactgggatggtggtgtgccccttcccccataccttgccctattcatctcttcctactggctgttcactgatcttttgtagtatcctttataataaacccgtaaatgtacttccctgagtcctgtaagtcactctagcaagttaactgaaccaaggagggagtaacgggaaccctgatttacagtcagtcaggagtgtataggtgacaacctactacttgtgattaccatctgaggttgggggcagccttgcgggactgagccattaacctgtgggatctgactaacttcaggtacatatgtgtcagaattgaattatgggacattcagttcatgcctgctggaaaactgcttggtatggaaaaacccccacacatctggtagcataaaaaaaagagtgtgttttcaagtcccacacagaaaagacaggtatatattcccagcaagaatttatcagttttgcaggaataaggcatacataatgatatacacagtaacagattaaatgcaaagtccgggaaaattttaaactagaatttttaagattagggcagggaagaattgaagtgtattaaaaagaacaatgaattaggaggccgaggtccttctgtgtcttgtgctactgtgttgttaatttggcacatcacttattttcagtaaggtacaatttcttcacctggaatgtgggactcctctacattatttgtaaggttgcttgcagttaagtgctgaaattactgaatcattttgaggatatgaaagcatactccttcgcggtggctcaagcctgtaatcccagcactttgggaggccgaggcaggcggatcacttgaggtctggcgttccagaccagcagggccaacatggtgaaaccccgtctctactaaaagtacaaaaattagacgggagtggtggcgggcgcctgtaatcccagctactcaggcggctgaggcaggagaatcttttgaacgtgggaggcggaggttgcagtgagcggagatcacgccactgcattccagcctgggcaacaagagtgaaactccgtctcaaaaaaataaataaataaataaaagcatactcttcattcacattattgtatgttaagtataaattcatttttataactagcctaaatatgacctcctgttttctaagagtatattggccgggcgcggtagctcacgcctgtaatccctgcactttgggaggccaagccaggcggatcacaaggtcaggagtttgagaccatcctggccaatatggtgaaaccccgtctctactaaaaatacaaaaaaattagcccggtgtggtagcgggtgcctgcagtcccagctactcgggaggctgaggcgggagaatggcgtgaacacgggaggcagagcttgcagtgagcccagatcgcaccactgcaagatcattccagcctgggcgacagagtgagactctgtctcaaaaaaaaaaaaaaaaaagctgggcctggcggtgcgcgcctgtaatccccagctactcaggaggcttaggcaggagaactgtttgaaccgggacccgaggcagaggctgcggtgggctgagacagcgccactgcactccagcctggggcaacaagagtgaaactctgtgtcaaaaaaaaaaaaaaacaaaaaaaccatgagtatattcttgggccaggtgcagtggctcacacctgtaatcccaacactttcggaggacaaggcgggaggatcttgaggccaagagttcgagaccagcctggagaaaaaacccatcgctacaaaaaaaaaaaaaaagaaaaattagcccggcatggtcccagctactccagaggctgaggtgaaaggatggcttgagcatgggagttcgagactgcagtgaaccgagatcacaccactgcactacattttgcaacagtgatagtcacaaacaaagtctctactcttaaaacaaatgtaattgtcaagcatcaataccacaagagagccctccaaacaaaaatgtgaacctaggccgggcgcggtggctcatacctgcaatttcagcactttgggaggccgagtcgggcggatcacaaggtcaggagatcgagaccaccctggccaaaatggtgaaacccgtctcccctaaaaacacaaaaattagctgggcgtggtggtgcgcgcctgtagttccagctactcaggaggctgaggcaggagaatcgcttgaacccggaaggcggaggttgcagtgagccgagatcgcgccacattgcactccagcctggcgacagagcaagactccgtctcaaaaaaaaaaaaaaaaaaaaagtgaacctccaatgaagatattcaatagaataaatattcggaataaattgaatggtctcctaaaaatagggctttatttttcccaactactttaaaggtatttttaactagcgatgttagattttctttcttaatcctactaaagtatagctgagtatcttcgtcttgttaatttagcctccagaaaattctaatttagtagtctgcaatgccgtaaaatgttaaactagcaacagatgaaaaaaaatccgagtagaaacagcaggcagggatctaaggtggagtaaaaatagccacaaattagaaaccaggagaaaaggtatatagtattttactttcaatattaattttcctccaaaggtcaagatttctgattaagagttctcagattaagatgagctagctttgagacactttgttgtgcgggtcatagctttgtccaaaaacaaacaaaaaactttgggaaacttttcgaaggcgcgcttccaaacttcaggcgccgagtctatttcacatgtggggccatgtgtcccacaagtgaatcgtttacaccacagatattcctcaaaaggagactaaaccaacttcgctctcttgttactttgacaataaaagaggaaccttactccaggtcagtcctggatgccaagcctagggactaagggattgcttttcctcttctcaaatgtaagtacaccagacgctgcccctccgcggggtctggagaggacgagcaactcagtggggattggagccgaccgctcggcttcagaggtcccgggacgcccttaggaggcagggcgcccgtacaggtggcggctaagacggttggggactggggtcgcccctcggccggagccacagggagaggcctgtgcgtggcagccacgggagcgactcacctcggcgtcttccttgcactgtggaagggaagggaactccagcttcacgtcctccatggtgctggcccgcgggctggtgggtggggtgggagagtgttacacagccggccgaccctcgggctggctgcggcggcggaaggaaggagggccggcggagcggagggctgacaggagggcggcgggattacaactaacacacgcagactagagggtcccagtgactccagcagcggcggcggcgaagacagggaagaggagggtcgggcgtcttacacccggccgccatgccgctgccgtctccctcccccagagtctccgtacccctcaggccgcccaggatccagcacaggaaccagcccgacaaccgtctccccgcctccttcccgccccctccacccgcgtcgcctcagccaatcccagcccacgctcgccttctgcccgccctccgccgccgccaggtgtcagcgcgccaccgccctgctccgccccttcgctagagcgcagacgctggggggtggggggggcggagcctcggatgctgctaggccacagctcacccggcgtggaggaggcggggctgcggtgggacaggacgagtgaaggtcctgggaaaggcagtggggcggtccgagccagctccgccctttccagacaggacgtagagcccttctttaacataagaacaaacaggcaaaacaggctacccaccagtggcatccgaaaggaaagctatagtttctcccctctcaaaattctgcgcaatctatgctgagtttataaccaaatgactaataaatgaagagttcaatttaaaatcacgtggtgccatacagaaaataaaatacccatcacctttaagcaaagaattaaacggctcaatttaaaattttttaaagtatttgaagagtacttgaaaatacaactcagtttagattacctagaaaatatcaagaatggcaactagaaaaaaatcagaaaaaggaactgatagctgactcagtaaattgtatataatactgtaaaatttcttccattattatattttgaaataaaaataataaaccagatggctttcaatatcttttaaaaggagtttgccagcctgagcaaaatagtaagacccccctctctaaaaaacaattttaaaattccctgggtgtggtggcgttatgcctgtaaacccatggtgaaaagatttgggccgggcgcggaggctcacgcctgtaatcccagcactttgggcggctgaggcgtgtggatcacctgaggtcgggagtttgagaccagcctgaccaacatggagaaaccccgtctctactaaaaatacaaaaattagctgggtgtggtggcgcatgccagtaatcgcagctacttagaaggctgaggcaggagaaccgcttaaatccgggaggcggaggttgcaatgagctgagatagtgcaatggcactacagcctgggcaacaagagcgaaactccatctcaaaaaaaatcaaaaataaaaaaagaaagaaaggatttgtacaccaaattgattctttaaaaaaccaccgccagcacaaaggtaaaaggcaagatagtcactccttaactaaatgcaaattataagtgaaaagatcacatagatatttgacttaaacctccccctacattctactttttgtcacataaaatgcactgccaacacatagaaatagaactgtacaataatttgagtatgagatggctaacttgaccactccattttctattttaactgttcatcttctaaaattataaaaaggcacataatatcctgctaggaagtttttaatttgaagaattattgtataattagctaggtcatgtatttttggttctttagtgtttatgaaactgaagttgtcttttcttttcaccagcatctttaataattattgatgcccaatgatgattcctttgtgtactttgttatagcttttattgccagatgatataagaatcatgtataggtaacagaaatcatgttttgaacatttctgacactcctacatcccctacatcatacactcttagccaggtatccatacatacctaaagagtccttggatgagcttgggaaacaataaatttcctgaaattatagtatacgcaaaattgtatgttagaatttttcctggaagagggtccagaccttcacatcctcaacagggacctatcgtcttacataaaccaagaaaacccagtcacatattagcaaatattacgttgaatcatactctttaaaaagttatggatgtgcatgtatattttcaattaaccaacaatgagcttaatcacagtagatgaagaatatgtaaacactttctgaaaggaggagtacagacatacccacacatccatgttttatttaagaagatgatcttatgaacattaagtatgtgtactattttaaaataatattcaaaaatccacaatccatctgggttatcaaatagtttacttgctaaagaacctaaaggaccacagtaaatatactcagaaaagacaagaatatatatgtaggagaactgaatcaaacagattttattcaactttttagatgaggaaaacaaatgatacaaaataagtcataagaaatgctttcttataccactatctcaaaccactttcaatattttacaaaatgctcacgcagcaaatatgaaaagcttcaacactttccctttgtaacttgctgcaataaatgcaactttaacaaacatacaaatttcttctgtatcttaaaagttgaaytactaatttttatgatgttactcatatttttattcatatacttttaatgacatcattrccaatacatacattattttctttaactttatttttacaataagccaacatctgtcatgcagccatcaaaaatcttacagtaaattacacaggtttgtagtccaatttagactccagcttcttagaatcagccacttttctgactgctttcatgaagtcttcctgtactacaaaatcatgatcagcacgaattgcgaacatacctgtagagaataaaacaacatgactgctatatatcacatatgaattatatgttcattataagaaaaacaatataattctatggaataaatgtgaagcttagatttattacttctgagccagtagttgtaatttgctaaaaaccactatcttttttcaattaaaatccacaggccgggtgcggtggctcacgcctgtaatcccaacactttaggaggccaagatgggcagattgcaatgtcaagagattaagaccatcctggccaacacggtgaaaccccatctctactaaaaatacaaaaaaaaaaaaaaattagctgggcatggtggcgcgcgcctgtagtcccagctactcgggaggctaaggcaggagaatggcttgaacccaggaggcggaggttgcagtgagctgagatagtggcactgcactccagcctggcaacagagcgagaccccatctcaaaaaaaaaaaaaaaaaaaaaatccatagcggtgttgtgattatgttctaaaacaaaaacaggtatgaccattatatgaatatttaacatccggttcaaggctgggcacggtggctcacacctgtaatcccaacactttgggaggccaaggtggacggattacctggggtcgggagttcgagaccagcctagccaacatggtaaaaccccgtttctactaaaaacacaaaaattagctgggcgtagtagtgggcatctgtaaccccagctacttgggaggctgaggcaggagaatcgcttgaacccgggaggcagaggttgcagtgagccaagatcgcaccactgcactccagtctgggtgacagagtgaggctctgtctcaaaaaaataaaataaaataaaatcaggcttaaatggtccctgtatctgattgtagctcttaataaaaacaagcataaaaaaccgaagcaatcaaaactaccaacacatacacattttaagcgtaacttaacttgacaggaagcaatttgctggaaggcacacatttatgggggaaaaaaaatcttgagtaagtttgatagccattctttgttaataatcaaaaacgttgagaatagggaatcatatagaaagccaacagcgggttttagcaaaactcggagtcattattcatgtgttaaaatttacctaatttatgtacaaattggtatttttatttgattcatatttgagtatcacaactcaattttttccttcaactttttgacaagtaccttctcaaacagtatttgacaaaggggtaaaagtttccttgtatgcagttttttaaacattagttgtgttatggatatgggtcccagattttgagataatcctaactcatgataaactaaagcaggtaagtttattgctatctactaattaaatgaattctaaaatttccactgaggatctgcctgtattgaattttcacttacataaaatgagggagttaatatagaagatttcaaggattacttcctttctagatttctacataaggaaacaatctatgttgtcctagaaaccgggtgaatggaaatgactgatttttaaaaaataacaaagtttcaaaacttgtttagaaagctacagtgaaactaggtaagttatttttgtaaaccttgcacacatggctattttccaaatcactttagtgaataagtaaatctgcacaagagatgcctggccaggcctggtagcttgtgcctgtaatcccagcattttgggaggcccaggtgggtggattactygggcccaggaatttgagaccagcctggacaacatggtgaaacccgtctctacaaaaaatacaaaaattagctgggtgtggtggcgcacgcctatagtcccagctactggragataaaggagaaatgatcaggtctgggctacagggagcagtgatcatgccactgcactccagcctgggccagagtgagactccgtctcaaaagaaaaaataaaatagagatgtattataatccaaaagagataatgtcaggacctgaacaggaagggcaactgtagttgaatcaagtgtattttaacttacgaaaaatgttaacaaaaaagccttcaagtctaaaaagaagataaaaatttcagtatgtttccagatgtgaatgtcccacctagttaaaaaagaactacaattttaatccacacagaagttatagctcatttgcaataactaaaggtaaatttgtaagaatatgtaaggaaaaaaagcgtatattttgatagcaacagcctttaggttcactgcacagcttgcatttggattacaatctaaccaaagcaatcttctgataataatttggtctggtttacattttggaaagagaatgtcataaattactctaacttgttcaagctatatgacagtttacctctaaatagtttagtttattgataacgctctgtgagcatgatttaccctaatttgcattgacagcatttctagacgtgaacagaagtatctgacctgcatatctgatgcagatactgactcacagcatacccaatacccatgaagatacctgtactgagaagccctccctgagcagccaytttaaacactgtgttgaatttactaaggctaaacatgatatgaaaagcaagaggaaatcacatattctaatacttaagaaaatctataacctataaagtcagtaactatactgtagaagtttattttttctatttaaagattctgtatggaagacaaaaactaaatgattctaggtagggtattaaagctacttggtactggaaataaaaatagcatcacacaatttttacataccatgtagaagtgaaaaaaatagtatcacacaatccacagagaattatatttaaatactacattttacacaaatggcatgatcacataattcataaatcaatctttcaaaacactgctcacagactagtattagacaacatacacaattcattttgcagcagatacctctggtgctggcccattctaattccagccacaggtgtggtaggcaattctgtagcacctcagacttactttagggggccagtgttctattacatgcctctccttccacattctgccctaaggcaggtagaagtgcaaaggagtcaacactaccaaggacaaatctcatccaatgggggatgagtactggtaaatcaatgttctagtctcccaactttcagctgggtgatcctggaaggcattctgtatgcttctctgagatctaacctccctttcctacagcacctacctcaatggtgcaccctcatattagctttccctctttccatctcacttgccctgcttctcctatttcctggaatcgattcctaaaagaacagcatgaacccaaatccttgcaaagtctatgctccgctttcagataaactcaaaacagtttcagcaaattttaaaaatcaaaatcaatagtaaaactgtactttaaacccttacctgcttcagtacaaacatttctcagatctgctccattaaagccatccgaaagcttcacaattgcttcataatctgtttagaaaaaatactggaaattagttttaaaaattagacctttacttgatttatgcccacatcgaaaatttaaactgaagagcttactttgagtttgatcagctagacatcagctctgttaactttccacaatattaatatccaaaaactaagacttctgttaaataaaccagcaccaagaagaattagacacacccctgaaactttaaaaacaggaaatatcaccaaaatctcaaaatatcttaatctatttttatacagtgaaatagctatgcacatgtgaactccagatacctgttaagctgtgactcttatcaaaactgtaatcaaatcttggatttgaataaacctataacactcaaaaccaattataacaatggaatttactttgtttactttaatcatacaagccaaatataaagtatagcaaaactgaaatgtaatcatacataattgtatcacatggaatttttaaatgctacagcatgcattagctagcttctctggtttctgtgcaagattcaagtggtgaagtatcagatctatggtagcagtaataaagtgagttctccatccacccacataacagacatgaatcaaagagctataggattggggtagcaacaatggatctgatacagaataggaagagaagtaagacagcacaggctactacagtttgaataactttgatgatgcaccgtttggtcaggcaatatagggcatgtcgttctctatttgaaatcacacatatattcatgaattgtctttaatcaggtttaagttcattgtaagcttcctgagagcaagaattcccaaggctagcacagtatctggcatctagcaagagctcagtatttgtggaagaaacctatacattgacatcctttgttcagttcggtctttccagctcaaaactctctaacaggggcaatgaagatagtgaaaktcaacaatcagctatttgtcattattctggaccattaacttctaaagagtttttaaggctgcctggaaattatactagatttccctagtctggaggtcagcaaactttttatgtaaagggccagagagtaaatactgtatgctttgcaagccatatggtttctgttgtaactattcaactcagctattccagtaggaaagcagccatagacaacagataaatgascatgcttgggttacaacaaaactttgtgtgtttccaaaaacacagggcaggcagaatttggttcacaagccatgttttactggcctgcaccctagtccaatccctcacttccatagataatgactttataccttctcctttgtcctcaaatctctaagaacacttccctatcttcattctgaacgtgcattctacttcactgagaaaacagaagcattcagaaaaaaacacttccacaagttcctgcactatctaagaacctgtcatcataagcatctatgtactctgcctttcctccagtctcataaaagtacacatatatatagggccaatccctcttcaaggaaagaacattgccaatttctctttctcctaggtcattcccagtagcattattaaaaaaaaaaaaaaaagggcaggggggtcataaactcttccatcttatagaaaactctgccaactcctcatcggcattccccttctacttcttctgccccctctgtagaactcttaaaagaaatgtctaaactcaatgcctctcctcccaatctctctgaaacccatctgaaataggctttcacctccaccactcccaagaagctacttttgacaagattaccaatgacctccatatagttaaatccaaaggtctactctgagaactctttatctgacctattgtcagcatttaacaggaatcaatttaaaaaacaaacaaacaaacaaccaggccgggtgcagtggcacacgcctgttatcccagaactttgggtggccgaggtgggcagattgcttgagcccagtagttcaagatcagcctgggcaacatggtgaaaccccatccctacaaaaaaacaagccagggttggtggtgtgtgcctgtagtcccagctaatcaggaggctgaggtgtgaggatcatttgaacttgggaggcagaagttgcagtgagctgggatcacaccattgcactccagcctgggcaagagtgagaccctgtctctaaaaaataaattaccttcttggtaaggccttccctgtgctaatcctccctgtcatttaaaaacatatcctcatgcctggtcctggcacttccctaatttcctatcccccttttctttttttttcccctgaaacagcgtcttgccaaactggagtgcagtcacatgatcatagctccctgcaacctcaaactcctggcctcaagcggtccttctgcctcggcctccaaaaccattaggattacaggagtgagccaccatgcccgccccccactttcttgctttatttttctccatagcacttatcatcatctattatactttgttttactaactttatctgttttttcctaacaagaatataagttctctaatggcagaaatttgtctgttttgttccttgctatattgtcagcccttacaaaacacttacaatggttcctagcttatagtagatgctcaataactatttgctgaatttaaaaccaccacatttgctgaatttaaaaccagatttaggaaactatcagtaatttctaaaagtatttttcttcatttaccaaatgtaaatacatataaaatagatgacttccttacctatttcaccatgctttgtaatgggacctgcatggattttcagtatgtctaatcttgcttgttcatttggcaaatcaatatctgaaaataaaaaattattttatagtccagttttatcttttttaaaatacagtggaaggtgaagtgaagtatggaaaaagaaatgggcacaaagggaaatggacagtaggtaaagaatcttaactcacgtatttttctatctaatcttcctggacgcascaaagcaggatccagtgtatctggtctgtttgtagccatgatcattttaactctatgcagagtatcaaatccatccatttgattcagtaactaagaatattaagaatcagattttacaaaaattctaaccattaaaaaaaatagcacacaccttttatatgtctaatgccatgaaatgtattgtctacagatagatatgttctatcttcagaatggtcatttgatagaattctttttctctctcttatataaagggatatactttctagcctcaaagttctaagctagattatgtaccttttaatagctatgtatctttctatagctaccaggtagttttaataaatctgaaggcttccatcatgtcaagaattatgaaattaaactatgtggatctaatttccaatgtccaaaatttcatcaattattttttaaaggaaaagctaataataaaatccaatatataaagtgcttatgatatgtcagacataacatttatattaggataaatggatacaaagatttttctacaaatttgataataaactgataattttttttttttttttttttttttttttttgagacagagtttcactctgtcacccaggctggagtactgtggcctgatcatcgctcactgcaaccttcacctcctgggctcgaccagtcctcccacctcaacctcctgagtagctgggactgcttttttttttttttttttttttggagacagactctcgctctgtcacccaggctggagtgcaatggggcgatctcagcccactgcaacctcacctcctgggttcaagcaattctcctgcctcagcctcctgagtaactgggattacaggcacacgccaccacgcccagctaatttttgtatctttactagagatggtgtttcgctacgttggtcaggctggtctcaatgctcagacctcatgatctgcccagctgggcctcccaaagtgctgggattacaggcagaagccaccatgcctggcctattttttcaaataattctactgtacacagaaatactaaaagacataaaaaatattgtcctcaatttctaaagttttcttgaataaatgaaaaaccttactgcatttaacaaactctctaaaatatagctagtctgacaatgtgttagttgatgatatattagttacttgaataaaatgagtatttgtgttatttaaaaatatctcaatttaaggtttctaagagattttataatttccaaatgctatgttatcttctgagcggatctgtataatttatgaaaaaagatttttcaaatacttctaaggagaaagaatttgacactgcattacccatgctacctagtttctatttgaagtggaaaatgtatttggactcttgatatcactttcacagaatttggagtggggaaaggtaaaactggaggaaggctttatgtgcattctttcattctgtcatctatcctcttcaattatcaaaactattttagttgcctcagtctcagcaataaagtgagagaaaaaaataatttttagagcagcttcatacataattatagctcatttattgccaacagtcttaatatgaccattacaaaaaatgtcttcataaaactaccgcaagatcacattcataagaatttaaatatatgaatgactgatctactcaaaaaaacacagaatagtacaggtgtataccaaatggaatttggcagatagccttattttccagtagtcattttcttagagtttgtgatagagaaacatgtttgttcctgacaatattttcaaatttcatatttcatttaaaatgttctatatattttgactatcaaatatgcaatgttcagttcttcatttaataaacattggtttctttataaaccccctttaccaaatattacctccattaacgttctctgaatctctctgtcagctgaagtaccctcagaaaaccgacgaccacctaagatagtagatttggaaatttatatgcattactcttttcctctacaaccatcatttaagaaaacagaacataacagtctgtggcttaaaacattaagatgaaaattaaagagcaagaattatgctgacaaagttagacttgattttggtgtaacatttctcattttgttaaagtgaaaggttatttattgagacggagtctcgctctgtcgccaggctggagtgcagtggtgtgatctcggctcactgcaacctacgtctcctgggttcaagcgattctygtgcctcagcctcctcagtagctgggattacaggcatgtgccaccacatccagctaatttttgtatttttagtagagacagggtttcaccatgttggccagatggtctcgatctcctgacctggtgatctgcccaccttggcctctcaaagtgctgggattacaggcatgagccaccacacccggccatgaaaggttatttattaaaattggttaaactaacatctgattcattgtggtatctacttcatacaagtcacaattacagattaagagagggaaaaaggttcttttacatttaaaaaaaagtcctaaaactttcaacaagggtgttattcttaccaatagcatctatttcatccataaaaatgatgcatggttgatgatctctagcataattaaacatttctctgatcaaacgagcactttcaccaatgtacttgtctacaatagaactagatacaacctgattaaaggaaaaacagtaaggtaaatataagataattcaagtaaaattaaatttcaataagtacaaaataatcttccctttacctttaagaaattgcagtccagctggctagcaacggctcgtgccaagagtgtttttcccgtacctaagaatgacaaaagaagtcttaattagatggtaaggtagaaaaaaatttgttttgagacaggcaatcactctgtcacctaggctggagtgtggcgagatcacagctcactgcaaccttgacctcccagacctaagcgattttcccacctcagcctcccaagtagctgggatgacaggcatgtgccatcacgcacagctaagttttttgtttgtctgtttgtttttcagagacggggtctctctgtgttgcgcaggctggtcttgaactcttgggctcaggtgatcctgccacttcagcctcccaaagtgctgggattacaggcaggagccaccgcacccggcctatgtgaaacaaatttttaaaatccttttaagaatataatcgtttggcaagtaaattttccaaaatgaaagctaaatcctaaatagaattttcatttaaaattccaaagtacttggccaggtgtggtggctcacacctgtaatcccagcactttgggaggctgaggcgggcagatcacagggtcaggagatcgaaacacagtgaaaccccgtctctactaaaaatacaaaaaattagctgagcgtggtggcacatgcctgtagtcccacctactggggaggctgaggcaggagaatcgcttgaatccgggaggtgggggttgcagtgagcttataatctcgccactgcactccagcctgggtgacagagcaagactctgtctcaaaaaaaaaaaaaaaaaaaaaaattccaaagtacttctgctgtcaacattaaaattttaatcaaaatgttataatttttaaaatctattttaaattgacaaataaattgtatatttatgggttaaattatgatacatgtatatattgaagaatgattaaatcaggcaaatcaacatatccatcgcctcacatgcttagcattactttgtggttagaacatttaaaatctacttttagcaattttgaaatagctaatacattattaattatagtcaccatgctatgcaatatgtcacctagaacttattcctcctgtctaagtgaactttatatcctttgaccaacatctcccctatccccatacaccaccacaacttctggtaaccaccattctactcttggtttctacgagttcaattttttaagattccacatgaaaatgagattatgtggtaactgtctttctgtgtctggcttatttcacttagtataacatcctctagattcatccatattgtcacaaatgacagagtttccttttttaaggctgaatagtattccaatgtgtgtatttaccacatttctttttcttttttttttgagatggagtttcactcttgttgcccaggctggagtgcaatggcatgatctcagctcactgcaacctctgcctcccaggttcaagtgattctcctgcctctgcctcccgagtagctgggattacaggcatgaactactacacccagctaattttgtattttcagcagagacggggtttctccatgttggtcaggctggtctcgaactcccgacctcaggtgatccgcccgcctcggcctcccaaagtgttggcactacaggtatgagccactgcacccggctaccacattttctttatccattcatccattgatgggcaatttttaggctgtttctatatcttggctattgtgaaataatcatgggagtgcagctatctctgacacactgatttcaattcctttagatataaacccagaagtgggattgctgaatcatatggtaattctatttttagttttttgaggaacctccatgttttcaaaaatggctgtgctaatttacattcccaccagtagtgtacaagggttctttctcttttctctacatcttgcaaacacttttgtcttttttataatagctatctacttacaacatggactatgacagaaacttctgttacattaaaatacattggtctatcctgtgcactgactggatcttttacttatgaatattttaatatcaagcattgattatttggaaactactggttgagttatgcaaatcttccaaatgttgacattttccaccacacattataaaaaatttttgttattctcaccacttatctcatcagaaaagtctttaagtattaatatattagaaagctgccgtggctggacattgtggctcatgcctgtaatcccagcactttgggaggctgaggtgggcgggttgcttgagcccaggaattcaagaccagcctgggcaacatggcaaaaccctgcctctactaaaaacacaaaaattagcctggcatggtggcacacacctgtagtaccagctactcaggaggctgaggtggaagaatcacctgagcccaagaggcagaagttgcagcgagccaggatgatcacgccactgcactccagcctgggtaacagagtaacaccttatcaaaaaaaaaaaaaagaaaagaaaagaaaaaaagaaaaagcttcaaccacatagtgccagatatatgtttctaaaaattctaattttcacttgacatttcatattttatcaatggcaatagatggtgtcagttgtttaacatgacaggcttaatttgttcgctttggaaaaaatgtgcgccaaataaccaaaaaccagtcttgagtaatcaataactaataaccaataaccagtctgataatcacagcatatctgtaaatggtccattcaagcaaaaatagtattccataaaaagcaatgaattcagctggcaacttaaataactgcacaagtgcttttcctaaagacaactatcttattcaatatgcagcagtactttatatttattttcccttttatcatgaagaacacaaaatattacccaaagatgaagatttaacaaaattaataatttttactgtttcaccaaggactttatagtgaaactgactttttttttttttacactgcaagtatgtggcagtcaagaacgcaatggctactaactagcaccgtttcatgccactaatgctgattcacactacagtgcaagtaatttaattttacccatggtgctcttgcaccatcagcacaaatgtcaacacagtggaagagccaaacaacattttagttttttgttttgtgtcattgtggggctacatatgtcaagcagtatgctataggtacatttgctttatataaaaaatttttttttttttttttttttttttgagaaggagtctcactctgtcagccaggctggagtgcagtggggcaatctcggctcactgcaacctctgcctcccaggttcaagcaattctcctgcctcagcttcccgagtagctgggattacaggtgcacgccaccacgcctggctcatttttgtatttttagtagagacagggtttcatcatgttggttggccaggctgctctcaaactcctgacctctggtgatctgcctgcctcggcctcccgaagtgctgggattacaggtgtgagccactgcgcctggcttaacatttcagtattataaagtagttttgaccttacagagtccatgaaagcacctctgggtctgtgaaccacaatttgaggactgttgcactagaatcacatggcctgttaagataaatgtactgtgaggcacaaatgcactaagcatgcctcaaagaacagtagacataaatatcctatctcattctcactctgaagagaggagaagttggaactgcccacatcaaatttccaccttatggccaggcgcagtggtttatgcttgtaatcccaacattttgggaggctaaggtgggcagatcgcttgagtccaggagtttgagatagcctgagcaayatggcaaaattgcttctctacaaaacatacaaaaattaaccagacatggtgatgcacgcctgcagtcccagctacgtgggagactgaggtgggagaatcacttgagcccggaaggcagaggttgcagttagcccagattgtgccactgcactacagcctgggcaacagagtgagaccgtgtctcaaaaaaataaaaataaaaaaattgtctttttttttttaattccttaattcatttatcttattggtggagtagaaataattcaataccaacctggtggtccatataacaaacagccttttggaggtattattcctacacgctgaaataactctgggtttgtaagaggtaattctatcacctagaaaagaagttaaatctttcttaaaaagttagtcaagatttttaatgtactttcaaatactctaagtcaaatatcaccttagttaggtgtacacatcataattcttaatagacctagacttccatgctaggtaaaaccatttatattaagaggttttgctccaggtagatttaagatctcttaaatctaaaaaatttcaaataatgttttttaaataaaccacacacttgattggggtgatggttacacagatatataacttgtccaaacatatttgaaatgtacacttaagaatctacatttttttaatgtaattatacctcaatgaaaaattataccacaaaaaaatcagttaagtcaaatgaacatataaacaaaaaacacaactcaaaagatctatactagtttgcatttgaaaatacaacacaaaataattctaaaatgggggatggatttgacaacataccaagagaaaaggtatatacaatttttatctgttggcattttgccacggcagcttttaaagaacagtatgttctgctctcaagactgattcaaggaagaaaagtagagactagagaaattgaagatctgaaagtccaatttaaattacttatagtaccagtaacttaagagagaaatttctttttttttgagacagagtctgttgcccaggctggagtgcaatggcatgatcttggctcattgcaacctctgcctcccgggtacaagagattctcctgtctcagcctcctgagtagctgggactacaggcgccaccaccacacctggctaatttttgtacttttagaagagatggggtttcactgtattggcaggctggtcttgaactcctgacctcagatgatccacccacctcagcctcccagagtgctgggattacaggcgtgagccaccatgcctgaccgagagagaaatttctattgaatagttgtgttgggctaggtgcggtggctcacgcctgtaaatcccaacactttgggaggccaaggctggaggatggcttgagttcaggagttcgagaagagcctggacaacatggtgaaaccccatctctacaaaaaataaaaaaattagtcacatgtggtggcgcatgccttcagctacttgggagggtgaggtgagaggatgacttcagcctgggaggtagaggttgcagtgagctgagactgcaccactgcattccagcctgggcaaaagaaccagaccctgtctcaaaagaaaaaaaaaagttgtgtccatatgtgcataaagcgtgactgggaaaagccagaagtgagagaaatcaatactctaaagtgtaaagtatctgcagacagtaaaggatactgcatgtatacatgggattctttctgctcctatggctaatgcagcaaatcactgttgaaagcaagttttcaccgttttatgaagcacctgttcttcctctgttgccctttcattaatacaggtgagaactgccttttttttttacacttagaccagtgcttcctcaagtattgtcaaagaaaaatttggtttcataatcacttggaatgcttgtttaaatgctaattcctgtgcctacccccaatctagtccatcaaaaccactcagagggcctagtaatgtgtatttttaataagtgttccaaaaaaaattaatgtactgaagtatgagaactggcttaaagcttaaatcagattgtgtaagacattccaattattcccattaattcctaaatattcacagcctaatttaggataaaatccataggacaatgtaatttgctttacagataacagttaagaagctgtctgtgctatgaagtaaggcaatcctgatttgattgttcacctaaaagcttacaagatttaagacaatcctaaagccagtggttttctggaatggcagcaaacagctttaacaaaataaaatatttaaggaacaggtaccctactcttctgtaagagtgggaagctagtattaatgaggttatggaaaaaactcatcacacacattatccaaatatgctctgacccaagtaacttattatgataatcaaaaccacaggatatcagattacatcaattatttttagctttttctccgttcctttgccacaaaaagagcaggatttttctaacaccaaattatctccaaataaaaaaaamcagtaattttcacagctagaaattcagtgctattcttcttagcaagaatagtaaatacataatattcttaactacyatttagacaaaaagtactttttcatcctgtttctcctgttaakaatcctaaaactagtagtatttattagctaagttcagagaacaaggcacacagtaccaacctctcttaattcccggatctgttctgatagccctccaatctcagaataagaaacattcccagggtcctcatgagacatgttataaaccagtggatccacctctctcggcaaatatctagaatgaaaaggtatgtatttttcttttgaaagatatattttctcttagcctacagatagcatataaataacttgctcaagcaagcacctgtagctgatctcataaagatgtgcttaattagaaactagtaaaagggaaaaagtgccaaaatattcagtgatctcaagaagcatatatctcagataaaaaccaccctttgtgaaaataaaaggtgaactaaatagaataagaaacccacctcatgatagttagtgtagtcatatccaaagcaactcttgttcctggcttcagcttacttttgtcaagctagttttgtaaaacaaaagatattacatcaacacttaaaaacggaataacactcatttttaccctccagagagaacacaaatatcagattataaactctatgctaacaaaatggcttataaaataagtaattcaaagtgatttccacctgctccttaaaagcatgcccctttgtgtaatctcagtgtaaaatgtgaaatgactaacacacaaagcttgaggcagcaatggtacagtgactttgggaattgctaccaaagcatttatagaaaaatcccttagtgaacattttagggaaaggaaagggaagcattttaaaggtgtgctcatcagatttattttgaaatgtacagcttctgggaagaatgtgttaaatgctcatgagagtagagaaaaatgcacggtttccccttagagatttttattaaaatgctttaaatttaaagccccaaaacccagcaaccatcactcatgcctttgctacatgacaggcacatgctgaacacattacacattaggttgaatcatactaaataatttcttggcttatctggctaaaattagaatctactagatctgcctcactctcaggatgttgttacttttcaaagataaagttacttttttttttgagatggagtacggagtctcactctgtcgcccaggctggagtgcagtggcgccatcttggctcacagcaacctctgcctccctggtttaggcaattctcctgcctcagcctcaagtagctgggattacaggtgtgtgccaccatgcccggctaatttttttttgtattttttagtaaagacggggtttcaccatgttggtcaggctggtcttgatctcctgacctcgtgatctgcccacctcagcctcccaaagtgctgggattacaggcatgagccaccccgcccgacccaagttactttttaatagtttaaaaaactgcgtgccaatacaatttcggaatcatataaattactgaccacttgtcacaggattttacaaagagcttcaaatttaggaagataggcaaaacactaggattaatataacaattaaggaaaaaacggctaagaagtgaggttacttgaaaaaataagaggagaaatcaatatgaagctatttcaatgtttacatctataggaaatacaggctgagtattcttaatctgaaaatccaaaatgctccacaatgtgaaattttttgaatgctgacatgatgctcaaagaaaatgctcatcggagcatttcaaacttttgattttttttaattagggatgctcaaccagtacaacacaaatattctaaaacctgaaaaaaaaaaagccaaaatctaaaacacatttctggctcaagcattttggataagggatactcaacttatatatacttcggcttttctaatgttttttagtcttcaaatacagtcttgtcctcatgcaacctgaaatatcttagaaatgccaactttcggcatccacagagccctgaaagggacatgaaaatcccttgtcagtttaggtatctaatattttgacttagaaaatgtcaaccgcttatatactaggcaaaatcctaataggagatttatagttcctggattaaattctcccttacagccatgttctgtgaatgttttaaaacctgaacctgaaatgacaattaaacagagaaaactcttccaatgaatttaaaagaattatctaaggacacttcctaaagaataatacataaattgatttcagacactactgaatgacttgaggtcatttgttggcatctttgataactgtaaaataaaatttagaattatttcaacttgccctaccctaatctaaatgacctcatacaaaattaacttaggccatggtacagtccataagtaacagttctgaatgtctaaatataaacacaggtaactgatgatatctaacacttttaagtcctctttaaaaatgacattaaaataaaatgtctgttttccagttctaaaatacttttatttctaagtggctattaacagatctgactgagacaatgtaatacagtagaaagtacggaatgccaggagtcaaagcccatggtttgaattcaggctttgttaataactagctatgtctgaacaaatcatccttgtgagttatgggcataaatgctccacctgcttgcctcaagaattagagacaataacttacatgaaactgctttgtcaatcatcaggcactatacaaatataaagtattacctgtcgacgacaacccacaacatatcttggtccattggtagctttaacaatgactagaagaaaaaacataaaagaactaattgaaaaatagaaagtaaaaaaatacatacccacgttgacagagggtttagttgtatttctgtcctccaaggagacattagttgaaggaaaacttaagtctattcaaaaatactctctctctctgcattattgtcattaaaataataagcatttcaaaagtgagagagaggtggactgtttctttactaattaataagctaattcatcactcacatttttcttcagttaactgtttaagcacttcacccacgatctaaggaagaaaataaaaagcattactttttggcaacagctaaataaaaaagcaaattaccatcaccccctattccccaaactccatcacctacctgcccaacactctgtagggccttcagatcattttcagacttttcatactgcttggtaagttcttttaattgttcccttactgaaataatacaatttgaacatttttaattgaacagtaatcttartgtgtttaagtcgctacgtctcactttactgtttacgtaagtctacttcactttaccyaagtttcacatccactgtttcaaaccataaaagaaataatgctgtttgtaatgagtaggtggcatgtataacaacaaaatgttacagagaaagcaccatacttttactttgttgatcggcaatacttgtttaagcacatcttaagttatagtcttagaagatattgacaccctgacacttaggatttgcgactacaaatccgaatgataatcacttagacccttcctcacctcttcacctacccacgtggattgttctctgacattctaccctaaataaagtcaacaaatgcagttctccacagaatcatgtaattatggtcctccatttaattaaactactcatgcttttcaatgaaaatgcactggaaaaaaaagttaagcactcaggaggtaagggaaatttgtatgcctgatacagtacaacacgaaacacaagacgatatgggttattatgacaactggaacacttctctcttaagctccgcggccgtctttcgactccaagaacaagccgactccctgagtctcatctcttgtttgagcttacttgactcaagcgccttcccctctccaagtcccgggactccaccaasactgcccttcttgcaccctaacctgggaaacatcctcggcccacttccccactcctcctctacttctttttcattttcacctcaaggccgccgatgttctgtcacccgggctggactgggccatttctacacccgaaggagtgytgctccacaagctcagggccggatgacaaagcgccttgtccctggccctaggcctggtcatctctaaggctcggttgccgggctcggcgaaaggcttctgctttgtcagaggcagaagcgagtcgaggcacttgattaaatggaaagaaaggtgcactcacactccttaagacggccgtcgatctccttgtgttcaagcaacttcttgcggtagtcctgaagcgccttatctctagggtccgccatgatgagaagccgtctctcataggggatgccgggaatggccatggccgtccgggcgggggaaggggcggggcgaggggcgaaaccctgcctggaggggtgggttcgcccatgagccctccccttccggttggccccgtctttctactccacttccacctctatgtctcggttcacctagagcgccggcatacactgaaagaggcctccacctataccgtttcttgcaagccgagataggtaaagcaggactcagttatcccggtcttcccctgagaggcctcagtattaagtcactgctgtcccggaagtataaaaggctctgtaataaactgagatggaagtgaagtaggaaatgtgtaatacctcaaaggagttccgatggcctgtcgacacaacacagatggcctttgttataacacagtactgtccaagacctccacgtgctggagaagtagacagttttattcatccattcagtcagtgaatgaggtattaaaggtagatctgcttatcatttgataggaaataataataaaaaaaacttcagagtttaacaaatactgtgaaggaattaaaacacggtgagaagtatggtgggaagaattaatctagaacagatatctgagatgagaaggagccagccttgcaacaactgaagaaaacctaaacaaacagtgcaagtcctggagtggagtggggtgggggttgtgggtagaaagcttgactcacttccaggaacagaaaggaggccaatgagaccagtagggggtgggttgtagagatgtggggtacaagataaagatgctgaagtaggctgaggcaggaactttgaagtctgatagaaccttcagatttatgtatttatttatttacttttgagatggagtcttgctcctgccgcacaggctggagcggtgacgcgatctcagctcactgcaacctccacctcccgggttcaagcaattctccttcctcagcctccggagtagctggcattacaggtgtgcgccaccacgaccggctaatttttgtatttttagtagagacggggtttcgccatgttggccatgctggtctcgaactgctgacttcaggtgatccaccctcctcagcctcccaaagtgctaggattacaggtgtgaggcactgcgcccggccagatttttttttttttttttttttttgagtctgtgtctcactctgtcacccaggctgcagtgtagtggtgcgatcttggctcactgcaacctctgcctcccgggttcaagcgattgtcgtgcctcaccctcctgagaagctgggattacaggcgcccgccaccacgcccggctcatttttgtattttcagtaggaatggggtttcaccatgttggccaggctggtctccaactactgacctcaagtgatccgcccgcctcagcctcccaaagtgttgggattacaggcgtgagccacgacgcctggccaactttcagatttttgtgatttggggaaaattacatactccctcaatatctctgtaaaatgatcataataattgcacttatctaatggggttgtcatgagtattaaataggataatgtgcctaaacacaacatctgccacatggcatgtactcaatagtgttcttttgaatagatatttattttaagggtagtaatgactccaatttttgcattacaggtcctcattgctatacctcttgctatcattgttcctggggacaattaattgttgtccaaaaaacatgagtaaaattctccaaatagattccatttggtctcaccttatccaatggccatgaatgtttgagtttaaatatatacatcctaaatatacaaataaagtacaaatttttgtaaattaatgacccaaagtcacataaaggatgccttcaaatttattaggaacaattctcatgggtattgtgtgaatattccattctatttttcttttttttttttttttttttttttttttttgagttggagtcttgctctgtcgccaggctggagtgcagtggcgcgatctcggctcactgcaacctccacctcccgggttcaagtgattctcctgcctcagcctcccgaacagctgggattacaggcgcacaccaccacgcccagctaatttttgtatttttagtagagacagggtttcaccatgttggtcaggctggtctcgatctcctgacctcgtgatccgcccgcctcggcctcccaaagtgctgggattacaggcatgagccaccgcgttcggccaatttttctaaatgtgactgggttcttgcagtatacaatgaacaaggaagctgtatggggcagggatagtcccttctcccactcagttgcaactactctggtcaaactagtccatccataccaaaacatgtcacctctgacatcaagaagtaaagaagagaggacaaggcagagaaagaaagctcagtatggctcaatttaaaatatttatgagcacatactgataggttattttaacattaatcacatcaatattttaaagtcccttaacccttgttctttttcttttacccatctggcagcatttcaacttcagaagaatcttctattttccccatgcctacactagccctgttacttttttgtttgtttgtttgttttttgttttgagcaggagtctcgctctgtcgcccaggctggagtgcagtggtgcgatctcggcttgctgcaacctccgcctcccgggatcaagggattctcctgcttcagcttccagagtagctgggactacaggtatgcgccaccacacccgactaatttttgtatttttggtagagatggggtttcaccatgttggtcaggctggtcttaaattcctgagctcaggtgatccacccgccttagcctcccaaagtgctgggattacaggtgtgagccaccgcgcctggccgttacgtttttatacatgcctataagactgtattcctctccatctgaaaacgtagctcaacttgtaattatatattcttaaacgtgattaaatgtttagagtcttttctctgcagtggactgtaacccctcggaaaacaaggactatgactatttatttcccctgattggatccccagtgtctagcacagtgtctgaaataaaagagatatatgtatattgaatgaatgaatatctcaggcactaagataggtaagcagagttataaagaggctaagaaatgtgaccagtactcaaggaacttaaaatatcataaagtgaaaacagaaaaatacaaatgtgaccaaaaaatgaaaattagaacatatagggtggaagagataaaagaaggtagggcatatcttagtttatttcggagtcattaaaagtgatgtcataacaaacggtaatgagattgatgtagaccttcaaaaatcatgtaaggatagtttctcaatctattttcctataacttggcacagatgagtgtggtcattttaaaatatgtacacaaattatttgacactttccacttcaagaggtggagcataattccccttccttggacctagtgacttgctcttgataaataaagtggaagtgacagtgcgcaacgatggagactagatcacaaaaagtgttgagccttccttttgactctcgcttggataactccctgtgggagagccagttgtcatggcatgaggacacatcaacagatctatggagagaccaacatagcaaggaacagccatccaggaacttaaggcctcctgccaacagccatatgagtgagcagttcctggcagagatcctccggctctaggcaagcctttattactgcagccctagtattgattgcaacaccatgagagactgagtcacacaactcagttcagctgctcctgaattgctggtccctaaaaaccatgagatgataaatgtttgttgtttgaagccacttagttttggggtaatttgttacacagtgatcgataacaaatacaacaagaacagatttatttttaagagaaaaattgggaaacagtgtcaaataggcaagtagcaactacttttgctcccacattggccacaacacttaagtttttagaaatttttcatcccaaatgtctacttccaaatacctatgaaaatgcacttaaattaggccaggcgcagtggctcacacctataatcctagcactttgggaggctgaggcgggtggatcacaaggtcaggagatcaagaccatcctggctaacgtggtgaaaccccgtctctactaaaaaatacaaaaaaattagccgggtgtgatagcgggcgcctgtagtcccagctactctggaggctgaggcaggagaatggcgtgaacccaggaggtggaggttgcagtgagccgagtttgcgcaactgcactccagcctgggcgacagagtgaaactctatctcaaaaaaaaaaaaaaaaaaaagaaaagaaaagaaaaaaagaaagaaaatgcacttaaattaatgtgtctgtgtctaagcagtgagatgttgaggtaggaatagaagttagagttcaggccgggcatggtggctcatgcctgtaatcccagcactttgggaggccgaggcaggtggatcatttgaggtcaggagttcaagaccagtctgaccaacatggtgaaaccccgtctctactaaaaatacaaaaaaattagccagaagtggtggcacatgcctgtaatcccagctactcaggaggctgaggtaggataattgcttgaacctgggagacagaggttgcagtctctggagccaagatcttgccactatactccagcctgggagacactgcaagattccaactcaaataataataaaaataaaataaaaaaataaatgaagaagttagagtttctaggcttctggggtgtgcttttaataaagtaataccataaagagagcttttaaaaaaagtactaaagattaaattgaaaaagaggtgcctattgtctcacttttctctaatcccgagttccactcccttaatttttaaatgtgtttctactatacttacctttgtatttctaaataatatccttatgctgctatttcttgatatataaattttgggatttatcttctgaccaaattaggaagataaagatttagcacccttactccagactcccacttttcctacttgcatcctccatgaatgcaatatatgtaaattttggttaaattgctatccaatatttgtgtcattgtggggctatgtatgtcaagcagtatactatttgctttattaaaaaatttttttttggccgggcacggtggctcacacctgtaatcccagcacttcgggaggctgaggcaggcggatcacgaggtcaggagattgagaccatcctggctaacacggtgaaaccccatctctactaaaaatacaaaaaattagccgggtgtggtggcaggcgcctgtagtcccagctactcgggaggctgaggcaggagaatggcatgaacccaggaggcgtagcttacagtgagccgagatcacgccactgcactccaacctgggtgacagagcgagactctgtctcaaaaaaaaaaaaaacacattttttttttgagacagagtcttgctcttgttgtccaggctggagtgcaggaaatcgaattgaaggagagaggaatcagcattgtcagaatgcagcagagatttcatgaaaattggtcattgggttgggcaataggaaggccatgtaaagaggagtttcaggggagtagagctggaaaccagactgcatcatgggttaaaatgtgagtgggaagttgaggagtgaatgataagtgaagtcagtgactgcatacagcttgctttcaggaatttgaggtaaagaaggtgaagatgttacgtgtcatgtcttcccccttcagatgattctaagcaccttgagacaaatgtctagtaatataccacgtgtgcaaccatattcagtaaatattaatgacaggaatgattctaataaaaatatcagcactaaacccattaggtttttacttagcctttctttgtact

SEQ ID NO: 97726 - DNA, 28425 bp, Homo sapiens
tgccatcaatatttccatcctttcctccctctgttgctatttcagaagtaccctaagccccttattttcaaagttaatccaagcatgctcttaaaatcttcctttcccaagaccttgctacctgtgtttatcacctttgtttctctcccaacaaagcacacaaggcatttttactttatttccagtttttcctaccctgcagttcacttcaatctttgaaccaacagttatataaggtagtaagaacagcttatatacttagcactgacctggaaattgaggacaggtgatctgatccacaagtatagaactctttgcactctactgcactgcccatagtgagtaatatgactgtatattcatccccaaggctcaacttcctaattgtcattgactttttcatttcctttgccacatctgtctaataattgctctccacatcctatagggtccgttttgtcagtattgttaacattccttcctttttttaatagtgaccttaatctagttcaggtccggatttgcctcctttccaaactcttgttatttggtctgttctgtacattgtggccagacttattcccatgaaagatatttctaatattgatatttttcctttgccaaagcctcctttggcttcattcctacaaaagtttatagaatgccatatgcccttctgattttttggtttctttctctcattgttcttctttatgtctgcatttcagaaaacaactgctgatggtttcctgtgtgtgtcttcttttccccacctaaaatgcatcacatttagtctccctattcttggttcatatgtcatctcctcaggaagacatgatgattaatgcactcttcctctaacccctagtcatttggagttcccatagaagcacagcacttcatctgaaacttaatcacagtatctgggtttagcctgagggctaggatattttatctcattcaattgtattgatactatatttttatctttatgaattttatagtgaaacattcttcaattagaatatgccctctgaattaacattattattaccatgatataacagtcctgtagggcataagtttaaggtcatgccattgttaggcaaaaaacacagcagaccctctgctggtttaactgttccctaaagttttcctccattgagagtctaatttcttgattataacttttggggatacagagatagctttgattctatgtgggagatttctgtactagcagatgctggtatgaagaatagataaaagaaaatctctttatatgctacatgccttcctttctcccaacctagacttcgatagcttgagtggaaaaatattttcagctgctcttcataacagcctctgtgaaagcaaaaagattatctacaaaaaattatacaaatacaagattaatttcctaaattttatgccctaagtcacatgtttatggtgcctaaaaaacaattaacttgataactaaacatttatgtattatctcttgaaaaggtctattttcacactatttcaaaaattatttattttatatgcaatacctaagacataatacttgagaaggaaaatatatcctgtcatgaagattaaaaagttataatatttaggtaatttatcacaaaggaatttactaaattttgctatatcagttgtggaattttcatagtgtatacatgatcacttaataacaaaattttacttgctgtaaccttttaacatgaatttattttagtgcccttttaatcttcatgcaataacttttaggcagtttgaagagaacacatgaagaagaggatgattttggaaccatgcaagtggcgactgcacagaatggctgacttgaagagcaacatcatagagtgtgaatttctatttgggaaggagaaaatacaagagaaaattataatgtaaaatggtaaaaacataagtagtttttttttcaattacatgttgcttccagacatacttctctgcaacttgttgagcaacattttaagatgttggacttctgcaatagatgacactgatggttttactcctttttttaaaaacacatgcgcgcgcacacacacatgctttacaagttttattataaaccaagaattttggacttgcaaagaggtattattgcaataatgcacttttcatacttgaaatttatttgtatgatataaagttattactttaaacaaaatgcaagtatggggggattgtttataaagtttgggtaatttataacaaaatttgctaaggtttgctaaaaattcatttttctgttctatatattacatttttaacataattttacagttcaattttatgatggagcctcttacagaaacattaacaaaatgcaggaatctgccacatttcttttttagtataacttaatagcttaattaccattttattttttatacttcttccattattaatctttaaatcatgatcctaattagctgtccttactttaacttgatctaattattgcttcctttcttattactttcctaatttttctatattttaaaaactacagtttccatgataaaaggaaaacgttttgatttatagtaccaagtgcttaaacacaaggatagtgttagattttcgagtgactttcctttttgcattttttggcagtaaaagccaaacgttgtatttgttcttttcagagttgtccagcccttttttcctttgtccaaaatgattctaaatagaatctaataaaccaatgtagcattatttttttctaaatgaagccccaaaaaagaaaagtgccttgcatcatttaaaaaaaataattaaatcctcatggcctctaaattagtatgtagaacactgaaaagttcttaacatttttgtgtaatttcctttctttttaaaccataaattagtttaaactgaaagtacgaggctggaagaaatattagtaaattatttggaatatagaatgtttactctttctttttatgttgtcttaatgattctgtgagattgttccggctcaaacagaagcttttctttggggaaggtgatttgtgggagactctagtgtattttaaattagcattttaatccattcttgacattcagttagtccagatctgccccataatttgctttagtaaagtcactttatggatttttggctatgttttagtttgtgtgtataaaagttctaagaaaacatttttgctattttaagtatgtaagggaagagaggagtgtttttaactttttatagttgatgactttagggtagcacaaacaaaactcctttgtatctaacttttctcaatcctctcttgaggtgctttactaatgggaatgatttctgtatgttcccttggtaccaagaggtactatgcaaagtaacctattacaccaagttacttgctttgctttcctctctatgatgtgataatacagtaaaagctttcttacccagcatagtgggagagtggagattaattaaaattgttaattaagagttaattcctattgacccaggtgatatttctcttctgatttccctccccttcccttctcttatcttaccactgtgaaaacagcatattgttaatctcgttgtcgtccagtattctgctttgtgattaggtcttttgatgtacagtggtctagtggagtcaagattcgcattgggttttctaaaattccagttgataaaagttccagataacacagctttcctgtatatagatcactattgggcaggtcagcaaagatctcttacagtgtaataataatctatgatgcttcatttagcagaaactctgcttaaaagaatcttcataatagtaagtttaggttttaaaaacttgtttcataaatatacatatatcctctctagtagtctggccaaaagaacagattttgttattgataatttgtagctggtaattttccacattttctatccactgtaatttttatgttgtcactgaagtgcctgcccagtactgtatattacagtctctcacaaacactgggaaaagggactgtcatcatcttgagtactctgtgtgtatatatatatatatagatagatagattttttttttttttttgagacagagtctctaatgtcacccaggctggagtacagtggcacaatcttggctcactgcaacctccacctcctgggttcaagtgattttcctgcctcagcctcccaagtagctggggttagaggcacatgccaccatgcctggctaatttttgtagttttagtagagatggggtttcaccatgttggccaggctggtctcaaactcctgacctcaagtgatccacccacctcggcctcccaaagtgctgggattacaggcgtgagccactgcgcctggctgagtacaatattaatgtagacaaaccatgaagtttattatttcatataagaacattacaggtttgttttttcttgcatgtctgtccacctaatgtttaagtagttctggtagctcttcctattctttattctatttgattccatttctgtgattcttttattaccactgatgttttgtgatagttaactatgataaatttaactgatcatgatttatcttctagagtatttaaataatgtatgagtgaccacccaattccaacattaaaagtgtaatctgggcccataatttatagtgaaattgtatcaaaacatagggaaactgtattactgtccattttgaaaatatgaaacttgagtattgaaaatattcaaacatggaatggcagtattctaatttcagttagttggttcatgttaatttcttacctgttagatgtttaaactgcagtgacctttacttgtatctactctgtggtggaaatgttaaaccatgatagcttttgctaccaactcaaccacttaacttttagagcagttttggggagagtttatgcttcatctgagtttagaagtaatgtcagaaaatgttaagcatgtctgtattaagaaaatataaggtttctaattgtcttattaatatggtaattcaagtgaattagaaatatttaactgcaatcttgaattataaagttgagatatatatatatatgtatcaagatctcaacttgatgtaaagtaaatgagcagttacctggcggatttttttttttttaaataactgatttaatccataatcccataacaaacatagcttcacctcagtattttctttctttctttgttcaacagtgctccgataagggaatgctagaaaatagatgagaagtactgaaagacctttttttttaattgattagaaaagtaagtctctagggtctttgaatgctggaatttttttttttttttttgtctttcccatctgtggcagctaaaacaaaaatcactcaaaatattcaggtttacatgttagctctctctcatagggagctgccatacctcacagttcaaagtgtattctatagatcagtaacattatactgacatgtaattgcaatttactatgcagcaaaaatgattcaagaagaaaaataacctacagtgtctgtatacctttgtatacacaattgcttaagttactctgcttttaacatttgtacttggataaaatgcttatgtctgtataggaatgtcacagtgcaagatgctgctagcccaggcacaaagtattaaaattattttgtgaagattggtggttgtattaaaactgctgtgccattatacctccaaaatattgaaaagctcattcatactgctgcttatacctcaaaacttctttacttagattgttatctgctgggtaaaagtaacccaaatttactctgagttaagaagagtggatgaacattgaatgttgagaagcacttaagagtatactctaaaacactgtggttacacacacacacaaaattatggtctgtagtccaggcaagcctcaaattccagctcaagtttatttttaaggattagttgagcaagtttggagttggaagtgagagaatcgtgtttaaaggaaagggtaggtcatccacagaacagctttcagtcattacaaaaaaaaaatacttcttgcttttatattaccatcttcccccattaggcctacctgcatactgtgcttcatcaaatctaagatcacctcacaactataccattattttaggcaccactaaaagacagtgtattgctaacaaaactatgataaaccattgataatatatccagatttcagagatgttacagtgcatcttagttgatgaaacaaaaatatacaaaacatgagacacagtaaaaatgataagtaccacctcattataccttttcacaagcaaatagtggccaaagatgtgaacggccagacacggtagccgacatatgtaatcccagatactctggaggctgaggcagaggatcacttgagctcaggagtttgagaccggcttgggcaatatagtaagaccccacagaaaaatgtaaagccaggtgtgatggcacacacctgtagttccagctactggggaggctgaggcaggagggatggcttgaacccaggaactggaggatgcagtgagctatgatcacaccactggactccagcctgggtgatggagtgggacagtgtctctttaaaaaatgtgggccaggtgcagtggctcgcacctgtcatccaagcactttgggaggctgaggtgggaggatcacttgagcctaggagttaagagaccagcctgggcaacatagactccacacaaaaaatttttttaattagctgggtgtggtggcatgcacctatagtcccagccacatgggaggctgaggtggaaggatcatttgagcccaggagattgaagcggcagtgtgtggtgattgtgcycctgcgctctagcctgggcaacagcgagaccttgtctcaacaacaacaacaacaaaaggctatctattgtgggtacactgcctatggggtagtcctgctccacaaggagcagtttttaaaaaaaaaaagtttaagaagtgttttatgtagcacttttttcatatttacatttactcaccatatggcttcaaaaatcataaacatactcaactaaaattacagatcaccattgtcctcaatgacacaatttttgtatggtgtaccttacctgtaattctatttcctatgggaggatttaagagatatcttaggaacactatttaaagggatttactgaagtgccaaccttgtgaatgattttacctcaaattgttcagtggtaagaaaggtaataaagcatttagttgtgcctttaagtaggctaattttttttgttttgttttgagatggagtctctctctgtcgccaggctggagtgcagtggtgtgatctcagctcactgcaacctttgcctcccgggttcaagcgattctctcgcctcagcttcctgagtagctgggattacaggcgcatgccaccacgtctggctaatttttcttttttttagtagagacagggtttcaccattttggtcaggctggtctcaaactcctgaccttgtgatctgcccacctcagcctcccaaagtgctgggattacaggcgtgagccactgcacccggccttaccaggctaatttttaaaaacatgcgtttttaattaccaggatttacctgataaaactactctttgtcaaggttgtaggacttctgaaaagacagaactagctttgttgcgtttcacgaaggacagatcagttcgtctgtataggctataagcaggtaagtagtgcactctattggtgaaggatttctgttgttttggaaagccaactatagctggctgcatggagggaaatccaaaatccagatgacgtggtgtgagtcaatgggatgagaaacactggtattttctttacaatttcattttacaaagagcacattaaactaaaattttatgaattatgacttaatctaatagttcaacagcagactcaagaaaagcacagatgtgattctaacagaagactactcatataaacaggtttaatgcaacatggaatgcaaaagattagaaccattaaaatatttaattcttcaactttaaaaaattaaataaaatcaaaataggataatgaccagaatagtgccattataatcacatcaaaaagcttccattaacattttatgaatttggcaatctagtacaatacattaagtattgtgtttcactcaattttgtgatactmcatttttgaaaaaacttagaggcttcagatacccatgaaaagaaaaaaatcagggtagaaacacataggctgaggtttgctaattcactgtttacagaggaccttagatgtcccactataattgctcttaggtatttttaacaaatgaatagtcataattcacagaaaagacaagtggtactttttatctacatagactatactatataaactttcagtaaaacatttaaattgttttacttttaatcttgtcaagtaattttcatttcttctacttcaaaaggttgaccaggttgtttgcctgtattgggatcaacgaatgttggactatactatgtttagttataataactaatttatccaccctgacttaatatgtgggaaacaatacacccctaagtgtattgagatgtttctttgaaacaaaaatatttaattttatgcatgtgataaacagccttattcaatgtatactttttttaaatgagcaacacagatagcagacatataactccttattacccatactcttgactaccaagaaaggaagccaaacttttagaaaaatacaatgcaagaaaagattcaagttaaaaatatattcctttggttaaaaatcatcccctttataatattcatttgtaatctaaattcacagcatgtcccaccagcccaaagtaatcttctaaatgtcattatacttgtagtattacaatgttttttcagtccagtatttatggaggtcactcggctgcagcaacaaaatatttcaactctaggaagagtgtagccttgtagcattagcccctttgacaattttcttacaagatttttactttagaaacctccgacacatgtagttttcttcagatacagtatatccaaactttttatagaaaccaacattttgtggtagacattcaagggtaatcttgtaacagttcagtttcttgcttagcaaagtaagggttgataataacctgaaatttaaaaagggggtagggtgaggagatagcatttattaataaaaattgattctagtaacaatatgaattaatgttataaaacttaagtttccttagaaacaggtttagattatggcttttcccactgcattcatgtaagttgataagcatttaaatcaccaaagcatttttacttagagtcaaatatacttttatctagtaatctccagctcactaataaacaggacaaatacaaaactcaccctaagccctctttaaaaatgaaatttaaggctaggtgcagtgactcatacctgtaatcctagcactctgggaagccgaggcaggcgatcgctagagcccaggggtttgacaccagcctgggaaacacggcaaaaccccatctctacamaatataaaaattagtagggcatgatggcacatgcctaaagtcgcagctactccagaggctgaggggggaagatcacctgagcccagagaggtcaaggctgcggtgagtagtgattgtgccactgcactccagcctgggcaacagagtgagtctctgtcttgaaaaagaaaaacgaattttaagatgcatgttaacactaaaaactcaacctttaaaaaaaaaaatgaccaaaattattttgtaaaaattctttatttaaatctatttaaacaacttcggagcagtcgacatacccacataaaatgagtacataatagctttgctctttaatcatttttaaagctactttaatatttgtgaaggtgtgtatcagattaactcaagattggtctaattaatatgaagtggaaacaaagcaagtctacatctatacaaaatttcttaatgaatccaaacccagtattaaagtgtggatctaagtgccttagaggataaaaactataaaagatatacaaacttgaagggtctgcccatgtttgaacagactaaaaaatcctatttttaaaaaaaacaaaagaccttgactgaagtatgcctggctggttgcagtggctcatgcctgtaattccagcactttaggaggccaaggatcacttgagtccagaagttcgagactagccaaagcaacatagcaaaaccctatctctataaaaaattagctgggtgcagcggcatgcacctgtagtcccagctacttgggaggctgaggcgagaggctcacttgagccccagaaattcaaggctgcagtgagctgtgatcgtaccactgtatactccagcctgggcaacagaaagagatcccatctcttaaaaaaaaaaaaaaaaaaaaaaaaaacataaattatatagactagaacacaagaaatcggtctgttttgttcactgaggtattccaaatacctagaatagcatctggtacataagcaggtatttaatatttgttaattccttaaaactcagaagagttagtgttaaaaagcaagttcttgggccaggcacagtggctcccacctgtaatcccagcactttgggaggccaaggcaggagcactgtttgagaccagcctgagcaacatgatgaggccccatctctacaaatttttaaaaattagccaggtgtggcgtgtacctgtagtcccagctaattggggggctgaagaggattgcttgagcccaggaggctgaggctgcagtgagctgagattgagccactgcacctcagcctgggtgacagagctgtcaaaaacagaccctgtctcaaaaactaaaaattataataaataagaactacaagttcttataaaatggcaataaatcaataccacttatttatatttattttaaatgatttagatatatacagtgaaggctgtttcagtatgtatttctacaacttatgagaatgagagatcacagaatattctgtaatagttgaacatttcctttgtttttaaatatgacagagaagctgaggcaaatccgattagcccaaaagtttatctcctactaggacgagagcattactataaaaagttagtaatttaaagatgttactgtctgtaaagaagtatgcttccaattttcaaactttaaggcaaaatatgtataataatactttatttcttcatgaaattcagtctaaactattagagtgagaataagttcagaattaatgaagccaaaaagaacttcaaacaagtatcttgttaagaaactaaattggaacaaaatttatccagggttaccttgtttctgcctacttacaatttgccaagctgctttcctctgcattcatcactaacaacaacatcttctactcttcctctctgaaaatatttacaatgtttaaaggagtaagcatttacttttgtttttagctaaaacgagttggtaagaatttactgataataagtagtatattttgtaaacttgaacttaacagaaatcaaatgcaaaaaatattatacagtgaaggctgtttcagtatgtatttctacaacttatgagaaggagagatcatagaatattctgtaatagctgaacatttcctttgtttttaaatatgacagagaagctggggcaaatctgattagcccaaaagtttgtttcctactagtatgagagtactactattaaaagttaataatttaaagatgtttttacttattagaggaaatagtatgagtcaagttgtgacctaaacttgttttggctatgtccccaaccttcccaccccattgtctttaaacaaatatcaggatcaacatcaccaaaatgtaaccttttcatgaatatatccatcattctactccttgcttactagcaagttattttagatatccaaataaaattaatgtctagtacagaaaccccaccgaaattcctaagtgtgacagaacacatcccaagtgttcctaccttattctcattgaattaaggttttctctccctctttttttatttactattttatgtgagttattgagggatgaaagggcactacatgcattagatgtatcataattagaacggaataatctgaaccctttaccatgtggaaacaaatttatgctaacgtggtatattcagagttgttttttttaaaagagtaacattagggattttgtgcattactgctaagttgtttggtttctctatgcctataccaaattgatccaccttacagaacaattttagcatacaattcatactgttatacattttctttcttaaagctctcagaacacactgggaaaagggatttctaagaggcactgaaaatcaatgagaaaacagatttgtctaatggaaactcaaagtcagttgtgctagaaaacagctgtccattttatttataagcagcacataccttagcacaggaatggatgaatttatgttctataatcagagttgccgtagcaacaatctgtcctagagtcacatcttctacaactgtaacataataatccccagatttcttcatatgctcaaaagattctgtggaaattggataacaaagtgttacatagtagacattcaattttatggggagccagaaaaatattaggattagctgacttaattactaaatgtttaaagctgttttaccatagtaatttaccttccatttctaaagaaaatattaccaagtagttgaaatatcagcaattagtatcaattggartataacctacacattcaaaatatctgctagcaaaataaagactaatatagctattttagatgaacaacacttaaaatacaagtaaatggctgatgttgccacttccatgactaatgaaaacttcaatttcttcatttactttaaatagatctctttaacttttatactcaatagatattcaaatataacctttgcacattttaacaagagcatgtttacatggctcaattctagaatttttagtcttttgctttcaaaatatttttacaaaatatattttaattttccctttgtgatggaaagtgttttgtgataacatgacttgctcttgtttgctttgagagcaccttgcaaggaagtaaaaacatatctgtttccaagtaacttttccaagtcacatagcaaataggtgcaaagatacttcccctcaaatggattttcagtactattgctgaaataacatggtttctcatctaattcatgtgcatgcaaagaaaaattcaggaataaaaattgaggctaatagtctctcatattgttaatttctatggtctcattccagatagagatctaaaatgggaaaaagaaattcagtgaatgaaaataaacaatgagaatcagaatgatggtcctcattctcaggagggtcaaatagaattcaatacaaaattccctattataaggaaatgaagaattgtaattcctcagctattaaatattactaaatatttagtaatgataataatacttcatttcctttataacaggaaaaagcagtggtagagcactggacagaattaaggttttattcctcaccgtagcaataactacctgtgatcttgggcaagtctttggatctctctaaattcctattttctcctatgtctaaaagaagaggggcaggggacgggtggactaactcttaagatgcctgctaaccttaaacttcaatacaaataaaccccaaaataaatttaaagcgtatagtcttgcttttttgatttggtaatgaaatttctgtaaataaccacagtaagggaaatactacaataaaaaaacgaaaaacctctagagctaacacctaggtcctatggtacaataattatctaataaagtagtcagatagtttgcaaaaacaaagttactggtacatttggattctagaacaactcagccacattaaacatttgtataaaacagctaatttgttctttgaataatttccagctatttgaacaaaaacagaagtgggcactgaacagctctaaacaaaaatgaaatcatgtttccctttatttcaggaaaaagaggttatagtacttactcataaattgttcagggctgacaactccagtctctgttagctgacccaataccttaaaaaaacctagttttgaaaaacagatttcaaattacgagaatagcaaaaggaagacagtatgaaaataagcaatatattaagcaggtgggcttacasgcwattattttttcagaactttctataatcttttaattattagaataaagtgaaccctattcttctataatcactacatataacaaaaataacaggttttaccagtgcttctgcctgcataagatgttttaaatagtgctgaccttaatatccagtatttatagacccagaacatacattcttcaatgtattatattttacattaagttcaatgcaaagggtgccagattttcccaaatatgtgatttggttttacttaaaggtgcaacatggctaaatacaatattcgtaaattaaagtataagtaacactgttgagattacactctttaaaattgtaatttctagtgaatttcattagtgttaccggaaattgatgtgaacagtgcacctggaattttgaaaatcttaactttcctacactcaataattaggccaaaattaggcccttcaggctgtctagcaaagagataattgtgaaaaggacaaagttgacttttaattaccaaagtttaaggaagttaacttggagaatttagatgttaaaaaagaaataactgtataaaaaccctttcaatttatccaaggaaaattatttccaccttcattccccaaccagcttcttaagatccctccttatgtgtcatcatacatgataatttaatttttgtttatgagaaatctttttggcttaattaggaaggagtgatgttgtatttaagtcattttaaatatttcacagtaatatttggtcttagccatgacacacactcattggtattgagtgtccatcactttaaaaactaagtattatacaaaaaatagtccaaaagtcaaatatttaaaaaaaattatctgcatcataatgtttagagaaaaatggaaggctaactctaattttacacaggattttgtacattacctctatttaagtcagcagtacaaagaggcctcaaaaccaagccttctccaggatgtgttggggaaatggctggagaaaatgtagctgtattctgactccagtccacttctttgagtagacttgggtcaaacataggagtttcatcaggtttcatttttctagtaaggtctaaaataaaaatttgaatattaagtcactttatttaatagaaggaaaattatgattgttgagaaagttaatataaattaatgcaattagaagcattctttagcacatatgcgagatattttactgcaacccagcctgaatctaacattaaattccacaactacagataaatagaaaaatcatgcctactatcagataaaaaaatggctaagtgactaaattagtaagttttaaactataaaatcccatttattatcaagtctttttttttttttttttttcagacagtctcactctgttgcccaggctggagtgcagaggcgtgatcccggctcactgcaacctctgccttctgggttcaagtgattctcctctttcagcctcctgagtatctgggattataggcacgtgacaccacgcccggctaatttttttgtatttttaatagagacgggatttcgccgtgttagccaggctggtctcaaactccygacctcaggtgatctgcccgcctcggcctcccaaagtgctgggattacaggcgtgagccactgcgcccggctagtatcaggtcttttaaaacatgtttttcctctgggttggtgctactaaatgaatagctgacttttcatgggctcttaaattttttacattatgttcttggattttattattgagccaagaaggcatctgtttcaacaggaaattgcaaggggaaaaaaattttttttaaaaaagtaatctcttagtcttacttgccaataaagaaaactttcagctgtgcacggtggctcacacctgtaataccaacactttgggaggccgaggtgggcagatcacctgaggtcgggagttcgagaccagcctgaccaacatggagaaacccccatctctactaaaaatacaaaattagtcgggcgtggtggcgcatgcctgtaatcccagctactcgggaggctgaggcaggagaatcgcctcagaacctgggaggcagaggttgtggtgagttgagattgcgccattgcactccagcctgggcaatgtaagagtgaaattccctctcaaaaaacttactgggcatgtagcctttttttttttttgagatggagtttcgctcttattgcccaggctggagtgcaatgatgtgatcttggctcaccacaacctccgcctcccaggtttaagcaattctcctgcctcagccttctgagtagctgggattacaggcacctgccaccacgcccagctagttttttttgtatttttagtagagacggagtttcgccatgtcagccaggctggtctcaaattcctgacctcgggtgattcgcctgcctcagcctcccaaagtgctgggattacaggtgtgagccaccatgtctagccacatgtagctttttttttttttttcaatgaaccatgaatagaagaaaattgatgaacaggctcaaattaatttttttttttggcattctcagaaatactttaccttggctatgctagatatacactgcaggattttgttttcacagcagattttctaaaaatctgtggtatggaccaggcatggtggctcgtgcctttaatcccagcactttgagaggcagaggcaggtagatcaccagaggtcaggaggtcaagaccggcctgaccaacatggcgaaaccctgtctctactacaaatacaaaattagccaggtgtggtggtggccacctgtaatcccagctacttgggaggctgaggcaggagaatcacttgaacccaggaggtggaggctgcagtgagctgagatcacaccattgcgttccagcctgggcaacaagagtgaaactccgtctcaaaaaaattaaattaaaattaaactgtatagtgtttctcagttgcatctaagcagcttaaaaatagctggtgtttttcatgctattgaaaagtgatcatgatatttccccctcttttttgaacatttagaaatgagcaggttctcactagttgtaatgttttaaaactgagactaaataacagagaagtaacgataggaaggatgaaaaacaaatcatacaaagcataaaactggggccagggggcttctgtgcagcacagaattgctaaaagaaacagatgcttcccaacaattaaaagttgagtattccttatccaaaatgcttgggaccagaaatgtttcaggttttggattytttttttttttttttttttttttttttttcagatttggggatatttgcatatacataatgagatatcttggggatgggacccaagtcaaaattcatttgtgtttcatatacatcttatacagatagcacaaatattttacacaatattttaaataattttgtgcatggaaaagtttttgtacattataccagatgtggaattttccacttgtggcatcatgttggccctcaataaagtttcaaattttggagtgttttggatttttggattagagatccaaaaaaagcagtccccaacttatttctatatccagttaaagaaaccatattttaatgagagaacaatttgcccaataacctaacccccaattgttccttatttcataagtcacagtatgctttagggcaaatattcttaacttttccttaaagatggataataagtttctgcctgtataatcctatgtaactatataagcaatgctgcaatatactagttatgggaaggtagtgtgatgtgatgtaacaacagaagttaacacttgctcagcacttcttatgtgccagactgttgaaagagctttactaattcatttatttcaaccatcctacaggttaggagtggttattatctacattttaacaratgagaaaatgttaagtaacttgcccaaggtcacaaaattagcggagccaggatttaaacctaggcatagaaagagcatgagctttggattcatacctggtgttcaaatgtcaactgtgtgatatgtactacggtaattaagcttttagaatctagtttcctcatttgtaaaatggagatgaaattactgggagaattaaatgcattactgtatgcagtcatgcacttagcagtgcctggaatactgcaagtacttaataagatatatgctagttagcaataaatttaaaattaaagtttataaattcttgttcatttttttttacctttaattcatgaatcaggcactgtgctggttacaggaactacaaaaagaatgacaggctcttacgtttatgttataccaaaagttagcattcttgggtagaaaagaacgtagtttataatgtagactgctgagaggtccccccagccacacacacacaaaatgattcaaattatgctgcatacactatacccagttctaacaatattaaggaaaatatagaaattgtgatgatcaagcagtcatttcaaatttaacaagtttaatagccattcaaaataggttttttgttttgttttattgttttgagacagggttttactctgttgcccaggctggagtgcagtggtgcaatcatagctcactgcagcctcaaactcctgggctcaagtgatcctcctacctcagcttcccacatcagcctccagagtagttgtgactacaggctcataccaccacgcctggctaatttttgtatttttagtagagatggggctttgccatgttggaaaggctggtcttgaactcctgacctcaagtgatcctccagcctcagcctcccaaagttctggaattacaagtgtgaaccagcatgctcagccaaaacaagtttttaatagatgaaattgagtccacgtgttttagtgttttgtctaaattggacccttgaggtttttgtgtgtaatctcatctgaatggtaggtagcaacattgtttttcaggtatgtagataaacaggctaagtattaataaagtgaaatgtgtacagtattaaaaatgtaaattcctcgaggcagcacactatttaaacattttggtcttgctattaaacatatagttgtaaatacaaagttcaaagaaaactcaaaagagaatttaaatcaaccttaaccacatttaactagattcctttttcctataaagttgtctgtgtttacaataaaaatgtggtctagaaaacatgaaaaatagggttaataattttcatgagagggaagaagtatacaggaaaacaactaggattatgaagcccttaaataatgawwtttaaccaggaaatactaatattttcttgtacttttctttgatgagacagtccttttccacgaatgatcataaaaataaataatattggctaacacttattgaaaactttctatatgttaactcttaaaaatacaatgaacgatgtatcattattatcccaattttacagataaggaagcaggcacagtaacttgctcaaggttagagtgccaataagaacagagtgaggattcaaaatgaggcaacagggccagcttcagaagcccctgacctgtgccgttacacagggccctgcacttaagtttgataccctgctgccactgttttgaagttcttaattttttaacaaggaaccctgcattttaatttggattaccacagattacgtagccagtcctgctaggtagtrtgacttcagactctgctcttaaccattacactgaagatgcactagagtagataaattccctatcttactgttgtacaagggttaaaaattaagtcataagcagcacttagaacctacatttggaaaatgggaatcagactagtcaaaatacattaaacaaagcattacagattgaaataagaatctattaaccaggcaatcagaaattaacatcaaaaatttttttatgagctattctacaaaacagagccatactgaaggcccactttagctcactctgtcctcaaaccgtaaaattctgctggtgcccaactaaggtactgggcaaagtgaagcaagatatgacttgaaacctggttccaagggggtttagaacataattaaataagtaattttatataaataatcttttagcatcttcaggtgcccagatattgcaaaactaggaaatttctgcgaataaaattgcacagttgtgtgaagcggaatctcatcatatcattaggttctttaaagtttttagatgaactttaaacactaatcctccttaagtattcctcagaaccttttctgattaactgctaaattagcaggcgtttagaagacccgtttaagcctaaccctagcccaataatgcctagtgaatgaataacgaataagacttacctgtaggtcacatttcagaaaatccagaaggacaaaaaaaaaaaaaaaaaaaaaaattcccaaactgccacaatatcgcggaaagcatacaccaaattcatttttactagtcatcacatcagttgaatattttttcactcaattgaatattttttaaacaaaacttcaactatttggcgtctgagcctctgtatcaggttggaatacgaatggggagagaggctgctgctagaagcaaccaacggagagcaacaagtaatagacaccggagatgaagattttaaaagtcgatctacaaattttaaaaaatacaatctaaggccaaatctaaaccagcctatgtatttctcaagagctcctggggaaccttctaagtacaggtgaatgggggaggggcggacttcggattcctttatattcattttataacaatttcgataacaagaatccattctgaatctattccgttaaagatttttaacacacctggccatatttattaaattgtgtaactgcatgaatgttcaaaagtattttctgatagtttgayctttacaatctaggcgttattcccagtctaccgatgaggaagctggagcacctggaactcccaagacttgccccttaggtaacacagcaagtaagtgacttggggctagaatcctcgttttcgcatcttgagctcgattaccatcctcaacagaccccaatctttacatcatcataccatacagctagcgctctctcccctatttagcaaatcctgcctaaattaatttcttaagatccattctaggattcgttcatgagggattatcctaacaaaacgaatcctataatcgcccgttcaattttgtatgaaaattttaaattagtttggcttacataaacatcagctcccgcaacagaaatcacagtacagtactcggtatttctaggggtaggagcctaggaaaaagagacaaagaatgtccctctgtaccctggggaaagcgccgacctactcggtgcggaggtggtcttcggagcagctgcctcaatggctccgaccaccgtgggatgcgcccgggaatgggagaagagaaggggcctgggacgttcgtgcccattcaaaaccgatggctgcagagagcgcgaccaactgtctcatttcccacgccaaagtctggggagcgaagttccgaccccagtcccagttccagccctgccaggccaagaccagcgtatggccggaccgctggccatcatccttaacctctgctccaggcgcgcgtgcgttcaacttcctgggaaccgcgctccacaccatgtgcacccagctggcgaggattaacgcccagctcctccacacaacacccccgggggcctggccggggcaccagacacacctgttagataaacctgagggcaggcccgccccagcccccaggacacacggtcctgctctcgcgccccggccccggtccctcctcacccgtagaggccctgcggtcggcgctcctagccaggcgcgtcggactctcccccaccagtgtgcacagcaccggatccggatccggcttcagcgccagccccacctcctcctccaccgcccgcgccacagttgggaaccgcggcccagacgtggcagcgccaacgcctccacctcgcctctgccccctcacgcagggccgcgcgcaggcgagcggaggcgsaggccaaggcgccacccgcccaggcccggagagcgaggggcggggcccggagagcgggggcgggaccaggagggcgaggggcggggctcggagagcgggggcgggaccaggagggcgaggggcggggcctgaggctcgagtcgcggcgcctggggcggtggccgccggaccaaagctggcctctcccggctcctcctcctcgctccccaaggcctttcccaccgcgtcattgtctcggtttatctgcagatacgtctacctagcagtcagcccagcagcgtaagtggtgaccagtgtgggcctctttgatcctgagaccgaaggctcggccactggccctctccatttgttccttgttgccctcccttcatgattcaatccattaattaggacttttcctaccagctggcagttcagagctccgcatccccaggcctctgagtcacagttcctgccttcatgaaactaggagttggggccactgcattctactccttcgggactattgtttcatttctcagtccctcaaaccctttattggatgaacatggggttaggacagcggttctccactgcaacagttttgcctcccaggagacatttggcaatgtatgaatcattttcagcctctcatctggggtgagatgtcattggaatctacagatggtggagggcacaggtgagtagaggccgggaatactgcttcacgccttacagtgcgcaggacagcgccgcacaacaaagaattacctggcctgaaatgtctggagtgctgaggtttagaaacctttcgttaggagaagaaaagtgacttttttcagagccccatttctgaagtgtcttacctaagtagcactttgtccctattttaacagatgaggaaacagaggttcagagatgttacataatttacaaaagtctcatagctagtagctccccttccttgccttgtaccataattttcaatttattgaaatcgcaaagtattttattcttaagcaatagtattcaaagaaccccatagatcatataccagaaatcatattttttgctcatttgtgagatttaaatttcagttaactcctttactgatttatgctttctcagaacttcaaacatcagtgagttgatggcatccatatctctgtttttatctctgtttttacacccatacatacaaaagaatatatagggcatgagcagaatgtggtggtatgcatccgtagtcccagctactccagaggctgaggcaggaggatcacttgagcccacaaggttgaatccagcctggacaatagagcaagaccctgtctctaaaaaaaaaaaaaaaaaaaaaaagaatatgtaaggcataaataaaataaacactcatggctgggcgtagtggctcacacctgtaattccaacattttgggaggcctaagcaagtggatctcttgagcccaggagtttgagaccagtctgtgcaacatggtaaaaacctgtctctacaaaaaaaaatactgaaaattaggcaggcatggtggcatgtgcctgtagtcccatctactcaggaggctgaggtaggaggataacctgagcccgggaggcagaggctgctgtgagccatgattgcaagactgcactccagtctgggccacagagcaagaccctgtctcaaaacaaacaaaaatttaaaaaaatgcttatgtacacaccactaatcttaagcatatggccctccccgtttttcttatcagacttctggtcaaatgttttcagtgagtttatcctgtacaacaaactgctgtatgttttataaattagcaaaaagtgaaacataagcaattctaaaatcacagaacacaaggcttgtaagaggtacccccagagatctcatactttccacatatactcctccttacccacattgggccataagaacccaatttctccttaatagacaaggtcgattactctggccagtacagttaacccctttctttgcctgtaggttcacttggcaatgaggagcccaagataaccaggagacagtctcaacttctggtttaatggaaccattggtatgtcctttggttgatttttatttatttttctagattcttagaagaaatgctgcattcaccattattctttttttttttttttttttttttttttttttgagagggagtcttactctgtagcccaggctggagtgcagtggtgtgatctcagctcactgcaacctccacctcctgggttccaattaagcaattctcctgcctcagcctcttgagtagctggaattacaggtgcgcactaccacacccagctaatttttgtatttttagtagagatggggtttcaccatgttggccaggctggtcttgaactcctgaccttgtgatccacccacctgggcctcccaaagtgctaagattacaggtgtgagccaccgcgtctgaccaacaacaatattctcattggcacaaataaggctattacgtggataaacatagatgtcagtgattgagttgagaagtgattcaggaacgttggcctgaatgagaagtttaagaataccttggccgggtaccatggttaacacctgtaatcccagcactttgggaggccaaggcgggcagatcacgaggtcaggagttcaagaccagcctggccaacatagtgaaactctgtctctcagaaaaaatacaaaaattagctggtgtgctggcacatgcctgtagtcccagctactcgggaggctgagacaggagaatcacttgaaacctgggaggcagagattgcagtgagccgagattgtgccattgcactccagcctgggcaacagcgagactccatccccccccaaaaaagaataccttagccaatttatttcatttatattttcctcttaatgtttgcacaggaattagatataacaatccatgtctaattaagtatagaagagttgtttcactaggtattacaagttccaagtgataagatattataattttaaattagccacattgtttctttcttagtggtatataaattaatggcgtgtcatacaatggatgtgtctaagattggatgaaatatggtacaggccaggcacggtggctcacgcctgtaccattccagcactttgggaggctgaggtgggtggatcatgaggtcaagagatcgagaccatcctggccaacatggtaaaatcctgtctctactaaaaatgcaaaaattagctgggcgtagtggcacacgcctgtagtcccagctactcaggaggctgaggcaggagaattactggaacccaggaggtggaggtttaagtgagccgagattgcaccactgcactccagcctggcaacagagcgagactctgtctcaaaaaaaaaaaaaaggtaatatggtacatacttaatatggtcttaaagttataattctctgttatggttttaatgtcccctccaaaactcacattgagatttaattgccatggtacagtattaagagggtgaggcccttaaggggtgattaggtcatgagagctcttccctcacataatatggattaatgctgttaccgtgggagtggtttcctgataaaatggatgagttcagctcctccctgtctttctttctcttacactactccttccatgtgatgccttcagccatggggtgaccctcaacagatactggtactatgctcttgcacttcccagcctccagaactgtgagccaaatatgcttctttttattatgaattacccagtcttggtattctattacagtagtagaaaataggcgaagacattctctaaacatgtttataaattatttcatttgatcctcatatgaatcctgtgacataaggtgggcactattatttccataatgcaagtgaaactcaagcaattttccttttctttttgaaacaagttctcactctgttgcccaggctggaatatggctacacaatctcagctcactgcaacctctgccttctgggctcaagcaatcctcccacctcagcctcccgagttactgggactacaggcgtgcagcaccacacccagctaatttttttgtatctttattaaagatgaggtttcaccacattgctcaggctagtctcgaactcatgactagccatgagttcaagccatcatgtgcccacctcagcctcccaactgctgggatgataggcatgagccactgtacccagctataatttttcttttttttatgagtgaggctgtgtgcctgttctcatgctgctaataaagacatacctgaaactgggtaatttataaagaaaaagaggtgctcatgcctgtaatcccagcactttgggaggccgaggcaggtggattacctggggtcaggagttcaggaccagcctggccaacacagtgaaaccccatctctactaaaaaaatacaaaaattcaccgggcgtggtggtgggtgcctgtaatcccagctactcgggaggctgagacaggagaattgcttgaacctgggaggcggaagttgcagtgagccaggatcatgccattgcactccaggctgggtgacaagactgaaattccgtcaaaaaaaaaaaaaaaaaagtgagctgggatcatgccattgcactccagcctgggcaacaagagtgaaattccatcaaaaaaaagaaagaggggccgggtgcggtggctcatgcctgtaatcccagcactttgggagtctgaggcgggtggatcacaaggtcaggagatcgagaccatcctggctaacacagtgaaaccccgtctgtactaaaaatacaaaaaattagccaggcgtggtggtgggtgcctgtagtcccagctactcgggaggctgaggcaagagaatggcgtggacccgggaggcagagcttgcagtgagaggagatcgcgccactgcactccagcctgggcaacagagcgagactctgtctcaaaaaaaaaaaaaaaaaaaaaaaagaaagaaagaaagaaaggcagaaagagaggaagaaagaggtttaatggactcctagttccacatggctgggcaggcctcacaatcatggtggaaggcaaagaaggagcaaagtcgtgtcttacatggcagcaggcaagagggcatgtgcaggggaactcccctgtataaaaccatcagattggccaggcatggtggctcatgcctgtaatcccagcactttgggaggctgaggtgggcaaatcacttgagttcaggagttcgagaccagcctggccaacatggagaaaccctgtctctactaaaaatacaaaaattagccaggtgtggtggtgggcgcctgtaatcccagctactcaggaggctgaggcaggagaatcacttgaacccaggaggtggaggttgtagtgagccgagatcgcgccactctactccagcatgggcaacacagtgagacaccatctcaaaaaaaaaaaaacctatcagatctcatgagacttattcactatcacgagaacagcatgggaaaacccacctccatgattcagttacctctcactgggtccctcccatgacacgtggggattattataattcaaggtgagatttgggtggggacacagagccaaaccatatcactttttttctttatagacatttgaacttaagaactcaataaagctggccacagctcacgcctgtaatcccagcactttgagaggccgaggtgggcggatcacttgaggccaggaatttgagaccagcctggccaacatggtgaaactctgtctctactaaaaaatacaaaaattagccaggtgtggtggtacgcgcctgtagtcccagctactctagaggctgaggcaggagaattcacttgaacctgggaggtggaggttgaaaaaaaaaaaataacaaccttgaaatattacagaaatatagaacaaagagtgatcagtctccttatttctgccttcaaagataaccaccgtgttagtccgttttcacactgctataaagatactacctgagactgggtaatttataaac

SEQ ID NO: 97727 - DNA, 23182 bp, Homo sapiens
gtctacagaagagctgcacgggtggtgcagagaatcccatcaacccttcactggcttcccttgtggtaacaccccgtcaaaaccagaacattttctttttttattgagctggagtttcactctttcacacaggctggagtgcagtggtgtgatcttggttcactgcaacctccgcctcctgggatcaagtgattttcctgcctcagcctcctgagtagctgggattacaggcgcccaccaccaaacctggctaattttttttgtgtttttagtagagatggggtttcaccatgttggccaggctggtttcgaacttcttacctgaagtgatccacctgtctcggcctctggaagtgctgggattacgggcgtgagtcatcatgcctggctaaagccaggagattaacatgggtacagctctgacagtgaaaccccgggctctctgttccagcttcctgttttcccccaaagtcttttcctttcctggcccggcccccatccagggtcccacatggcatttcatccttatgtctcttgagtctcttaaaagtctatcttggttcttcaggctttccttgtctttaatgactttgacagtcttgaggaggcctgctcaagtgttctgtaaaacgtcccctcatcggccgggtgcggtggctcacgcctataatcctagcactttgggaggctgaggtgggtggatcacctgaggtcaggggttcaagaccagcccggtcaacatgatgaaaccctgtttctagtaaaagtacaaaaattatctgggcatggtggtatatgcctgtaatcgcggctactcgggaagccaaggctggagaattgcttgaacccaggagggagtttgcaatgagccgagattgtgccattgcactgcagcctggacaacaagagcgaaactctatttccaaaaaaaaaaaaaaaaaagcccggtgtggtggtgggcacctgtaatcccagctacctaggaggctgaggcaggagaatcgctgaaacctgggaggcagaggctgcagtgagccgagatcgtgtcactgcactccagcctgggtaacagtgagactctgtctcaaaaaaaaaaaaaaaaaaaaaaaaaaaaatgccctaatctgggtttgcctgtcttcctgaggtcacactgaggtgacagggtttggggcaggacaccctcctggaggcccctttctcctcacatcctagcaggggtcgccgagaccctgacgacttcacccctgatgttgacctcggccccctggtgcaggtggggtcactggatgtcccggggcccattgccatcgtctcctgtccctgccctgttctgcggcagcgagtccctcagtccagcccacactgggcagggggtggggggagttttatttagaagatgaattttcatacagaaaagcctaaaaatgaaaggacaaatggcccatcattgcattgcttagatgcctgttgacattcagaggcatgtagtaaatacacatggtaaaaaaaaatgtttgagtactacagaaaagtactattaaaactatcacaaagcaaagacccgactgtcttaaatcaagaagatatggcagttccagtgcatgcgcgcacgcacacacacacacacacacacacacacacacacacgtccttacatattaacccctcttctgctgcatctttgttatttactattgtttttatttatttgagagggagtctcactgtcactcaggctggagtgcagtagtacaatcttggctcactgtaacctccacctctccagttcaagcaattctcctgcctcagcctcccgagtagctgggattacaggcggccccccaccacacctggctaatttttgtactgttcgtagagacagggtttcatcatgtcgaccaggctgttcttgaactcctgacctcaggtgatacatctgccttggcctcccaaagtgctgagattacaggcatcagccaccacacccagacaatctatcactatttttagagacaggatctcgctctgttgcccaggctggggtgtatcacagctctctgcagccttgacctcggggccgcaagcaatcctcccgcctcggcctcccgaagagctgggaccacaggcgtgcactaccatgcctgggtaagttttgaatttgttttttatgcagacaggggtctcactatattgcccaggctggtcttgaactcctgggctcaagcagtcctcccatctcagccccctaaagtgttggggttacaggcgtgagtcactgcacccggccctgcagccttgtttttggccctcacctaccttggggtatccatgttgtgggtgcacccccggttatgtgacctctgccctcatctgtcctctgggagactgtgttctttgccctctatgaggcaaggccccagttcctggctccgtggcccctctgagagtcccgttgtgttcttcctgccctgctagagacccactcccagcaacacctgggtgctgtctgtcccctgctgagctttgctccatagccctcaggcttgggaggtccatctttggggctgggaggagctgtccccctgatcctcttgggcgctgtcagggaagggtagaggtgagcccccatttataggtgaggaacaggtttgaagaaagaaggggctgagttatggatgccccaaagtgtctgctgcctcttagctgtgagcaggggccggctgttctcggtcctctcccagtcttgattttttcatctgtagaatgggaatgacaactcctttttttttttttttttttttgagacagggtcccactctgtcacccaggctggagtgcagtggtgcagtcacagctcactgcagccttgacctcctgggctcaagcgacccttccaccttagcctcctgagtagctgggactacaggtgtgaggccactgcgcccgctaattttttttttttttgagacagtttctctcttgtcacccaggctggagtgcagtggcacgatctcggctcactgcaacctccgcctcctgggttcaagcgattctcctaccccagcctcctgagtagctgggattacaggcatgcgccaccaggcccggctaattttttttgtatttttagtagagacggggtttcttcatattggtcaggctggtctcgaactctcgacctcaggtcatccgcctgcctcggcctcccaaagtgctgggattacaggcgtgagccaccatgactggcctccagctaatttttttttttgagatggagtttttgctcttgtcgcccaggttgaagtacaatgttcgatctcaactcactgcaacctccacctcccagattcaagcgattctcctgcctcagccttctgagtagctgggattacaggtgcccaccacctggcccggctaattttttcttgtatttttagtagagacgggatttcaccacattagccaggctagtctcgaactcctgacctcaggtgatctgccagccttggcctcccaaagtgctgggattacaggcgtgagccactgcacccggcctgcagctcattttttaatgtggagagttgggggtttcattacgttgccccggctggtcttgaactgatagcttcaagtgatcctcctaccctggtctctcaaagtgctggcattccaggtgtgagccaccgcacccggtggagaatttacagggtcatagagagtaaggaagagaggacagagccctgtgccgggcgctgctggaggtttgtctgtgttcaccgcaggggtcatgggttgcctgagtgttcctggggcttaggggtgtgaatagaagcctcatgggtggggtgtgggctgtgtgccctcacctggggtctcctgcctgtggagtggctggcatgacctgcagatgaggccactcacttgaaaccctgataatggctggagtgggcagacaatggagtctcacagtgaaggtcctgcctggggccatgtggcccacccctggaggctgctcacccctgccccccatcgttagcctcccagttacaactgtaagccccttgagggcagggctggttggttctgctctaagcccaggaaacatcagtggaagacgcatggttgggtgtggaccctgaggcctcaagacacacctgtccacaagccaatgcggggttccaggaccctgggggctgctgggatggtggggacctgggggacctgcccaagtggcccatcgtcctagaagttcaaagacaacagaggcccagcaggagcaggaacgccgacccccagcgcccaccgaatggtaggggtgcagagagggctctggagcccaggcctaggagaggggcaagtgtgtgcagggcaccctgtaccctcccacacttcgctgaacctcctctctctcggctccgctctgtccagccacgtagagtgggcttactggggcccagggagggctcagctggcttaaccaagcatggttgagcccaggcgcagtgcgggcgacccagggaacagtggtcagcctcagggcgtcagctggggttgcaggtgggcgggggatggggctagagaagccccgaatcgggtcagggcctctgtccatgcctaacccagagcaggaggtcgccgcaggccaaagcagctccgccccctggaggcagctccggccactgcgcagtccccgccgccccgccggagctgggaaggggcgggagcgcggtcgcgaccgaggggggccgcccagtttctgtgcccccgccgccttgggcctgcgaactgggccatccgcgtccctggtgtcccccctaatatttaacaagttggcctggacgtcctcgcggccgggaggcccgaatacctggcctcagttttcccgtccgaaccccaagaatcgatgcctgggaatggaaagagaagccccggaccccggtgtcccagcagggcggggaacctctgacccgctcaggcgcccccagcccagcccagccctttgcgttcggccccctcttcccgtccccctatcccgaccctctgggacccaaccggccctccccacccccagtggggcgcgctctagtagctccggaactgggtgcaaaaagaggaacgaacgcagccttgccccaccctcccgggccccgccgcgggcgcgggataccgggtgtctcggccgggaggctccgaggggctctgtgagcggcgagggggaaccccagagaagaggacgagcagatgcctgagtgcggggtcaaagcagggccccaggccgggagaagaggggggaagggtcgcgcacgtggcctgggggcggggccggccgcttccgcacccctccaaccccggccacgtggggatcggagccctcctccatcgcgaacgggggcgcgcccggggccaggagggaagcatccggggagggggcgggctcccgccggccgcgcgccccggcgtggggtgggcgcgccagcgaggaggcggggcgcgctctgggagggaggggcgtgccgggatggggcggggcgcgctctcggaaggaggggcgtgccggagagggggcggggtcctcggcctcccgccccggcttgagggggtggtgctccgggaaagggtacgggggcgcgcgctggagtggggcgcgccgggagggggcggggctcccggccttgcaccctagcgcggagaaggcgcgctccgggcctaagacgctaggcgctggcggaggccggagtgggcgcgccggggggcgggttcctccggcccgagccccgcccccggcggccgcgcgcggctcggagagtggtggagggcgcgccgggcggggggcgtggctgcggcgccccgagggggcgtcctccgggcggggcgggctgtggccgcccccgcgggctccggtgcgtcaggacgcgtcaggcggggcggggcaggccgagcgcgggcggcggcggcggcgcgcgccgggcctcctcctcctcctcctccgcctcccgcactcgagcagccgccgccggccggacggacgccgctcccgccgcctccgctccgcccgccgcgccgcgcgcccttgctcggcatgtcggcggccgtggcgtgcgtggattacttcgccgccgacgtgctcatggccatctcttcgggcgccgtggtgcaccgcgggcggcccggccccgagggcgcgggccccgccgccggcctggatgtgcgcgcggcgcgccgcgaggccgcctcaccccgggaccccggggccacccccgccgccccccgccgcttctggcccgggccccggcgccgccgcggcgccccacctgctggccgccagcatcctggccgacctgcgcggcggacccggagccgccccggggggcgcctcgcccgcctcctcctcctcagccgcctcgtccccgtcctcgggccgcgcccccggcgccgcgccctccgccgccgccaagagccaccgctgtcccttcccggactgcgccaaagcctactacaagtcctcgcacctaaagtcgcacctgcggacgcacacaggtgagtgcagccgcgatcccggcccttgcgggggcggccgcctgagacccctcccccgccaggaccccgaaactgcgtggcgcgtggggggcggggaggggggcgcgcccgggccgccgccgcgccggccggcagggcggggcctcggtgggtggggcgcgcgcggggggcgtggcggccacgcggtcgggcggcgagcggatggccgccccggcggcagtggcgggggctccgggggcccagcgaggtctgcgggcgggattgagactcctgggcagaccacctctctccctttctgggccttgttccgtttttttttttttcttttgcgttctggtctgggcggtgggcaccgtggttggagcatccggctctggggttctgggttctccccctcccccagcctcagtttccttatctgtgaaaatggaggaggaaccgcgtcgccgccgccggggtggccgcgcggattctccccagaggtcggcagagcacctggcgtggggccaggatggggggagcccggcacgttttctctgcgttctctgtattttaacgagggggagggcgaggctaggagcgcgggttggggcctgagtctgggcgggggaacttcatagtattggaggaccctcgaggggctcgggtccacactgctgtatttccctggcgtgtttgttcacccctacctggcgggcgattcgggaaggtgcgcgtagttggagcgcttcggctacaccaacgcccctcctagcgcagtccccggggcggcgaggggaaccgggagcctggtgggcctggctgtattttttcactccgtcccctcctagggttccactttctggactgggagtttggactgggcaacaggggacggtgggccttgatggccggccctggtttgggcattagaggtgcttgtcccttccggggagggtggggggctgggggaaagctgtgcggctgcccttgggcttggcattctggccttgccaccaaacagaagacctctacccgatctgggtctcaattttctcatttctatcaagagtgcgatgctgcctctatttcatagccatagcggtggccgctttgggcagctggacactccaaggaggcttggtccgtgggctcggattgtagggacacgtggagcagccgaagggaagtgggccgtccagagtggtggggctgagatgagcaggggccgcgaatgccttgcggaagaattgagggtccatctttggggtatggggagccgcgctgggacgcctgagggtggagagcaggagggcgggtgggggcggtggtgtgtagcctgccggccgccccctctctgttctgcactcttttcacccctcgctcagtccctgtcctggtcccaggggcctggaggctctgcccaccttgagacacagacgggaaccgagggcgtcaagacaggacttgggtggggtctgcgttttctgcgaggagccacacatcctcggcggaggggtcccagggtgttacctctttttgagggcaatggggtccgtgtatctccgcggggagggacattgggggtctgtgaagatggcgaggcagcgttgggaacagaaagggaggtgcctctccgggcggtgggcaggggtccaggagtgccctggctttttgggggtaagttgggcgatctgaacagacggggctgaagtgggagcctgttgggaaagcgactcccacctgtctacccaggtcattcttttcttgccagatggcgtggcctgagagctccatttgggttttctgagtttctgggttaagtggacgggatggccacctccctgagtggcacccaagaggcgcttccataggcccccgggtattggggcagcggtccctaagccagcagggaggggagggatgggtttggagtcctgggaaggcagtattgttatcccgggattgcagtaagaaacaggcctgggggtgcccagtcgggcatccccaggggtggatgcagttgtgctgatggcgcgccaccgtctaccctgtgtggtgggggagggcagggcggatctcctggcaccctcccccaccccttgagcctgctgacgtcccattccaaagccccctttacagtaacgatttggggactgggagggcagtcccaggcccaggcaccttggattcggtttccaaagggttttggatacttgtggctttccaggctcctcttccgggcctccccagcccccaggaccaccaaggggtctgtgtaaacggcctcttttagtggaaggtggtctggtttttcagcccccggaggagggagggaatggctgccgttaagctggttttgggggacaggaaggccatgcgtttttttgggagggagccccattgcagggctgtccctgaatggagtggaggccgggaaagatccgcagacgaacccgagtcaccggtggctgcagggctgtcccgggggccattgagaacgagttccacccccacccacccctgcctggagtgcttctctgtaaagggaacaccagtcgtggcctggccccatttttacagataaaccaactgaggcacactggaggagccccacctgtgatttcggccacatttggccctgggagcagggaggccaggggagcagtgggatgttcttcatgggggcagcaggcggcaggactgcacctcccgtcccctgggtctggcccacagcccctatcctagcccggccagctctcggctctctctcccctgcgtggggcggggaaggactttggaagctgtgggtgatgttgacgccgttgctatggttacggagagtgagcgagccagcgagttggggcgggggcgggaggagaggctggctgtcggctccctgctctccaaaccccctgcatccccggagggccccccccccgcccccggcatgccagtgcccggcacaccgtcagcctgcacctccagagggtttgccgacaccctccccaggagaggggctcagacctggaagggttcttctcacccagggcttctctcctccgcacttaccgagacatttggggcctgatcgttttctggggaggggctgtcctgggcactgcagggggttatgcagtgtccccagcctctacgcactccatggcaggagcaccccctccccagtcgtgacaatcacaaatgtccccagaccttgtcaggtgccccccagggggctgcagggtcacccccagttgtatcccactctgaagtcccctgccgcaggccagcacccagcatcccagtccccgcgccccaggacttagggaactgtgtccgtggtggcggggggcggggtggggggtggcaacagggatgctagtgatgacggaaagcgcttcctggaggaggcagcctgaggcccactgggctgggtggggcagggaatgggagaggaagggcgtgctggctctggggtctgctgtggaggtagggacttgaggtggggagggggcacctcggcaaggtgaatccctgcacttaatcccgagggtggggacgctgggggcggcagtgaggcaggctgggctttgcagaggcaaatccatttatggagaagggattaggatcagagaggggttgaggagggcaggacgagatgtgggagggagcgaggcgtgctggtctacgcactgggttggagggagactcctcaggacgaggtgtgcagaggagtgtctgagtgcctgccaggtttctgatcccttgctgaagagggccccaggaggacaggtgggtggggaaactgaggcccagagggggaagcagccatgccccacttcattctctcctccacccccaggcagaactatgcgctcctgtagggttgggatggcagtgctggtgggcagagcttgggagaactggcagcttatctggggagggtcggagtggggcagtgccaggccatagggggtggggggtagggggccagggactgccctcccccacccaccgcctctccagcctgcagagtgcagagagcagctggaactgcctgcaggtgccccagctagtgggatggggagggctcccccagggttgtggggggcgataaccacccccacccaggctctctgataaaagcagcccagatcggtggggaggaggcacatgataccagcaggrtgagctgtgggggcggggggcaccaccctggcttagaccatttctggaacagaggttacacaggcaccagggtccttgagggggttgtcccctgccgacccccaggtacccagagtctggtgcaggaggtcctggcctgggttgggcctcaggtgggcctccttttatgtagaagggagtagtgatagtttggcggcggggtggggaggacaggagtattcaagatgctgagcaaacattatctgcccttgctcttgttggaaccagagcttgatcccctaggcctgcattctccttttccacagatatgcattaagcacctgctgtataccaggcctgtgctgggcattgccggggacccagccgtcaatgaagtgcctgccttctgctcccactggagtgcaggggtgcagatattacacccacaagatgcatgcgtttttggaagcctggtacaaagacagagaagctgaccaagggtgcttggggggcaccaggccactgtgaggggcactgctgctcagagaagctccgggcaggatcagccatcagttttgaccctaggccagggcggaactcaggaaagccaagcgcagtctgggtgcccaggcgggagctgctggactactgcactagtccaggagtgagctgggaggggcagggtggggcctggacggatcccgaaggtgrtgggatttggctggcaggtggcacgtggggaggtacgggattgacacaagggtgggtatgcctgcctgcgtgtttggcgggaacagcagggggtttggaaaggggaagtctactggaggagtggggatgggggaggaaggaagctttggctttgggaagtcaggggagctaggggcagagtgggtgtgggggttgctatggcccagtagtattcgagaccccacccccaggctggcagggcctcaccaccagtgttcccccttttctgcagcggctcccagaagcagctgcctataggttctatwgaacctgctcaaggatcaccttcaggagctcctcccttccctgggtgggtaagaggcctccccagccccagcctttcctggctctcctgggatgcttgctttgcggctggggctggtcttccccacctgtgccctcccctacagacccgaccccacctgttaggtggacgtgagtgccccggcaggcagccggccacagccccgctccccaccccaaggccccccagacaagctcaggaggtgaggcttccctgtcggaaccagggcccttggcacagtcccgcagtcctgtctccaggcccctcctgtgccggctcagacggggccgggccaggtttccaggacttcctggactccatttttctgagcctgcctgtttccgaggctrtcctgagctcacccgggcccagcctgagtcagagggtcaagtccaccgcggccccgcccacactgccctcccgcgttgtccccacccaccgcatcctcagggcgctgcgtctcggccaggtagcgcggagcagctgggtggctgtgcacctgggggcccggctggctaggagcagcgcgctctgggcccccacaagttcaccccaccctcctccctgcgagtggattgtgtgcgaggcagggcctggcatttcgcagaggcgcttcgcccagcgcagcgtgggtgggtagcccgtgcaccccctgccccgccacccacgtgcgcatgtgcgcgcctcagtctccaagcgcggggcggggctggcaggcacccaggccggagaggcgaccctggcccgggccccctggccccggcgggagtgggaccacgtgagcggggccggctggggctgcggatgtccccgccgccgccgccgagctacgtgcggcagctgtgttcccagcggctgcgcgcccctgccccggtcgccccccccccccggcaacctgctcctccttgcaaagtggaactgggggagagggagtggagaccagccccgccgccctgaaaggggaagtgaaccaactgactgtccggcacccagccgtgggatgttcccccttccctcctgccgcctccccgcctgtgccttgcaagatggcgacacggcggcatgttccctggaggggcgcgagccccaatcccgtggtctgctccagccgcgctcccacagccagaccccgtccccagactgaggcccttgggagctgtcagggcccagtggttgagatgggagtggggtcccttccagggctgctctgcgcctcttgcttgggttgtagacggcccccagctggggcggacccgcgaccccagctgcatcctgggttgcttgsgggagacttggggtgtggagcaggcagccccagggatttgaggctactgttggtcttggtgacagctggtctctccccctctccagctgcctggattcacaacctcttggggaggggggctgctggtctctgtctgcagtcttgttttgctgagggtgtcggggtgtggcagggaggaaggatgagatgagaagggaaggttttttcttccagctcttcttgggtcacgggtgatcgctggtgcccctcagtgggcagacccctccaccctcccgtgcccctcctcagctgggctccccagggcagcccctgatcttagagcagagatgtcactcggtcaccctgagcatggccgtgcccctcccgctgtctctgtacccctcaccatggtccctgctgtgggtccttctaggcccctggctggctgcagttcttcatggaccggtgggagtgctcccagggccagagcaacctccagtgctgggcgtgggctgcccagtttgtaacccaccgggtgactaccctcctggccctgctgtggcttccttgagaataggctttggggccactcaggggagttggttctgacgtctcttttgctactcagggctccaaccagtgccacgaggggcatgcacatccggtctccatccacacaacccaccctggggtgtcacgggaataacgtcccggaatgccagggtccagggtacctggtgcagggcccgaaagggtgggagcttcggggatgcagggccctttgtcctgcttcggtccctgggtggaggtggactgacctgcccctccccagtcgttggagacccctatctgctggggagacgctgacatcacgatgccacatgctgtgggcgtgagaccccggctaaaggaaggggtcgggtggcacagttctagagcaaagacccacaccgcctggaggcgcacaggcaggcccagatggtgacggctggttaggggcaggatgggcgaggcccggccttggcggtgggaggggactgtggaggaagtggccgggtggtggcccgcccctgcccagcgccatctgtcccgtgggggtggggcgagtccagcccgccgggccccgccccttcccgggagaccccgccccctcccctccctgtgagctttcctgcctgtcttccatctaaccacaccccgagatcggggcccagactgactgtgcctgcgggttcctcccrtgyccccttgctcgtggaggggccaggagggttagggaggttgccatgattgtacccccttaacccagcctttgcatcccaggtggtcatttggaaaaggaggggatcatgcacagatggaggcccctgcatgcccctgggtggggggcagggacagcctgaaggccgagcatgccttctgagcgtgcctgtgcctgggacagacactgggaggcctttgctaatccctgccagggtcccgcctggggccagaggctgcgagggcctggggagcttcagccttgggggtctgcggcggttacttacggttaacagattctgggctcgccggagagtcctttctaagagctggtaggaaataagaggattatttattagggtctcgtgttgggccaccgsggggcgggtaagggttgtattctttgtgcttctccatgttttgaactcacaccagagctcagcctctaaaacggcacgggacaaatgcccgccaccctttgggatctgctggaacgtgtctgtcatctccccccgcccccgctgacccgctgtctgtctctgtctctccgtccaggggaacgcccttttgcttgtgactggcagggctgcgacaagaagttcgcccgctccgacgagctggcccgccaccaccggacgcacacgggcgagaagcgcttctcctgccctctgtgctccaagcgcttcacccgcagtgaccacctggccaagcacgcccgccgccaccccggcttccacccggacctgctccggcgcccyggtgcccgcagtacctcccccagcgactcgctgccctgcagcctggccgggagccctgcgcccagccccgcgcccagcccagcccccgcaggcctgtagggccctygtgcagcccaccctgaccgccaggatgcttctgccatccaggggtgtagtgaggacccacggggagcctgggccccttccagccgtgggcaaaccctgaagacacccctgcccccctccagagagtgaggagggggcctgagactggacctgggtctgcctgacctcagaggtggctctcaggatgggtgacggggggcttgtgtctgtaaatagccatgatactaactttcttcccatctgtgcaacggggcccccccagggcagctaggaggtcctcccctctcctctccaccaccccgtgctgcccccctcccggggtggggtttgggggggtggagtggacttctgggagccggcccggggaaagcaccccctgccccatccctgcagattgggatgaagtgttcagacagccatagaggagtcgggggttgacacggcccctgcctctccccaccccaccccaccccaccgaaagccatgggagtagttcagggaaatgggggtgcagcccagccaccccccattcgggtactcaatctcaggtgtccacaagttctgcccacggtaggggctgcctggccccccagacctcgggggtagagccaggagtggggcagcgttaggatgcccggaggggctccaggtgttgcttctgagacctgggatggggagggaggggacctctgggttcttccaaagaacatttgactcagtggggtcgggagggaatcctggcttatttattttcctctgtcctcgggtgtgggggccctagctcsccctctctgggtgggtgggtgagagaggctgcaggggaggctggcaccgggcttgggcctccagtccctgccttgctgactttggccgttgcggtatcacgtgacaatcaactctcccttaacgacgactgcggctgttgggctgcgctgccctccctggcctgcaggtggggccgtggagcccatgcccgccggggttgcaggctcttccgggcctgggctgcagcctggcccggccctgcttccctggcctcccctccttctcctgggtgcttggaagaggtgggtcctggcccgtggttgaggtcttgcctcgtggactggaagcagagggctggctgtgcagcctcctggggtagctcgttttttttgcaccgggtagaatattttttcaggcacggattcctttttttctgggcccccatgggtggtccggcatcctcagggggtgtgagtgtgtgtggggggtctctgagctgaacttgggtggggtggggacttgttcctcgggggccacctttgtgtccttgtcagcggtcgtcctgctgtggcctgggttgcatttcctcttggggggggtattgaggacccccagcctggaatgagaagggtccccggttccatgtcagacccagaaaggtggatccccccactgttggctgcaggaggtttttggtacccccttttgttccagaaccgtcctgcctctcgcttggggacaggggggctttggatggcactggtgtgcacctggacccagccccggcctggcaggatccagggatgggtgcctgggatcctggggggagggaggcaggggacgcccttcyggagctgggctcggagggtcctgccccatccagccctcggctctctgtgttctctgtccctagcctcaaaccctcttctggcagcgctagtgagatgccttagtctgtgggggtgggtgggggactggggccccgttttcctttgtgagtcttggttggccccagccctggcaggggcctgtctggarcaggggtaggtagggctgtgggttccagaactctataactgggcccctctccagtgtccaggggctyggagagacctgcgcccacccctccactctcccaggagtcgctgatcactgggacctggttccagccgtttgcaggggaggcggctccragaggcgtgtgctttccgtgggtggcgcccctcccccgccctgcctggcctcatccttgtatttaattaattaaacaagcccctttttaaaccctactccagcgtgtgtgtggtctctcccgtggcagtccccacctgtgggcacgctctgaatccctctgtcccacccaccagtgtggtcccaagttcatccacctcgtggggaaaccgaggcagcgggctagtgaagggggtcttggccaggcccctctggctgagacacaaaatgccctgcccctagccctaagccccgcggagggggctgcctgcagcagcgcgcgctgcgcccgccgggtgtcacccacgcctggcgcagctgcgccccccgcccagcttcccgcccgccccgttgcctggcaaccgaggcacagtgacacggcgcccgggggcgtccaccgcccgccccttccggtgccgcaggggatgggggagcctgcgcccccggggctgctcgccggcgcgggacaggctcctccacggagggtcccccggccgcctcccaggctcctgtgctcctgtattgagcgcctactgtatgccagctcccctagtgggaatagggaagagggggcggtgagagctttgaggccctccccaggaaaaaaccactgtggactccagcgctccccagagcctggaggccggcggggctgggatggggccgggcaggccactcctacacacctgctgagccctggggcttcgcctgctgcccgcccggggaagggggtggtcggcctctcgtatcgcgcggccggcgccggctcacgccagacccctccccaacctgggcggcaaattcccggctttactcgagggcagcctccctcgtgcacccccaatcctgcccgacccatcctcccatcctaccggacgccccacaaacatcactcccgggactctcgcacccctccagctcctgcctggttttctgcccctctggagcaaaatgtctagaatatggggtctacactcgcagcctcgcccctctctctgacggacacactcgcattaggcttttaaattacacgccccacccccagcacacacacgtgcccagaagcagcaccatccttttggtgcctttgggaccccgaccctcccgggcgtccctcccacccgcaggctgctcttgccatgccccctcctcggtcgagggcagttccatcctgcaaggccaaaatccttggggagtcaccctggaccccactgtgtgtctcaccacccacatctggcccatctgaaacctccttgggctctaccttcaaaatagatccaggatctggccgcctttccctgctgtaagggcttccaccgcgacggtctagcctcctcacgactcacctgaaccagtgcaatcaccttggccctggtctcctcacggtttgtcctccccacggccaccagagggtgtccgtgaacacctggggcaagtctggttcctcctctgcccgcaaccctccatggctcccactgccctcacagtcaaagcccaagtcctccctgaggcccatagggttctgcatgacctgccccgtcctctccctgctcttccctcccgcctctctccccctcctcaccctggtccagccacactggcctcctcgctgttcctccaacacaccaggcgcagtcctgcccatggcctgtgccctctgcccggaatgcttttcctccagaagcctgcttggctccctcatcatcttttatttatttatttatcttttattttttcgagacactgtctcactctgtcacccaggctggagtgcagtggtgcaatcttggctcactgcaacctccgcctcccaggttcaagggattctcctgcctcagcctcccgagtagctgggattacaggcatgggccaccacacccagctaatttttgtaattttagtagagatggggtttcaccatgttagtcaggctggtctcgaactcctgacctcaagtgatctgcctgcctcagcctcccaaagtgctgggattacaggcgagaggcaccatgcctggcccctaattttctgtaaaaccgcacaaatcccgccttccccatagaatcacccagaccagccctgtgcccagtccaggctcttctcctgtttctgttctcaaagcactttccacctggcttcaggctgtctcacttattgctgtgttcattgtcggcctccctgcctacaccatcacctccaccagagtggggttctctgctctgcttatggatgtttctagcattttgtggcacacagtaggtgctcagtaactatttgctgaatgaatgaccgacaccagccggcacggatggagcaatcgcataaatgagagttcatctctcacgcatcatcaggagccatgacagggagtctacgcctccactgcccatgataggacagctttgagattagatcaggtcctctgcagagtcgcccatgacccatcccaacccacgtcccctcatcattgcatcctgtcatttatttataattgtggtaaaatcacatgcacataacataaaatttgtcatcttaaccattgtattgttatttgagacggactgtcactgtgtcacccaggctggagtgcagtggtgcaatcttggctcactgcaacctccgcttcccaggttcaagtgattctcctgcttcagcctcccaagtagttgggactacaggcgcccgccaccacgcccagctaatttttgtatttttaatagaggtggggtttcgccatcttggccaggctggtctcaaactcctgacctcggttgatcttccctcctcggcctcccaaagagctgggattacaggcgtgagccatcgcgcccagctaatttttgtatttttagtaggacagggttttgccatattggccaagctggtcttgaaatcctgggctcaagtgatccacccgcctcagcctcccagagtgttgggattacagacatgagccactgtgcccgacctaagactttgctttctattctttttgggtgtatacccaggaatagagttgctcatagggtaattctgtttaactttttccatctctacacaaaatacaaaaaattagccaggcatgatggtgcacacctgtggttttagctactcgggaggctgaggtgggagaatcacctgagccagggaagtcgaggctgcagtgagccgtgatcgcaccactgctctccagcctgggtgacagagcaagaccctgtctcttaaaaacaaactttttgggttttttgttttacatagcagtggcactattttacaatcccaccaaaatgcaccaggttaaacttcccattaagacgtgggcctactccaccagactacagagttgccccatcccagccttgttcctcgtttgtctgttaaaatgcaccctctagctggtatacagtaggcgctcaatatttgttgaacaaatgagtgaacgtggacctggtcattagactgatgacaagagtcgaggttggggagattaaggcgtttcttgagagccagctgtataccagggcgaggggatttttaaagactgtgaacggagtaattcaaccatgagtttcacctggcccaggtttaaggccacctccccgcagaactctcctcgtccagcagagggcgccttaaggtgatatgctaacgaaaggaaataatatgcaaatgagtaatagcgggccccgcggggcttttttggtcaggcgcgccgtggacagccctggcgccgcaggggcctggggctcaagatggcgccgctacagccgccgaaggtcgggcggcggcgctggcgaggctcccggagaccgcaggcagggcagcccctgccctccttacttcctcccgcggccgtctgtcccggcccaggggtccgtcaccagccttggtcgcgcaggagcaggcgtttctgagcaggcgcgctgcgggcagcccctcccggggtcccttgcggcggcgtcccgagggcctccgggggcctcggagcaagatggcggcggcggggtccgtgaggcgcgggcggcggcgaccgcggcgccagtgagggggccctggggcccgggcggctccgggccggggccccgccgcgggacggaccatgctacgctccactggcttcttccgggccattgactgcccctattggtctggggcgcccggggggccctgccggcggccctactgccacttccggcaccgcggggcccggggccccggcgcgcccggtgacggcggagaggcgccccccgcagcaggtaatgcccgcccgcctgcttgccttgggctcggctcccctgcccgggtctggaccccaccccggtcccgcccggggtccccgttctcggcccagcctcctccccacacgttcgcgggcgacggttttcccagtcgggaccggaaccacccaccctgggacccggtgcaaagcactagatgtccctaagccttcgtcttcacgagtgtgaaatgtcaactaggaggacgcgtcctgccagggctgtctagagggcggagtgcgagcgcatgttgagtaccgggcaccgggcctgacacgagggggctcgggagacgggcgcggccggcgctaggcaggtcctggactcctcctgcccctgattggcgcccgccgcttcccggaccccatgtgcttgtggccgcccttgtttatttccatgacgtttcctccggccgcgcctctggcagcggccacctcagtctccagtcgttgagttaggatggtccgaggatcgtctcttgtgtttgtcgagccctgtgtccagcatgactggcagggaggaagtcaaagcttactcgagtgggctccgaggaattccatgcttttggtcgggcagaggacgttggtggactccacctcacagcgtcatggtggttttcatcgtcatggcagcgtttcttggaggagatgtgggatttggattggagaaaaagagggacatcgcaaggaaagtcgtggagggagggttatcgagtgtgatgtcattcagactcccctgttacctctgtcccttgatagtggctctctgcttcccccagcccctgacttccttcgtcccagatttcctcattgggcgtgagtttcaagcactgtttttactttaaccatgaaacagtctcagctcagaaccttttcctgcaaaagagaaacatcttctctaggatttaagaataggtttattttcctgttttgccagaaaaggtagcatttttttctgatttccctgataagtgtgcttggcacacctgcacctgtgggcggttgtttgcaggtggacagatgcaagcaatcacttgtcagctccccacagcccagcgtcttcgctgtgtttgaggcgggggattcagagctgcgtacgatgccggctgtgctctcagggacctgccgacagctgtgcctacagatcccgtagcataggtcgtgatgtcctgggagcacgcagccggctttggcgggggctgggagttggtgaagaaggcaacgcgtgggagaggcttctcggaggctgtgacaccagactcacgatgctcattttaaccctatttttagagacagggtctcactctatagtccaggctggagtgcagtggtgcgatcacagctctttgaggcctcgacctcctgggctcaagggatcctcctgcctgaacctcctgagtagctgggactatgggcggcgggtgccaccaagcctggctaactttgtatgttttcgtggagatagggtctcgctatgttgtccaggcttgtctcaaaactcctggcctcgagccgacctcctgcttcggcctcccaaagtgctggggttacaggtgtgagctactgcacccggcgcaagtcaggcttatgatatctgtctgcatcccaaatggctcatttgtttcccaaaggcttatttttgagggtccctttggtgatgtcgtcttcctgtctgccccccgttcctatgggaaaaaggcagctgcctgcctcttaccatggcgtgtctgcatttcccttttgctggtgagaatgaactccttttcccatctctggtggggtgg

SEQ ID NO: 97728 - DNA, 54789 bp, Homo sapiens
cagctttgcaggctcagctccaggcagccatccctgcagcccccaagccctgagtctcctcctgagtctagttctcaccccttggggttgggggcacctgtgctccccgccctcctaggatccttgtcgtctttccccaggggcgcccccccagtttcccgtctaacaggcatctctttccacccctcctgttgccttgggcatcccactccacagccacgtcaccggcctccacctcggtctcccagatgcccttcccaacccccagtgagaccacgtggccccctcggctcctccaaacccgcgaatgaaacccaaccttcttagcgtggcaaggcgtccctggatggcttctgacctcccagcctttgtgccagagggctgacagcctggagtggcctcccccgtttctggaaggcaccaggtgcaggtgaaggagcctggcggggtgaggtggggtcggtgggggacaggacaggtgggccggggatgggagcctggctcagcttcaggcatgaggccacttgagtcctgcctcggtttccccatctgaacaatgggatgacgtcctctgtgccttgagcaaagttcaggggaggtgaagacccccgggaagaagggagatgcccccattgtgcccagggtacactgcagaggcgccgtccccccatgtcaaggcgggtgcaggtcagcagggctgcctgtgggcaggtgcatgggtggcgggaactgagaatctggctgggctccctgtcccctgccctgcccccgcctcggggtaactgggccaaacaatgccccatggggggtgatgggcaggcgccctgtgtttgcacgggcggccccggaatgtggcaggacaggcccccgggggcccctgagtcaggagctgtgggcgcctggccaagagggggtgggaccatcctcggcagttggccctggccctggggtggacgggcacccggcaggtgcagaggggctgcgtggggggctcggacagaaggagggctcggggaggccaggctgcatccagagctgggctccccccgactggggactgtgccttcttcactggtgccccctctcacgcagcccctcctggccatgacccgccttgtctcatggggcctggacaccaccctgggacatgagcctcctgttcccccttcacgcctctcccttgacccacgctggccccactcagagaacgataccaccattcacaggcccaggtccctaaccccacacctagtaggcaggctgctaacccctcatacccaccccctgggagagccctcagttatcctccaaatgtaccccagatccaccccaactcatggtccctgtgatcacgtccgtctcttgctcaaactcccaccatggttccctagtcctctcaccatgaagacccaattcctccctgtggcataggaggccctgcccctctctctgatcttggctcctcttctctggtcttctctgggctccagcctcacaggccccgttccttgaacaccccacaccccctcccacctcagtacctttgtccctcagcttcccctgcctggcatggtatccgctctctgcctgtcgaccgcatgcatcttgaggtcatagcccaagagtcactgccccaggggacccactccctgtgggagatggtccttcttcccctgaatgccctacagcaggaggtgtgaggctgtgttcccattcccgtcaacctcagagcctcctgcccagctctcctggccctctggctcccataagtctgggtggaggggtaggggtctgatcaccgacaagcctcttcccttccttggtgtcctcatagctggaagtgcccgaggagtcaggaacccttgtgatcagaccccaggaactggagtgtgtccccactgctccatttcacaccagaatctcctccctccgctaggggagaacaatcataagcccctagcactcccaatctcaggaggcttccctgcccaggtccaaccagcaagcctggagacgcctcctcccagaaggcaggaagaatggggccgggtgtggtggctcatgctggtaagcccatcactttgggtaggccaaggcaggaagatcgcttgaggccaggagttctagaccagcctgggcgacagggtgaaaccccgtctctataaaaaaatacaaaaattagccaggcgtggcagtgggcacctataatcccagctactcaggaggctgaggcaggagaatcgcttgaccccaggaggtggaggttgtagtgagctgagctggcaccactgccctccagcctggacgacagagtgagatttcatctaaaaaaaaaaatttttttttaagagatggggtcttgctgtgttgtccagtctggtctcaaactcctgggctcaagcgatccttccacctcaccccatctctgctaaaataaaataaaaacgaagttgtggagaataagggaatgggccctaccctggccgagtcccagcccagggctctgtggggtggtcctgatctggtcgtgttgggatcaggcccctcactggaggtctgagctcgagcaggaagcccccactttgggaggcgacaccgatcgccccagctgcccgtgctcagtggacgccggagcgaggtttgtcccagggcctgacgtgggtgataagtgctgggccgccactcccttctccgcccctgctggagggcgctgggggttgggggagtgtgttcataccctgggagaagtcaaaggtgcccactttagggacaaatggaaacagaaatctggagggtggccccgaagtcctaatccaagcccagtctctctgcggacagctgtggcctgcacacctactgcgtctgtctctggaaacctcgccatcgccgcccctcgcccccctcgcttctgtgtctccctagtgggaagttgtccttggcctcagtttttctgacatacgtggttcatgttggcgggggcgcacacagtaggtgtggagggaacaggcggcaggtgcagaggccctgctcctcctcctgcccggccccagagcaaaacaaaggccacagtcaggaggatagcttgctgcctgtccccgtaccagggccctggagggagcacccaggcctcggggctgggcagaggtggtggccaagtggggggcccccacgggctgctccacccagtgactcagccccaggactgacctccttggggaaaacaatggtggcttgtggttaccagcggaacctcctggcaggcgcgagccccagggtgccctggggcccagggaggagacccctagtctcagtttcctcatctgtacgatacgtggaaccacacaggcaggaggacctcacaggaaagagccacattcaggactagacaaggggtccctcatgggtcatcctgccgggacagcagggactgagtccatcactgtccacagtgctacgatgcgcggcacaaggccccgttcgctgtcagtgcccgataattgaatagtcttgtacggcgcagtggcacacgcctgtaatcccagcactctgggaagccaaggcgggaggatcacttgtgcctaggagttcaagaccagcctgggcaacatagggagaaccccgtctctacaaaaaatacaaaattagctgggtgtggtggcgcgtgcctgtggtcccagctactcgggaaactgaggcgggaggatcgtttgagcccaggaggtcaaggctgcagtgagctgtgatctcaccactgcactccagcctgggcaacagagcgagactctttctcaaaataataataataataataagaagaagaagaagaagaagaagaagaagaagaagtccgtgattggatggttgcttcccttccgtgggtgaaactgaagggctcctcgggaggactccggctgccacactatggcttggaccctgagtgtgggtggggagtggcccacagtgagctccctacactggaatggggagagccagacccggccacagacaccctcagacccatggggtcagggctgggccacaaggaagggccgggggctgaggaggctggggtgggattggagctgcttggagaccctggctccggagaggcctctgcgggggtggggggcggctgaggaaggcaggcatcagctgtgagcacctactgtgtgccagactccccccttccactgtccagatggagaaaccgaggcccggagagtagcacgaacttgcctgaggtcacagtgaggtggagagggatgagggatttgcagcacagaccctgggacccacagccctctccccagacctgcggcacgtggaactctctgggcacggagggtcggactgtggacagcccagtttgggtgtatagcaggaggggcttgtggctttggtggggggcccctgtggccccgcctccccgccggcctggcataggtgcagcattgaactgtgatgactcaggggctccagataggggtgggaaaagcctcccaggtagaggacaaagcaaacgtagaggcccggggtggggatgagcttagcaagttctggaccatccagagggcaggatggctggagccaagcgggccagcgagatggtggcatcttcccaggctgggagtggagtgtaaatttccctttggggccccagggagccctgggagattgtgttattttcatttatttgtttagttattttacttttttttttgagacggagcctcgttctgtcgcccagcctggagtgcagtgctgcgatctctgctcactgcaacctctgcctcctgggtttaagcgattctcctgcctcagcttcccgagtagctgagattataggtgtatgccaccacgcccagctaatttttgtatttttattttattttacttatttatttatttattttgagacggagtttcgtccttgttgcccaggctggagtacaatggcgtgctctcggctcattgcaacctccgcctttcgggtgaaagcgattctgctgcctcagcctcccgagtagctaggactacaggtgcccgccaccatgcccggctaatttttgtatttttagtagagatggggtttcaccgtgttggccagagaggtctcgaactcctgacttcaggtgatctgcccgccttggcctcccaaagtgctgggaatacaagcgtgggccaccgcgtccggtcaactttttaaattattattttaaattattttaaatatttttagagacgggtgtgggtggggggggtttcactatgttgttcaggctgttctcgaactcctggcctcaagcgatcttcccgcctcggcctccttcaaagcgctgggatcacaggcaggagccacggcgcccgatcctaggcggggtcactttttactaaaatgtagacacggactactaagaatcaggaagccagatctggcctgagttctgtccaaagtcaggtccaaattcacagatgccgagacggagactcaagtcggcaaaggcaccgctgagactccccgcggggctctctgacccagagccggagccagagtcggttttcccgccgggaaaatgggtctgacgtagccccctcggggccgtgatacccgctcgcaccactcagcacgcggggccggcccgaggaacgcaaatataaccaagcagaaggctccgcgcgggcggccacgccaacctgagaacaaaactccaggacccaccccggccgcctctcgcggcctctcgctcgcagagtcccgcctctgctgaggggcggggccgagaagaaaggaggcggggcctcaccacgaatggctaggatccccgcccatcagactttcgcggcttccgattgaccagactgctctgccttagctttcaatctcacgggccttactcgcttgcgtcatggactaagcgcacagctcgtgtgtgcttccgcggacggggatagtccgtgatttctccccgcgccgtggcccgaccgcctcctctgcgcgtccccgctcccaggctctggacctcacgggattcggggtcctcacgagggtgctcgagaggccgagctagggcgttcgggcccgagccgcccggaggtggcggagggatccgcgtgggccgccgggcggggcactcgggggcggggcaggggcggggcctgcacggggcggggcggggcggcgcgggcggggggcggaacatgtctcccgccgcaggaagatgaggcagcggcggcggctgcgggcgtagcgggccggagccgacgcggcggcgggcaccgcgggcaccgcgcacgccgctgccccaggggcgccccggccggccgcgcgcacgggccccgcgggacgggccacgcgggggtgggaggggcccgggccacgcgcgccgccgccgccgcccacgcgcgaccctcgggggcccggccgcgacgcacctttgtccgggggggggcccccccgcttcatgccgccgcccccccccacgcgccgcgtgcccggccgcgcccagcaggtgagcccggcggggggcggggggcgcgcccggtacccccgtgctttgtgcccagggaaccccggcccgccccgcgcgcgcttgttgggggggggcgcggaggaagttggggcgggggcggtgtcggggggcgccccgcggcccgggagtcattgttctccaacttcgcgcggcgccgggggggcggcgacgtggaggagcccggagctcgccaggcccgcgtcgcccccgtcgggccgggcacttcgggaaactttaagcagccccgggcgggggcgcggggggcgccggacgggctgtgcaacttaggcgcgaggaccgtcccccccagcccgggcgcacggggaccccggggcgccccctttctcgggtagaggggggcccggcccgggcgccggagtttggggtggggagcgcgcgggagggacgtccttttgtctgcgcggggaaggtgccgcgcgctgcaggcgctggtcggggccgggcgggccgggggggggcgcgcgggtaacatctgctccgcgttaatgcggggcgaggcggcggccgcgctgcgagcttcaaaggctcccgggccgcaccgcctgcaccggctgcggggggaggggggtccggcttcccgggccgcctccccccgggaaaaaggcgttccagcgcgccccccgccttcggcgccgtgcaaagtggcttcaaacattctccaagtctctcaaagtccttgggacgccccagaagtcttccagctcccgtagaatgcccgttttagctcgccacccccccaactaagtctgtcttaaaatcggtttcagctaccccacaaaaaagtgcggtttcgtagtcctcaaaaaaagtcagtttcacacgccctccaaaaaagaaaaaaactgagcgggggaggggctgcgctggggcgcccgcttcacacccggcctccagttggcagacaaagaggggatttctctgcttctgaagttgggtctccctcgacctcggaggctcctccccacccccagcctcggaggtgtctcccgggctgcccccgtccccacctggggacccctggggaaagtcgagactggaggggcctggagtgcatttctttggaatggaaatttttctctgtacctttttctgggggtggaatgggtcttggcaggtggatcccccatcccccatcttagaatggagccccctgggaccacgcgggagcaccctggtcttgagacgctctccccgctcatggagggcaggcaagggatgttgtcaaagttttgcttaaaaataattcccggatacatcgcgacagtaaagcaatctagggctgttttttttttctttcctgaatactgttggggttttcttggggggagggagattgagggtggaggaaagctttgctggtccctgcataggatgcgcgtcccccccacccccggcactttaagtcttgaagcttgtaaaagagtttcgtggttttctgacttgtggatttccttcatgttgaatttgggggcgacctggtcttcaacgggctgtgccatctgctgggggaggggggaatcaccaaatttccctcggggcggggtaggatcgggctgttcctccctttcccgggggtagggggcctcagaggaagcccggggttggttggaaatgagagagttggagaaaggagaggttctggctgccctgcgtrcagtttaaacttggcaacttgatgccctggtgttccctgggggagttagggagtttatatttgcacaccctccccccatttttcagactccctgtggtctctggggaggactctgcagggacctagactctggaattccagcttccctgcgcctgctcccagggctccccgtgcccccagggctctgctggaactcagaccccagggcggttgagggttttttaggtggcttttagcactctgtgctttgrccactcacaactcttctcccctccctgtttctccctgtccatctgtccccacatccaccaagcrgggtttccaggcctgaggtgcccgccctggccccaggagaatgaaccagccgcagaggatggcgcctgtgggcacagacaaggagctcagtgacctcctggacttcagcatggtgagccaggacccccgcccagcycccgacacccctttgccyccacagttcacgggaaggttttcaggggagagtgtttgctgaatacttcagcgatggagcctcagctgtttggatgggaggccccggtggggctgggggagtgggccgctctctggcaggaggctgacagcgcacggcagcacgtgtgctatggggcttttgcccggacgcagcattctacagcctactgctttacagatggggaaactgagtcctcaggggcatggtcctgggcccccagcttggctgggtaagcaaaatgcggccttgatcttctgatctgtaaaatgggcctgatcagggtcgcttacctcattgtagatacaaaaattaaaagtaagtaaaagatcactgcactccagtctggttgacagtgagaccctggagaccctgtttcagtaaatgggaggggggctgggcacagtggttcccacctgtcattccagcactttgggaggctgaggcgggaggatcgcttgaggccaggagttccaagtccagcccaggaaacatagtgaggccccatttctcaaaaagacaaaacaaaactcaaaaaattagctaggagtggtggtagatgcctgtggtcccagctacttgggaggctgaggcaaggagaatcacttgagccctggaggttgaggctgcagtgagctgtgattgcgccactgcactccttcctgggcgatagagtaagatccttcctcagaagtaaaggagggggtgcccagtgctgagcggaccaccctccgtgaacagggcagacacracctgccccatacgggactcccctggtgggcagaggatgcgggcatgaaactgactgtgtggttaattagtcacacgtgggtgctgaagttaagctgccagaagccgagcttgggccaggaggaggctggattgggattgagtgggaattcatgggccaccgagcagacagcagcgccaccattgtgactgccacggttatcactgcggagcaggcaggcccggtggggagggcggggcggcttcttcagagtcttaggtggttggatctgtccctgtacggcccattctccacctgggtgaacggaggctcagagggtgctggtcctcagaagtcacacagttcaggcaggtgcagtgaggctggaatgccggagccccctggggtaccggccgctgacgggtgctgtaaaggcccggggcctcggtttgcctgctggtacagtggggccatgtgttatgggttcctggagaagcccagggaccttggtttgtttcttctggcctgtctacagatgtccttaaattctgctccccaccccccccatgcccagtggcagcgtttggggttgaaacaggttgggggagggcactttcagtctgaatttaaccctcccgcctatgaggcacaggccactgaggtctgtcaaaaacaaaagtccccaaactgaaacaacaccggccaccctgcggaaaaaaacagcccaagggccggaggggccaaggctccggaagggccatgctggtatttttaagccccgttttatttttgcttccctggctgagtaacccgaggtgcagttgggttgttttttgttaaactgacaagtcacagaccgctgggctggaacagaccagcgtttggggggagggggcacaggttcagccccaggacctgactcctcacctcaagccactcagcacgtctccccatcccgggtcggagccgttcccagatgaggaaacaggctgggagcggcgaggtgcccgtcctctccgggcgtcccccctcgggctttacccagaggtggagttccacctccctggccaggacggggaggcagaggcagcccctgtgactgcccgcatccccactctgttcctgcatgcctgccttctgcccctgccgaggctgggtcctaggggaagcacttacttccctggaccagatgcgtataaagtgagagaacagggaactccaaataaatacgagggagaacgctaacccaggctgttcccagcgcgcctttgtcctgccctgacccaggctagctttggtcgggaacgaaggacccgccagcactggcctgggctgacatgccctgcctgggtcccaggcagtccctgggcctgagtcaggggcttcaggaatgaagggggagcgagtccctaggaccgaggctgttggaagcgagctccccaggccctgccgcgtgcgagactcccatgggcttttgggtttcaccacgtcccacacagccagagccctcggtccatttctcagaagaggaaactgatgctccaaggggtgcgggggctgttctgggctgctcatgaggcctgcagagcccacaggacacagcccggtacccatgtgacctgtggcacgttggtgcagccctggtgtcctaggggacaaagcagatagaaatgcagttggctgtcccccacagcaggcctttgtttcccaaatgagaggttggcccttggaggtctgggtccaggggaggctgggygcaccggagcctgcgggagggggtgtggtccagggcgaacactgccttcagcgcgggtgccacccctacccgcaagaccgttcttcctctccagggccaggtgagaatgcggcctccgtttccccttctgcaggaccagggagtgggggacaaccccgcttcctgggtcccctttggacctgtggatcgtggccacaggcgctgtgccttcgcctcctggctggctggggaaggtgttggggatcttggctgctcctcagaaagcccctggctctgattccagccactttgatcacttaagccccgatgggagccttaaaacgcagccccttggggcagggcggaggcttgttgtgtttttttctgtggcaaaagggtttgttgccgttggcttttccggttaatgccgctgagcccgttaatctttagggacttagtgttctgggtacgggtgagccgggcgggagggagggtggcagtcccacacccctagcacccaggagctggatcagctgtggggtgcagcctctccccagcccctccagcttcctgccgggcccggggctccatcccgtgtcttcctcgacctgctgcctgtctgagcctcggcttccccttttgccaagcaaacccatacccagccctggtagggggacactgggccctaccccccgctccagggaccccctgctccagggcctgccatgcggggccagtgcacacacaggaaacgaggagtcagccagggctcaggcatccggggactctccacatgtccacctgttgagtgtaaacctctcacttttcagagctgaaacgtaaagacaactttgtatcactgtcaagagctgataagttgtatccttcgcctaatgggatacccctccccccagagcaaaggcagggggaacagcragttttcagcggcagggactctgcctggcggtacagcggggtcatcgtctggagttttctcactctggkcgtgggtgtccagggtgcagcgtcacttgagggcacgcgagtcctcagagtcttctggtctgtgatggggcggagcaggacgggccgggcctagatggagcgcagtctcaggttccygggtgtccccagctctgctcccagcttgggtttgaacccgggactgtagggtttggtttgccacccgccccgctcacgtctcccctcccctccctgcagatgttcccgctgcctgtcaccaacgggaagggccggcccgcctccctggccggggcgcagttcggaggttcaggtaggaccccgcyttcctgccagcgctcgtggagtgaggagatcaagggtctgttgaagacagtgtgcgggcgagggaggctggggcagcaaaggagggagacaatggggaaagggccacacaggccgggtcrggggcagygagcctgaagacccctgaaatcagctgccgttgcccgtgtgacctgccttgggagcccgagcccctgagcccctcgtcccctcgtccctcccgcgcctggagcctgggtctgggggctgggtggggcttgtttttaggcgcagggttggagctgggcctgtgtgtgggtggggatctcgagcatccgtttctccagtcaatccataagggggaaactgaggctctggagagggcgtggtgcgggatcccggctctcactggatcccacccaccttgtgagcctcgacgactttcatttaagcaggtattaggcgcttgctgtatgcagggcccagcaccagggtgaccggccattgtggtttgcccaggactgaggggcaattcctgggacccgcggctttgagtgctcaaagcagaaacatcccaggctgacctggatgagcgggtcaccctcgctgatgacacagcagtgggcgggacagataggggagacgtggggtcctgggggtggcctgaaaatcacactctggagcatgggcagggcttcacggcacacccagcgagggccaggttgccccaaagcgggacctctagtgaaggtctccgcagagggcgtgtcggggcagagccctgagggtgagaggaaggggccgtgggagcatgaggggaggaatttgccaggcagagagagcagcccgtacggacgccctgcggtgggaccggccggcggggcgggctaggggygctgtgttcgttgcaggggcagcggggagccctggatggttgtgaatggagagagggtctagtctgatgtgcatttgggcggcccaggctggctgtcgacaggatttggtgggggaggttggggcgggtgcccccgatgctgcttcagagccacgggtctctttgtggacatcagcatctttccggggagtgggggcctcgggttggggcctctgaagctgtgtccttcctgcctccgggatctgggtggaaagcgccgtcctgcagttatctccagaatcccccaggggtgggccctggctggagtgtcggggttttgagtggtgggcaaagggggttctgtacttgggcacttgcacccccacatggagagacatcgctttgctgcccccactgcctcacactggccttcccctctacgtgaggaagtggccacagggctggccggaatatgctccctgaggcgtggaaatccccaaacgccaccctgccagccccccggaaacagccccaggaaccggacatgctaatgcttccctgtgtgaggcagagggtcaggccctgggggcttcctggaggaggaagcgcaactcccaaggccgtccacccccattctcctgggcctctgggtgggcttacagcagggcctggtggggagggtggggtgggaggtgtcttccctcgtcccctgtcgcctctcaccccctcagccctggcacggaccactgtgagattggtccctgggtaaccagagctgtggtgtgtaggccgtgtggacctgagaatgctccctctgggttgcctctccctggaygcccagcccggtcccagcaggaacctgccaatgtttgcagatgtattttctgtggttcccacagagtctcgccctgtgctccggccctgccccaatgctgcaggttgggagggtctcrccttgtcccctcacacgttagggcggaggctttggagggcccagtgaggcccagtatgttgcattttttgcccttgagggacgtgatgtggctgctccagcctgggaccccccagctcctggacacagaggggtgaccccctccccgttcagtccatgcagttaacgcccgcctgagcccgggggtggtggaggatgcagagctccaaggcctgagttggtggcaccctcctcattgcctccactcccccaggcccctgcaggctgtggcgctggccccaggtgtggccctcccgaagctcccgcaagatgggcacctgctctcttccatcgtcaggttcagcgagtcgatgggtgcgaggggcggagggatcccggcagggcccaggagctgcagtagctcatttccccgcttcctgcttctcctctccgaggacccaggaagaggggagtttggggctcatcagcaggatggagccccggagctgtgggatcccttcccaaacctcggcttcttcctggaacagtgggtgcagcttccttccaggcggggcctagttggcttcggggacgccacccttcgccaggagtccccaacgctgatggctgatggggtmccccagccgcattctccaccttggccccttcttcatgtgccctgttctagctcccttttaagtcacctcgcttttcttaagttcatttgaaaggaaactttagatttgagaaccagaaacccaggtgagaataaaaggtgtccctgaaaattaattaaacataagttttcccctgtgaagggtctgcctgttcttcgatatttataaatatttaaaaattggtgtcgagagaggagttaggtactgggcaaggtggctcacacctttaatcccagcactttgggaggccaaggcaggaggatcgcttgaggccaggaggtcaaggctgcagtgagctatgtttgagccactgcgctccagcctgggtgactgagagaccccaactcaaacaaacagaaaagggccagacacagtggttcatgcctataatcccagcactttgggggaccaaggcggaaggatcgcttgagcgcaggagttagagaccagcctgggtaacacagcaaaaccycatctctactaaaaatacaaaaattagctgggcgtggtggcgcacacttggggtcccagctactcgggaggctgaggcaggaggattgctggagcctgggaggcggaggttgcagtgagctgagattgcgccactgccctgcagcctgggtgacagagccagaccctgtctcaaaacagaaacgaaacaaaaaaggcattagagattaacgaataggaaaccaagattttctggttgtctggatcggaagacatttaaaacgggaataattttcgtacgccttctcccacccaccgcctcccatttttggaaaccctcaggcacaggtctctgagtgacagcctatcttctgccaagacagacaggctctgaggccacgggagacaccaggaaattgcttattgacggaccaaaggaaagttctttcctatttttcatttccccgtcgctttctctgtccgtgcgattgtaagtgtgacacacggtcagagtgaaaatccacagaacggcacctccgcgttctgctttaagaggaaaccccgggagaacctggcgcatgggtcatttcctccgggtgcgtgtctgggagtggaattgctgggtccctggatgctttttcacattgaaarcgtcccttgtgaccgggcgcggtggctcaggcctgtaatcccagcacttgggaggccarggcaagaggagtacctgggactaggtgttcgagaccagcctggccaacgtggtgacagcacggcctgtctcatttaataggtgacaaagatcgtgtcctttcacctgccacttgtttaatagagggcggtggtcttctcggaaggggattgaccctgtgaatggctctctggtgaattttctgttactctcttgggccctcgtccttgaagttgatccactttttattctgaagtctttcgggattcacaggaagtggcagagtgttctcctctcacctagccacccccaggggtaccgtcccgcccacccgtggtgctgcgtcagacctaggaagccgacattggtgccgtccacagatcctgatcagattccaccggctttacacgcacgtgtgtgtgtctgtgtgtgcgtgcgggtgtgtgtctgtgcgtgtgcgcgtctgtgcgtgtgcgtgcgtgtgtgcgcacgtgtgtgtgcgtctgcgcgtgcgtgtctgtgcgtctgcgcgtgtgtgcgtgtctgcgtctgtgtctgcgtgcgtgtgtgtacgcgtgcgtktgtgtgtgtgtgtgtgtgtgtgtgtgtgtgtagttctgtgcagttttgagacatgcaccttctttaagcccaggaatcaccaatctgttcttcatctgtacgattttttttttttagggaccaggtctcactctgttgtccagactggagtgcagtggtgtgatcataactgactgtagccttgaagttctgggctcaactgatcctcccacctcagccttgtgagcagctgcgaccacctaattaaaaaaatatgtattttgtagagggctgggtcagcggctcacactggtaatccccagcactttgggaggttgagatgggagaattgccggagcccaggagttcaagaccagcctgggcaacatggagaaaccctgtctctgtttaaaaaaaaagaaaaatttcagctgggtgcggtggctcacacctataatcccagcattttgggaagccagggtgtgtggatcacatgaggccaggagttcaagaccagcctagtcaacgtggcgaaaccccgtctctgctaaaaatacaaaaattagctgggcgtggtggtgcgtgcctgtcatcccagctactcgggaggctgagacacgaaaagcacttgaacctgggaggcggaggttgcagttagctgagattgcgccactgcactctggcctcggggacagagggagaccgtgtctgaagaataaaaaaatattgtctagatggggtcttgctgtgttctccaggctgatcttgtattcatgagctcaagtgatcctcttacctcagcctcccagagtgctgtgattacatgtgtgagccactgtgcccagcccaatttttcactttgagtattttgtgtaaatggaatcctatagtttgcaaccttctgagattagcttttattctgttacgttagcataattccctggagatccagccaagctgttggctgtatcttttttttttctttttattgctgcctcattaacttttttttttttttttgagaccgagttttgctcttgttgcccaggctggagtgcagtggcacgatctcagctcactgcaacctccgcctccgcctccgcctcctgagttcaaacgattctcctgcttcagcctcctgagtagctgggaatataggtgcctgccaccatgcctggctaattttttgtagttttagtagagacatggtttcgccacgttggccaggctggtctcaaactcctgacctccagtgatccacccacctcggcctcccaaagtgctgggattacaggcgtgaaccaccgcgcctggccgcctcattaactttttaacaacatcagtaatacaacaatttacatcactttttttttttttttgagacggagtcatgctctgtcacccaggctggggtgcagtggcgtgatctcagctcactgcaagctccgcctcccaggttcacgccattctcctgcctagcctccctagtagctgggactacaggtgccggctaagtttttgtatttttagtagagacggggtttcaccttgttagccaggatggtctccatctcctgaccttgtgatccgcccgcctcggcctcccgaagtgctgggattacaggtgtgagccactgcttacatcagtgtttcttgagcactgtgcattggacacaaagcttggcttattcactgggaattctcagttctaacaggttagcgaaataggtgtaattattaccgtattttactggtaaagaagctgaaacttagagagtttagtaaccattgcgctaattttttgtatttttagtagaggcagggtttcaccgtgttagccaggacagtctcggtctcctgacctggtgatcctcccgcctcggcctcccaaagtgctgggattacaggcatgagccaccgagcccggcctcatttggctgtttgataatgtttgtaggcgcctgtctgtccacccgtgccaaaagtgctgggattccaggcctgaccctctgcgcctggccccgttcggctctttgataacgtttggaggcgcctgtctttccacctgcgcagggaggctgagggcgccgcggtcctcaatgcgccaacttttaggtggtttctttgttcttgactcggctgccctgtgcattttctctctctcgttgatttttcttctggagaatctgcttcattggcaaatcgatattgatcaattgatcaattttcctctttatcggcatttcttctctttctaaagtttttggtgactttcagatcacaggccccttttgctgacttctgccctcttctgttccatcagtgtggtgttgagggttccaccccgtgaaccccatcccattggtttccataatgcatgtttttctcatattactgacatttgttcctttttttttttttttttttttttcctaatttcctcttcaggtcaggttgcttcagaggtttctgagttccaagttggaggtcctttcttgatttctagatctccagtgccaaaactcagctttggcttaaacggtagctactgtttggaggacgcagagctcctctgccgaggctgaaacatggattatttttgtccttctttgtgagtacttgagggatagttggatgtggagctgcgaggcctttgaaccatatttagatttttaatctgtttaatgtcaggctgagagcagcgccatccccctctgttctgtttgtcggtttctctgttgacgtatttagatgccaggattgtgggcttgtgtgggctgagacagtgggatttcgttgtgggtcgagccattgtcaacaacaaaaaaatccgttccttggctggtggtggtggctcatgcctgtaatcccagcactttgggaggccaaggcaggtggatcttctgaggtcaggagttcaagaccagcctggcccacagggcgaaactccatctctactaaaatataaaaaattagccaggcatggtagcaggtgcctgcaatcccagctgctcgggaggctgaggcaggagaatcacttgaacctgggaggcagaggttgcagtgagctgagatcgcgccaccgcactccaccctgggcgacacagcgagactctgtctcagaaaaagaaacctcccttgaattgaaacttcgatatgaaggttgcaacccttcctttttgttggtgtggcttggcagatctttgtgctcctggttgtatctcctgagtcgcttgtttcaaaactgtctttggtcggcaccrtgttttcagattaaagacgttaagcacccgtccatcttcgttctcagcttttccttccatcgtcttattttgtttttccatctgtgtgctcccaactccggattgcttcccccggtgtgtgttttctgaagctctgtaccgctttgcggctctgccagtggttcttttctagttttgaataacacgtttaaggccgtgattgaatagcggttagtattctgcgttgtgaagaacacgtttaaacacgccgtttctcgcgctctcaacgtccgaagtgaaatcgcatctgcccccttctgtgagaaggtgaaaattgagcctgtatatttctcttccctgctggtatttgctaccaataaattgctacttttaaaaaacattgtccgaggccagcggatcatgaggtcaggagatcgagaccatcctggytaacacggtgaaatgccgtatctgttaaaaatacaaaaaaattagccgggcgcggtggtgggcgcctgtagtccagcctgggcgacagagccagactcagtctcaaacaaacaaacaaaaaaaacaaaaaaacattgtatctgttcataattgtgtatttgcatcttactaggaaacatttgtatcattaaatagtgactttgctacttactgtgagggcttgagcaaatggcatctatcttttgcgtcagtttccttatctgtagggtaggggtaatgtagccactgcaaggattcagtgaaatgagagagaactcacaaagtgcccccagagggctttccttgtgtgcctgtcttgttacggcttctaggaatctcttgattcgtaattaaatgtgctcactgtctacttcattccatagaacccccaggctctgccatttctttgaggatccatggggcttacaggcttaagacagtcttctcgttttttagggtaaatcattgaacttcttgaacttcatcctttttgttccatgttgggttccctcttgtgtctctttttctttttcttttttttttgaggtggagtctcgctctattgcccaggctggagtgcagtggcacgatctcggctcactgcaagctctgcctcccgggttcgcgccattctcctgcctcagcctcccgagtagctggtactacaggtgcccaccaccacgcccagctaatttttgtatttttagtagagacgggggtttcaccctgttggccagcatggtcttgatttctggacctcgtgatccgcccgccttggcctcccaaagtgctgggattacaggcgtgagccaccgtgcccggccccgggttggtttctgagcttgttttgaggggcaggttctccggtccccacactcaggtgtcactggtgatgcccatagacatggaagcaagagcgggatggggtctcggttatctctgtggtcactgaaattcaaagcggggccctgtttctctgagttgttacttaacatctgtgctcgatgcccactctcggggccagctctgccctccagggaaaccccagggccttgggggagcggggttgcaaggcgcccctgcttctgggggagaaggttgtccctggttctggtggaggaggttgtcctcggttctggtagaggaggttgccaggcatccccggttctggtggaggaggttgccaggcgtcctcggttctggtggaggaggttgccaggcgtcctcggttctggtggaggaggttgcgaggcgcccctggttctgggggaggagcttgtccctggttctggtggaggaggttgtccccgcttctggtggaggaggttgccagttgtccccggttctggcggaggaggttgtcccccgtgctggtggaggaggttgcgaggcgtccccggttctggcggaggaggttgcctgtgttgcccgcacagcctcactgtgcctctacccgagggcacgtcctgccactttaggtgctgtggggacccccactcttagggtggtgtgtggtctccactcacattctcttcagcctcaggtttgtctgctcgcgggcgggccacagggccctgctgtcccaccccccatcgccagacattagaggcagatcgaagtgggaggctttgcgggatctcgtcagccccccaacaaggaagggctctgtggtgccccagaagcattttctcccccactcgggatcctcctcagaagctgggagcatgtgctacacagcctgcgggccctgaccaagaagacacgacaggaagataaacccagggcggctgcagtgcgcgagctgggccgagggcatcctggtctttcatcttctcccatagcttgaatttagataaaatggaggctgtgcacgcctgtgaccccagggctttgggaaatacaaggtgggaggagcgcctgagtccaggagtttgagaccagcctgggcaatgtagtgagaccccatctctacaaaaaaatttttttaaattcaccaggcgttgtggctcatgcctgtaatcccagcactttgggagtctgaggcagacggatcacttgaggtctgggattcaagaccagcctggccaacatgtatgaaaccccgtctctactaaaaatacaaaaattagctgtgcgtggtggcaggctcctgtagtcccagctacgtgggaggctgaggcgggaaaatcacttgaacccaggaggcggaggttgcagtgagccaagatcgcaccactgcactccagcctgggcaacaagaccctgtctcaaagcaaaagaaaaaaaaaattttttaaaatactgctccacccaaggaaaggccacccccggattcaaacctctgtctgatctcacccgtcatgacccccagaggggctgggaatgggtctgagaagcatcacaagctgcaggggccagacccaggcagggcggtgggacaggctgccatcggggtccttcacgattttaattataaggaggaagaagagacggggcgaggcacgggcttggggggtcatagtgaccctgtatcgggtggcccgctcctactcccgagtaaacggaacctgcgtgaggagctgtcgaggtgttaattggtttttagacgtgaccgtggtatttggtggtggctgttatttcatttgcttttggggactgggttgttcagtacagcaggcattagccatatacacatttttaaatgtaatttttaatgtgcttgaaaaaatgctggccacgtttccagcagttggtagtgtggtccccgtattggacagcagaggtggagaatattttgatcctccaggaaaatgttcttggaagcacagttatttatgagtaaaatgaagacgttgagggtgggtgttttgggggcgtcagctgtgttccaggcagtgctgcagacaaagaggggtcccaggctgggaaggggctcaggcagggggtgtgggtgggggtcacctcctgtgttggggaagaggagagtggtgagatcaggaaagagtttggtctttatcctgaggacggtggggagccatgagagagggtagagggagggagaagagccaagttttgcttctaaaggctccatccggctgcctgaggatgtcagcagacttggaaggaagctgctgcagggactgggcttaacccgctgctgtagctatggggcaagctgctgttctttgggaggagggaaggtgaggaggactcccaggactttagcctgagcacctgagtgggggcacattgcagagctggggctataggatgaagtccccaggcccatctgaagccagaccacctggtggtgtgcctgagggtttggcaggggcggtacacagggctgtgttcagggcccgtgtccaccaatagttttgcctgcccggcatggtaaccccactcctggtactgaagtctgtcgattgggtttcttgtgcagaggcagctgaaggcacttggacagtctttttctgtatcaaggtcagccagccttctccggaaaggaccaaggagtgaatattgttggctgtgcaggacagatggtctctattggaattgattcaactctactgttgcagcaaaagcagccgttgatagtacatggacaaacgggcatagtgtgtgccaataaaactttatttaaaaarcagcttaggggccagacttggtccttgtgtactgtttgcagatccctgctgcagaccaatctcagtcctacccggtatttactaagcgccttttgaagcctccctctcccatttgccaacgagccaccaggcaaagaccagtccccggtccctctcaggaggggacccaacagggaccgggactgggaaaccaccagcctggagcrttccttggctacggatggcctctctgaagcagcatctttcattgttatcctcacggcagcccaggcaggtgggcggcttccacaccccgtgactggaattggaactgaagcccaaggggtgggccgctcctggggccctctccccagcgcccctgcgccgtccactcgcaggcctctcccgaggcagccaggctggcccagggcaggaaggtgcccttcccgggtaaaactctgcggtgcttcaccaaagaaatcacagaaaaccacactctgacagcagtgtcttattctattagtacattttaattagaacaggagcaatggatgcattatgaatattcatggtgggttattaaaatgcatcattaatcggtgggggggattttaataactgtattaatgtgggggctgtccttatttttgtcatttctaggaggaggccaaggctgggtgagggagggttcccccaaagggcagattgaggccgcagtgcctctggcacaggcctgttggagtgaacttcgggggcgatccctgggcatggggccccaggaggtcccccaccacaccaggccttccaggggatgagggctggggtgccaggagcctcccgtttgctcagttgggggtctctgcacctcctggggtactggctatggccggaggggaccmgacaacatgcaggtggtatagaggcaaactgagacccagrgggtgccggcgctgtgcccacccctacacagccagcccaccctggcctcagcagctgccctgttcaccagggcccacgtgcaggaccaggatcttggggtgcagatggcccagacctggcagcgaatgccgtgtggattcctggagaccacaggagccccctgcctggcccccaacccagccaaggcagcatcccagccccccactcataatcacattggaaatttttgattagaaaacaaaatctaaatgaggcgcatgaatattcattagacttggagattaatatgcataattatgcaaatcagacagcaattaaacaccaatactccccggggggaatgattaacacaaaggcaccgaaatagaaggatgcgatttgaaagaagtttctggtgtggatgagcagggagggcagggggcggggcgggggagcctgcagaacagcctgaggtggtgccggtcacagacatcagcactgggctgggtcccccaggcctggctctcgggaagcctctggacttgggagttggacatggacacccccagccctgcaaaagtagggcctgtttgtaaatcatttatagagagggaaaccaaggcagggcagcaactccgtggccaagctgaggaggcccagggcccgctcctgcttctccacgggtgtgctctgtggcccccgatggaagggggaaggatccaagcaggccctccctgcccagggcagaagattctggagtcctgggcgttgcctgtgagtgttctgagagataagggccccgcccgccccgccccgggaccaaggtcctcgtcccgtcccttgctgcgccgggaactcctgccccacgcaggcttctggtctccacactgggcttgttcctgggtgatgagattcggctccaccctcacgggctgccagcctcctgcccgatgggtgagcctctgctgctgcttcagcaaagggcggccccacttcccacactggcaggtggggacagggagaccctgggcctccccagagctcatgggttagcttccacaccctcatgctgtcatgagcctttctcacagggtcagaagagtctgcatctgacacagagaccccagtccacatagtcagggctgggccagagggagggacttggggctgatggggaggaggctcggcgtgagagtgaggtctttgcccaaggagggtatgaaagctggggctttagtgggtgggtaggagttggccagcagagagccgacggaagagttaatttaagtttatggacctgtaagtgctccgagtcccagggtgtctgggtgttagctgctgactggtgtcctcatgagtcgggctgggtgaggctgggttaggaagggttccacaagccccccgggtccactgaggtttgcccctgagatgatgaaccgaagcttttagagctgggcaggcgygagggtgacccataactctctctgtcctgcctgcaggtcttgaggaccggcccagctcaggctcctggggcagcggcgaccagagcagctcctcctttgaccccagccgggtaggagtccccgtgaggcctgagaccctgagtttcctgtccccagagttgggggcgaggggtgtggggaaactgaggctgagagaaggggccasccttccaggggtttggactgggggacatgggtttgagtcctgcctctccagctgtaatgcggggtggagggggggcctgtgaagccccagcacctctcatccccaccccatctcccctagaccttcagcgagggcacccacttcactgagtcgcacagcagcctctcttcatccacattcctgggaccgggactcggaggtgagtgcctggcctggtgcggtccctctgctgtgcacagatgtgcagacgtgggccttggcatggtcagtgcacgcacagcgccaggcaagtccccagcgttcacccagagggtgtggacagccgaagcctctgcccgtcctgggagcagctgcggggaggtgcaggggacgtggcccggactccctggcacggcactctgcaactaggcttccccgcctgagcgtagaggcagggaggccgttccagaccccacttcctccctgggatttctgcagggctcctcctgcttcccggggaggggtcagccgggctggcctgtgcccgctgggaaggaggcgtaggagttctggagactcgggagggcggccagagtgtgcggtggtcagagcccatgcccttccgcagaccgcccgcccgccctctttccctggggggccctcctgttaaccgagagaatcgtgactcaggttgggctcggtggctcacgcctgtaataccagcactttgggagagcgaggtgggtggatcacctgaggtcaggagtttgagaccagcctggccaacatggtgaaaccccgcttctaccaaaaacacaaaaattagccggtcatggtgttggatgcttatagtgccaactactcaggaggctgaggcaggagaattgcttgaacccaggaggtggaggctgcagtgagccgagatcacgccattgccctccagcctgggtgatggagcgagattccatcttaaaaaaaaaaaaagaatgaagactcaggcctggtgtctggtcccaccccaccacggaacctgggcaagcgccatcctcttctgagcctcagtttccccactgtgggaaagggaccctcccagaaccttcttggagggaggcggtgaggactgacccagctctgcaggccctgcccaatgccaggtgggggttggtgcctggtcttgggtatattccagccccgctgcaggctcacccgtgctgcaggggaacgaaccgacgcttgggaagggcaccctggccgggggtctgcggctgggtggggctgactgggacgccctcctccaggcacctggggctgcgactgggacagtgtcccgtgtgcggtccctcctgcgggtgacacaggaaatgccccgagcttcacatgctccgcctcctgcgggagtgtcaagtcctgtgccccagggttcgggggctcaggtaggggtcttgggggggtcccgctgcttggggggctggtaagggcctcaggggtcccgctgtcgtggtcagcctcctgccccagtgcctcagctgtggaatttgtggtttcatccctcagtcatcctgggatgcgggatccttcccttctctggaacccgacggtttgaggcagtgtttctgctggcttttcgtggtgcagtgggggtgtgcgctgcttagaagccgggagctgtggggcactggacctgctgcggggcccaggtgctcaccgtgtacccctcggcattgttggcttgcggggaaactgaggcccggaggactttggccgacccagccttttccctggaccctgaggggcagcgcctgtttgggccccacagcggggcagggacggtcctgtctcgctttgcccggcctcgaacttggagtacagtagagtcagttggtgtcctgagtaggaagcgaatagcgtgaaggtckggcgggtgtgtctgagggcccaccacgtgccacgggcgatttctgcccgttccccttacggggtaggtgaggcctggccccgcccccctgccgggggtggcccctgcacctgggagcctggttcctcactggctgttccttcctcccagcctcttcctcatacccccgatggccccagggtgggcagggctgacgtgggcagttcccacggcccggccagcaatgcccagagcccagccatgtcccacctgccacccccacgggtggggcccaggccatagccaggcagcttggagagggcaggcgggggtcccggggaggcayggggggcttttgccataacctcagtctcctatggcctcagttttctcacccgaggagccgggcgagtgactgctgtggccgggtgtggcctgtggggtgggtcgtggctgtcatcttccccatgtccccccgggtcaccaagatgaggaaacgggaggcaaaaaacagcagcatttgttccaggagttgggaaatcgttgaacttttaaaattcaaaaatcgggaaatttttttcctgctttgagaataatgtacattactcgatcgcgcgtcccagcccctcacagcagccccagtcacattccgtgcccagtgtcagccagaaggggatttaagtggctcaggtcctgagtaatcggggtgcctgcttcaggcaaggctggatccaggtgtcacygcatcagccccaggccctccacactgggggctcgccccggcaggctgtcctcctccgtagcccaggccctccatgctgggggctcgccttggccagctgttcccctccgtagcccaggccttccatgctgggggctcgccctggccagctgaccccctccgtagccccgaggcctcacctgtcctttgtcactgagcgccccagggaagtgctcattggtggggtgcaggtcacgtgctcattcgcgaatgaaccctggcctgaaggctgaatgctgggcactttgggggagcctgtgcggtgaacctgatgcggtgtgcacaggccccggggctccccgccagggcccccaggcctgtcccctgggacagacaaatgcctctgaccccagcaccccagggcatcagcccctcaacgcctgaaacagaggaaactgaggctcaggaagggcaggggcctggccagcaggaagcagggccactgtgagctctgctgtccccttcccgcctcaccccgtgagctctgctgtccccttcccgcctcaccccgtgagctctgctgtccccttcccgcctcaccccgtgagctctgctgtcccyttcccgcctcacccccgtgagytctgctgtccccttcccgcctcaccccctgtgagctctgctgtcccctttccgcctcaccccgtgagctctgctgtccccttcccgcctcaccccgtgagttctgctgtccccttcccgcctcaccccgtgagttctgctgtccccttcccgcctcaccccgtgagctctgctgtccccttcccgcctcaccccgtgagctctgctgtccccttcccgcctcaccccgtgagttctgctgtccccttcccgcctcaccccgtgagctctgctgtccccttcccgcctcaccccgtgagttctgctgtccccttcccgcctcatcccctgtgagctctgctgtccccttcccgcctcaccccctgtgagctctgctgtccccttcccgcctcaccccctgtgagctctgctgtccccttcccgcctcaccccgtgagctctgctgtccccttcccgccycaccccctgtgagctctgctgtccccttcccacctcaccccgtgagctctgctgtcccctttccgccccaccccctgggcagggcttctgtgggctgcagatgctcagagttggccccgaaatcatcggggaccccttcttgtccccaagcctgtcattgggcaggagatgggcacactgagggcagggctctgcgggagatgggcatactggggcyagggctccccgagatgggcacactggggtcaggctctgccagcatcctgccgtggcgctctcagtcgtgtgcacttactgagagcctattgtaggcacatggcaggcactcgggggccctcaggatgttccttggggtcgcctcccactaaccttccttctccccttgcaggcaagagcggtgagcggggcgcctatgcctccttcgggagagacgcaggcgtgggcrgccygactcaggtgaggggctcgggccrggctggggtgtattttgattttaaacaaatctgtcacccaccctctctgatctgcagaagctctcctggcttagctaggttatgtttgcttcctgatagcgaaaccaggctgggcttgggccagggtgggctgggtgggtgtggaccgggagcagaggggaggtaggtgaggaccagggaggccaaggcctgcagggctgccatgcttagctggaggggctcggttgccctctcctctgagtggcaggcaggaaaacaggccatgcagcagggctttgcaggtgtggaccccctggggagcccatacaacaggcccctgtgcagccgagatcctcacccacgctggccctggttgtgaggctgggggaggatgttgggggctgtgaccagccacaggggtcccatgcagcctccggtgctgggcacccccagggttcctccctcaccccaggacttcatctctgtccccgccgtcagctcctagctctcggtggggctcggccttgtcacaggtggggccgtctgtgtgctcactgtgcccaagccagagcaacagtagccatagtgatggagggggccagccgggtgccaggctctgcgccaggggcagatgcgcgtttccctatcagtccccgcaacgaggggccgcggcctacgtgcccattttacagacaggaatacgcaagtgcccgggctccccatccgagaagcagaactagggctcgggccctgctctctggcgctcccgggtgactcatcgagccccgcggtggccacacagggtgcgggctcaggacaggccgggcctcgggagaaggccctgtcctgggcgctgggccaccccgtggggccactggatgatgatagaacagatgattcttttttttttttttgagacggagtttcgctcatggcccaggctggagttcaatggcgcaatcttggctcaccgcaacctctgtctcctgggttcaagcgattctcctgcctcagccttttgagtagctgggattacaggcatgtgccaccatacccggctaattttgtattctttgtagagacggagtttctccatgttggtcaggctggtcttgaactcccgacctcaggtgatccgcccgcctcagcctcccaaagtactgggataataggtgtgagccaccgtgcccggccttagaacggatgaaatgcaggagtcagttccgggacccggctcagggcagccctggctccccaggaagaaagcccgtttcacactaacatgtacagaatccaaccgagggctttacaaaacaaaaccaaaaagataggaagcagccgggtgcacagacgcttagccacgcagctttgtactttgcrtctcagaatcgggggagcagccccttgggttggccacactggtatctgtttctcagtctttcgttcttcgtgaaaacagcagtgtgggatgcggtcagtctcaagtcagaaaaacacagcaggtgtcacagagaaacaccgtgacaggcagaaggggcatcacccactgmrgggcgggtctgagtggcttcggcctttgcagttttttcttgaatggaacagcctggggtctggatgccagctgggcgctttctgaccatccgctccccaccaggctggcttcctgtcaggcgagctggccctcaacagccccgggcccctgtccccttcgggcatgaaggggacctcccagtactacccctcctactccggcagctcccggcggagagcggcagacggcagcctaggtgagcggggtctggcyggggcatcgggggcttctgggagggagcctgcaaagggaggtaggaggcttcccgttagctgagggcaccagagggagcagaccccgcaccttccaggtcctggctggacgtcgggcgctcgggccgtgggagggatggacggtgacggggggtcgaggcaggggccggcgggcgtggcacgtccagggagaggttcctacgagcctctggtcccgaggttcctgcagctgacgggcacgggctctgccatgtgctttctgtgtcagatgcctcatggggctgcatcgtggctcctctgcactgagccctgctgcacacgcgggcatcccccgcgaggcacgtcacagcctcgggctcaggagcactggacggcgccttgaactacccggggcccattccaggcagcacagtcgccaggcatggcggcactcacmtggggtcccagcttctctggaggccgagacaggaggatcacttgaggccaaaagttgcaaaccattctgggcaacatagggagatcccatctttgcgaaaaattttaaaaattagctaagtatggtggcacacacctgtggtcccagctactcaggaggctgaggcaggaggatggtttgaccctgggagttcgaggctgcaatgagctgcgatcgcaccattgtactccagcctgagcaacagcgcaagaccctgcctgaaaaaaataagcgtgaaatcacccacaaaaagcacaaaaacgtaaaagatcgtggctctgaatagaccaaggacaggagccccatgatgcgggaggaggcctctgttccgccttggctgggcacatgcgcctgggccactcgaacttttcccactgtgcgcacgtccgtgagtgatcaggaaggcgcctgagtgctggtttccgggttacggattttatcctgtaggcgagtttgcaaacagcagcccctagtggtgaagcctgactgcgtgggatagtcggggccatcttggaaggagggtggggccaaggggcttctcagcagagccttggcttagaatccaccaactcctcgttttccaaactgcgcgtcgcgggagaaaaccatcgtggttcttcgacatctttggagccgtataaatagacccggggctttttgttgttgttgctgctgctgctgttgtgttttgagacggagtctttctctgtccccaggctggagtgcagtgacacgatctcggctcactgcagcctctgcctcccgggttcaagtgattctcctgcctcggcctcccgagtagctggaattataggcacccrccaccacgcccggctactttttgtattttcagtagagacggggtttcactgtgttggccaggatggtcttgatctcttgacctcgtgatctgcctgccttggcctcccaaagtcctggtattacaggcatgaggcaccgcacccagccgacccgaggtttttaatatatgraacgggaattgtgagggtctctcctccagggtgtagggcaggggttgttctcatgkccggtggccrgttctcaccccttttgctyctaacagacacgcagcccaagaaggtccggaaggtcccgccgggtcttccatcctcggtgagtcgcacgagggagaagggaccccacagctcgtcagtggcagtgccaggccctgtgtcctggcgaagcttgggaacacacatggcggggtgggccstgagtggacaggccccctgtgatttctgagccaagatctgagctctgacccgaggccgcctccaagggaaggcggggaagtccttccctaggtccagcctctgtctgtcttgttttgagagaaaggcagtcctggtggctgaggcccctttagaaagggcacaattgtgctgggtgtggtggctcatgcctgtcatcccagcgctttgggaggccgaggtgggtggatcacctgaggtcaggagttctagatcagcctagtcaacatggtgaaaccccatctctactaaaaatacaaaaatcagccgggcgtggtggtgcgtgcctgtaatcccagctacttgggaggctgaggcagaagaatcgtttgaacccaggaggcggaggttgcagtgagccaagatcatgccgctgccctccagcctgagcaacagagtgagactctgtctcaaaaaaaaaaaaaaaaaaagcggggggtgccgcaattggggctccctgttacatcctcacagcttcaggctgccccgcatccctgcctccctaccaggcctcgcagatggtccaggctgctgtgccacactcctgcggtctcatctcgctggagggagagggaatttgccgattccctggctcagtagccaccaaccaccctctgcccagtgcctgtgctggccccaagagccctgggcatacatctcctcacccctccagccgaccagctccccacaggcctgggttcggggttagagtcaggttgacttcccaggccaaaggcgtggtcaggctctgctcccaacagtatcactcactcccctccttccccagggtgcactttctctgccctgaaaccgccccccagtttattacaacatcaggcccacccagcatacttcccgctccagcacagcagcagacgttaccaacaggccccagccccacagtccaggcagtgccaaccagtcagagctggcgctactcacagacccctcttcctgttactttagtgaaggacgaatgttgctctgggaccaagggaagctcagcactggaagattgattccagctgrggaacaagggagaaggatgggatggggtgttggagctggggttttgatgggtcgataggagttttctggattaaggaggaaaaaggtttagtaggcagagccagatccaagtcctcaagtacaaaggtcagaagttcagggaggcgggaggtgggggctggaaaaggagtaggagagagagaccaggacatcataagaacctcaaacttggccaggggctgggwtttacctaaaggggggtggctttacagggaagggaaacggggtggtagatgtgctaccaggaggggacaggaggccggcaaggtgcatgggctgatcgtggtccctccgtcctgactgcaccccccaccgcccacccgcccgcaggtgtacccrcccagctcaggtgaggactacggcagggatgccrccgcctacccgtccgccaagacccccagcagcacctatcccgcccccttctacgtggcaggtacatggcagggcgggggctcgccagggacggtagggcagggctggggttccccactcggcccccaccttaccagctcccctccacagatggcagcctgcacccctcagccgagctctggagtcccccgggccaggcgggcttcgggcccatgctgggtgggggctcatccccgctgcccctcccgcccggtagyggcccggtgggcagcagtggaagcagcagcacgtttggtggcctgcaccagcacgagcgtatggtaggacccagggcagggggcagggggtgggcggagggtggcagtgcccatctaacccaccctcctcctgcctgaccccccagggctaccagctgcatggagcagaggtgaacggtgggctcccatctgcatcctccttctcctcagcscccggagccacgtacggcggcgtctccagccacacgccgcctgtcagcggggccgacagcctcctgggtatggcccctccctgggatgcggcctctccgaggggacactgggctccaggcagggtctgggtggggggtggcgaggactccacgggaggcgcaggcgcgtctgctggccctgagagcgggttgttgtcagttctcattgtccgctgtctgcagggcctgccacgtgcgttgggcttgggatgtctggaaacagatctttgaggagcggctttcccgccttacagctgggaaagaggctcagagagggactcacccacccagggtcagagagggactcacccacccagggtcagagagggactcacccacccaggcccagagagggactcacccacccaggcccagagagggactcagttacccaggcccagagagggactcacccatccaggcccagagggggactcacccacccaggcccagaaggggactcacccacccagggtcccctgccagtggcctgtccccagtgcctcaacccctgcagaggctggtttcagggggtcagacagaaaccggacccgagtcaggctgctctccctggcgcagcagtgtctgtgcaggacggcagaacgcaggagagcttgccgtcggcggcagcacccaggccgggctgcgtgggcctcacctctcttcacccacaggctcccgagggaccacagctggcagctccggggatgccctcggcaaagcactggcctcggtgaggcgtggggcatggggggtggccaggcaagtgacctgagaggccggcccctgaccgcccatctctcctggtcctcctcgcagatctactccccggatcactcaagcaataacttctcgtccagcccttctacccccgtgggctccccccagggcctggcaggtctgtgagggttttggggggaggggaggctgaggtctgtgagggtttggggggaggggaggctgaggtctgtgaaggctttgcgggggaggggaggctggttctggtgtctgcaccttgctgggataggcaggcagcggggagggagcagatggcccccaagggcccgtggcatcgctggtcaggaaccgacggtggaagggagtcccccatgggcttgtgttccactgggcaatccaggaaagctgcctagtggaggcagcctccaagccagccctccaaggctatagcacataaccaggcagtgagggagggctgggaggtggcgtccaggttaggtcacagcacaggcaaagccaggaggcaggacctggcagttcacactgcgtgaacatgaggggacattggcgtgcctagcagctcccaggtccgatggggccagcatcgccagggctgtggcctggactctagaatgtgtgcgtgttgccatttgctcacccactgggtatttattaggtactgactgtttaccctgtgcggtgctccggcatgggagggcagaccctcctatccctgtgaggacgtgcttgcttatccgcagggggtcgggggcaggtacaggaggagggggagtgagaactggaggtttccagaaggtctgggtgtttaaaaacacccgtgagtcctcatctctgcccccatgggaagcgccaggaaccctcacttcacctcggcctgtctggtcccacctggagcttgccactttcttgcctgctgctggagcccagcgtgggtcagccagggtggggcagcatggggaggagccccctactgtgtgctgccgagccactttatcctctgagtggggagttggattttgtagatggggaaactgaggctcagagataggaatggcagtacccactgggcacccagcatccctgcctggcggggccgagcagctttgcatcagtgtggggtgccccggaatggccatcttgggcatcaccggaggctggacaggcggggtggttcatgaatccctccccatgggcatcaggccatgctcacaccccgcccctcgcaccccattcacgtccccactcccttccaggaacgtcacagtggcctcgagcaggagcccccggtgccttatcgcccagctacgacgggggtctccacggcctggtgagtgcctgmcccgccccascccacccttccccgacagaatttgcaggacagacgctccttgagaaggagaaacctttttgttagtttcttgtaaataagccccaagctgttattgaggcctcgtggccgccaaggcacacacattttgtgtgtgctcccgggcgccagatgcctggcatatgcagcttcctggggaaggggaagatgggaccaccggccacttgcatgcggaagggacatgaatggaggcctgtggggtccctcggcttgggcccctcaccacccatccccccaccctgcagcagagtaagatagaagaccacctggacgaggccatccacgtgctccgcagccacgcygtgggcacagccggcgacatgcacacgctgctgcctggccacggggcgctggcctcaggtttcaccrgycccatgtcrctgggyrggcggcacgcaggcctggtgagcgctgggcgagggtggagctgggcagtgggcggggaccyggctccccctgatgcacccgtctccccacgcctgcaggttggaggcagccaccccgaggacggcctcgcaggcagcaccagcctcatgcacaaccacgcggccctccccagccagccaggcaccctccctgacctgtctcggcctcccgactcctacagtggtaagcccttgagcttgggactgtccgactcctggttccagttggggaaactgaggcactctagtggtgggggtcagggtgggagcccagggcaggtgtcaccgtgggggcacctggtgacatgggcgccccagtcagcaacttcaggagggtgggtaagaccggcggggccggcgttggccctgggcgtgtgaggtggacagctctgggctgcctcttcattcgcctgctcccagacgctgtgtgcctggcagcgctcagcactggggaaggggcgaggggtgcagcaggatgcctctgcctcaggggagacagaccaggagctcgctgcacagtacaggtgccagggagaaggaacgaagtggctgcggtgggttgggggttttgtatggctttgaagatggtggcccatgaggccacaaggtggtgtttgggcagcatctgggaggaggcaagagtaggcaagtacctggaggaggagggtttcaggcagagggcgcagcccaggcaaaggccctggggctggactgcacctgggaggaacagccaggagacccgtggggttggagcagagtgaggagagggagagagggaaggggggagggcggggcagggcaggtcatgcggggccttgtgggctgcggggaggacttgggatttggccatgagaaaggtggcagccgtggagggctgaggagggatgggacctgacccaggtgctcacagataccctctggtggctgcttggaggacagactatgagtggcaccgggagaccaaggcagaggccacagggctggtccaggggccttggaggggtgagcagtgggtgggccctgcatctcctgaaggcggggcccacaggatttgtgatggacaggacttgagggtgagagaaggcagggtggctctgggatttctggcccgagctgtgggtgacactggggctgggaactccgtaaggaaggggacaaaggaaaaggttggggacaaatctggacctgggcctggggattgttgagtgtctcagacacccatgagaggcccaggagaaggtggggtcattgtgggcgctgtcctggccctgtgccttccaccagcccaggaatcctgcctgctttccaggcagactttccaagtaccttgattctatcacycctaggccagggcatctcaccgcagcggctctgcccccaggggacactgggtgatgtctggggacatctacagttgtcagggctgaggggagctcctggcatggagtgggtgggggccagggatgctgctyascaccctgcagtgcccaggacggccccaccccagagaagggtccggacccacaggtcagcagtttccaggggcagccccaagcttagtctttcacccataggctcccctctgtttccttcctgtccttcacttcgtgtgctgaggcctgggctggtcctggtggctggcgttggccgattggagcagagttcactgtggggagcgggtgcatttctgaggctccccctcagggtacgggggtctcaggggatggcagctggtttgctccatgtgagccctgactgattcctggactccccaagcccgggttttgggggtggcccaggccctgctgaatgcagagtggccgcattcatttggggcactgtgtacccttaagccacatgttttgcaattattgttcttgagcttcatgaacacggcgtcccactagcgtgttctttacacgctggtttgctggcttatgttgtgtgtggggtacatgtgtggtgtgagcggctggggtcccattgtgagtgtgccgttggccctggcccgggcgtggggctgtaggtcattccaacatcacgctttcctgccaacctgctgatcaagggtgtgatacacctgttgtcaattcagaggaaaggctgatgaattattttccaaagcagccaagttgccctcccacaggcaagattttgactgttcaggtccctcaactttgctagctgactgggtatgaaagggtagcgcaaagccaccctaatttgcatttccttaatctcttgatgtgctgaagcggacttccacgtgtttctagccatgtggtttccttgtctgtgagatgcctttttggataccttgcttatttttctactgagttactttctttttgtcctttcccattgattgtgggagatcacctcctggttggctacatctgtggtgggtgtcttctattctttggcaaatgcttttcttttcctggtatctttgctgatcaggaactctcaattctgatatagtccagcttactgatttttgttttttcttttttacttgttttgttttgagacagggtctcaccctgtcacaccagagtgcaggggcatgatcacagctcacggtagccatgaccccctggcctcaagtgacccttccacctcagcctcccaaagtgctgggatcacaggygtgagtcagccactgtgcccggcctgtgttctttcaaaagcagcgctttgagcacttgcttggacagctcttggactaaaatgagaatgataaagattagcatagcatctgcacaagggtgacgtggacattcctgaagtgttccaaagttttattcttttttttttttttgagacggagtcttgctttgtcacccaggctggagtacagtggcgcaatcttggctcactgcaacctccgcctcctgggttcaagtgattctcctgcctcagcctcccaagtagctgggattacaggtacccaccaccacagctggctaattttttgtatttttagtagagatggggtttcaccatgttagccaggatggtcttgatctcctgacctcgtgatccacccacctcggcctcccaaaatgctggcattacaggtgtgagctggtgtgagccactgtgcccatccgaagtgttccatatttttaagttaatgattgaaacagtttactttcaccaaaaaagaagagtgttcttttagcatcttagtagattcctgccattgagttgctgcagaatttctacacactttgttccaaaggtggtaaaactgtttccctttcatcttgtggtccttaatctgtctggcattggtagctacacatggcgtgaggtagggatccagttctggttgttggttttttgtttttatttttggccaagacctggtttttccaggaaagcccaagtccctcaccacaggagcacaaagagatatgtcagttggccctggaggccgacgcaggcccctgaccctaggcctgttgcagggctagggcgagcaggtgccacggyggccgccagcgagatcaagcgggaggagaaggaggacgaggagaacacgtcagcggctgaccactcggaggaggagaagaaggagctgaaggccccccgggcccggaccaggtgccaacccacccctcggcactccccaccctcaccccatcaggacgcacatgtgcacaggccacacgcacaccgcacccacactgggaggccgtcggcgggccccacgctcttcccccaacctcactgtctccctctggccccctcccggcgccctccccatagcccagacgaggacgaggacgaccttctccccccagagcagaargccgagcgggagmaggagmgscgsrtggccaataacgcscgggagcggstgcgsgtscgkgayatyaacgaggcctttmaggagctggggcgcatgtgccaactgcacctcaacagcgagaagcsccagaccaarctgctcatcctgcaccaggctgtctcggtcatcctgaacttggagcagcaagtgcgaggtcagtgggggcgcgggccaccagcgtccctgcagcgccaccctccctcgtgttcctgccctcgttctccttccccgcccgccttcctggagccagccctccctctgcagcagttgcctccttgcagtgactgtgcccttcacccctctgaccgcattgccatgactgtccactcctgactgccagcccttctccctgcctgcctcagcatcccctccacagtgggaggactggactctttctggacccctagtccttcaggcctgggctctgtggctcagaactgtatctcccagctccacggggctcccactcgccgtggtcctcctttcttgggaagcccagaacccagctcacagaggccagtgtcccccgatcccagagacaggagctggtgtgcaaaccaccctggccccttcccgtcaggcagatgccacgcaaggccacatgagcccatcccctgtctctgactcagtttccctatctgaaggtgatagggaaacttcctatcacccccatttcccagggccagggggaggaaggatacagacagaccctgtccccacccgcagatgtgagctgactccttccccccgctggcgctggcggctgcttccttaactccttcctttcctcgcctgcaccccgttaaccctttctctcctgcagcactgttgctgggaccggagccagagccccggcccggcccacacgctatcccctcagctctaaggtttccgagtctctgcagccgtgtgtggcacgcctcgcgccccccaagcccgcctctctgctgtctgccttccgccctcccctccatcccgcccgtccgtccctctgcttcccgtggcagcccctcctcacctcgcacttgctgcccgagcaccgggagcggctgggctgcaacctcagggcgtttcctcccccaaagccccccgtcagggcttgcgggaagaaaccagacccgggagcacgcagcccctggtcctgtcagtttggtctgtgcgcttgtcctgggctccaggggccgcccccaccacctggagggatcccctcaggcccctaaggcagggtgggcaggcaagtgggtgaggcagccccctagagactaagacagggcaccaggcatgctgggcactgggccagaccttcacccatttcatcttcaccacaacctagagcagtgggtgccctgatggggaccggcatccattctaccaagtaggaagccagggaacagagcgaggtcacccatgcagggccatgcagcacagaggcctgggccgggacccgcacccctgcggcagcagcaacagtgcccrctcgccagctgcatgctgctcggctggagagggggctcagccttgggcctggcacagaacaggctcttggaacctcagagctcctactgcgaccattcacggtggcagtgacaatggggttcctggaggcctagggagctggccttcccagccaggggcaggagctcagggagggctcatcttggggcagccggagttcactgtaggggacgggtgcatttctgaggctcctccccagggtgtgggggtctcgggggatgggagctggtttgctccatgtgagccctgatttgagtcctggactccccagtcccgggtttttggagtggcccaggtatttgcctgctgagcccgtgtcttcaaggcctcctctgtccacagtgagtctggccaggcctagctgtccatcaccccgcaagtggctgctctgagcagggaaagtcatcatcttgggagggaagaacaaagagaggagcaggcactgggcctcccctgcccccagccctgccctggggcccacagagtgagcagggtcaagggagaagcagttaccctgtgggctcccagacggggaagcagggccccatctccctccacagaaacgtctgggaacagtcagaccttgggtcttcctgggtgtgaccacatccacagcctcccctagagctgagtctgagggcacttgcacctgggcagccagtcgcgtacacacacaggcgccccaccatggggctytgctgcattccagggagcacattcgccgcgtgcacagagaagcacattttcacgcatgtgacaacacacacatcagcatgtggacccgtactgctgcccacaccaacaccagccgtgtacccccactgctgtccacacccacaccagccatgtacctgcattgctgtgcccgacaccagccgtgtacctacactgcagtgcctgacaccagctgtgtaactgcactgctgcccacagcagcaccagccatgtacccacattgctgtgcccagcaacgtaagctgtgtacccgcactgctgcccacaccagccgtgtacccccactgctgtccacacccacaccagccatgtacctgcattgctgtgcccgacaccagccgtgtacctgcactgcagtgcctgacaccagctgtgtaactgcactgctgcccacaccaacaccagccgtgtacccacactgctgtgtccaccaacgtaagccgtgtacccgcactgctgcccacacccacaccagccgtgtacccgcactgctgcccacaccaacaccagccgtgtacctgcactgctgcccacaccaacaccagccgtgtacccacactgctgtgcccaccaatgtaagccatgtacctgcactgctgcccacactgctgtgcccaccaacaccagccgtgtacccacactgctgcccacaccagcacaaacacaagtagctggataccctctccacaacccagccctgccctcccacccagccttggcgcatcactaacagaggcctcggtgctgtgacccagcagtacggacgaggtgctgtccctggaggagaaagacctgagggaccgggagaggcgcatggccaataacgcgcgggagcgggtgcgcgtgcgggatattaacgaggccttccgggagctggggcgcatgtgccagatgcacctcaagtcggacaaagcgcagaccaagctgctcatcctgcagcaggccgtgcaggtcatcctggggctggagcagcaggtgcgaggtaggctccccggccagggctgccccagcaccctctcccttccccacacccaggtgcagatgctggggtcctcctgtgcttgccgcccccggactctgtccatgtctgtctttgtggctggactcagacccagtgatgttccccagacaccccctgatacccactctcttctttacaagcctccaccccatccccccagccttctcaaggaaggaggtgagagccggaaatacaggaggccacacgtgatggggctctgcccccacccccccccccgacatcctacccmccactcccacctcacatctttctcctccctgggaccgtctcccacagagctctcccccctccctccagagcggaacctgaatcccaaagcagcctgtttgaaacggcgagaagaggaaaaggtgtcaggtgtggttggagacccccagatggtgctttcagctccccacccaggcctgagcgaagcccacaaccccgccgggcacatgtgaaaggtatgcctccgtgggacgagccacccgctttcagccctgtgctctggccccagaacggccactcgagaccccgggcttcatccacatccacacctcacacacctgttgtcagcatcgagccaacaccaacctgacaaggttcggagtgatgggggcggccaaggtgacactgggtccaggagctccctggggccctggcctaccactcactggcctcgctccccctgtccccgaatctcagccaccgtgtcactctgtgacctgtcccatggatcctgaaactgcatcttggccctgttgcctgggctgacaggagcattttttttttttccagtaaacaaaacctgaaagcaagcaacaaaacatacactttgtcagagaagaaaaaaatgccttaactataaaaagcggagaaatggaarcatatcactcaagggggatgctgtggaaacctggcttattcttctaaagccaccagcaaattgtgcctaagcgaaatattttttttaaggaaaataaaaacattagttacaagattttttttttcttaatgtagatgaaamttagcaaggatgctgcctttggtctctggtttttttaagctttttttgcatatgttttgtaagcaacaaatttttttgtataaaagtcccgtgtctctcgctatttctgctgctgttcctagactgagcattgcatttcttgatcaaccagatgattaaacgttgtattaaaaagaccccgtgtaaacctgagcccccccgtccccccccccccccggaagccactgcacacagacagaacggggacaggcggcgggtcttttgtttttttgatgttgggggttctcttggttttgtcatgtggaaagtgatgcgtgggcgttccctgatgaaggcaccttggggcttccctgccgcatcctctcccctcaggaaggggactgacctgggcttgggggaagggacgtcagcaaggtggctctgaccctcccaggtgactctgccaagcagctgtggcccccagggctaccctacacaacgccctccccaggcccccctaagctgctctcccttggaacctgcacagctctctgaaatggggcattttgttgggaccagtgacccctggcatggggaccacaccytggagcccggtgctggggacctcctggacaccctgtccttcactcctttgccccagggacccaggctcatgctctgaactctggctgagaggatgctgctcaggagccagcacaggacaccccccaccccaccccaccatgtccccattacaccagagggccatcgtgacgtagacaggatgccaggggcctgrccagcctcccccaatgctggggagcatccctgggcctggggccacacctgctgccctccctctgtgtggtccaagggcaagagtggctggagccgggggactgtgctggtctgagccccacgaaggccttgggctgtgcgtccgaccctgctgcagaaccagcagggtgtcccctcgggcccatctgtgtcccatgtcccagcacccaggcctctctccaggtctccttttctggtcttttgccatgagggtaaccagctcttcccagctggctggggactgtcttgggtttaaaactgcaagtctcctaccctgggatcccatccagttccacacgaactagggcagtggtcactgtggcacccaggtgtgggcctggctagctgggggccttcatgtgcccttcatgcccctccctgcattgaggccttgtggacccctgggctggctgtgttcatccccgctgcaggtcgggcgtctccccccgtgccactcctgagactcccaccgttacccccaggagatcctggactgcctgactcccctccccagactggcttgggagcctgggccccatggtagatgcaagggaaacctcaaggccagctcaatgcctggtatctgcccccagtccaggccaggcggaggggaggggctgtccggctgcctctcccttctcggtggcttcccctrcgccctgggagtttgatctcttaagggaacttgcctctccctcttgttttgctcctggccctgcccctaggtctgggtgggcagtggccccatagcctctggaactgtgcgttctgcatagaattcaaacgagattcacccagcgcgaggaggaagaaacagcagttcctgggaaccacaattatggggggtggggggtgtgatctgagtgcctcaagatggttttcraaaaawtttttttaaagaaaataattgtatacgtgtcaacacagctggctggatgattgggactttaaaacgaccctctttcaggtggattcagagacctgtcctgtatataacagcactgtagcaataaacgtgacattttataacgawgccctgcagtccccgggttctttctggtgtcacatgtttaggaagggaagtgggggggggccctgacgttcacctcgggtgcagcaaggaccgtggtccaccctgtgcactgggcttcctcgaagcgactcctcactctgaggagcccatggctcccagggcggctgggaacctgcatgtgtactcagggctccaggccacctggaagcaggattggctcccggggaaaagcagctccctgggggctgcacttgggcgcgtaggaaccatccaggacctgcggtcctcccagcccccatctgggagggctccccatctcccaacgtcccccccccgggctgttggaacccacttccctgccccttcctgctccgaagtcggctcgaagtctgagtctgtcactgctcctctgaaaccttccacggctccgttgctggcagcgtcaaccccacactccttagtgcggcatctgtgacttcctccacaaccggatgcccacggaacccacggacagagctctcggggggaaggggtgtggcaggacctgtgggggcgctgctcatcccaaagtgcccactggcaggcatctgctgctgtgcccagggacttggccgctgcatctctgcgaggacacagctggactgccctgctcccctacagggttggggtggaaggagtgccttcctggccacttgacggggggtggcccccaggagagagccctttggcacacaagtgccttagggaggagaaggctcagcacagtgactcatatctgtaatcccagcacttcaggtggctgaggcgggaggatcgcctgaggccaggagttccagtccagcctgggcaacatagtgagaccccatgtctataatttttaagggaaagagagtggccaggagttgacagaaggtgctgagggagccctgtccaccactctacccagctggcctctaaattcatgctggaaaacaacttttaaaatatacattggccgggcgcggtggctaacgcctgtcatcccagcactttgggaggctgtggcgggtggatcacttgaggtcaggagttcgagaccggcctggccaacatggcgaaatcccatctctactaaaaatacaaaaattagccgggcatggtggcgcaagcctgtaatcccagctatttgggaggctgaggcaggagaatagcttgaacccaggaggcagggattgcagtgagctgagattgcaccactgcactctagcctgggcgacagagcgagactgtctcaaaaaatcaaaattaaattggttgtacctggtgacacacacttgtagtcccagctacttaggaggttcaggtgggaggatcgcttgaggtggcagtgaactgtgattgcaccactgcactccagcctgggcaacagagccagaacctgtcaaaaaaaaagggtgggccaggtgcagtggctcatgcctgtaatcccagcactttgggaggccaaggcgggcggatcacgaggtcaggagatcgagaccatcctggctaacggtgaaaccccatctctactaaaaatacaaaaaattagccaggcgtggtggcgggcacctgtagtcccagctactcggtaggctgaggcaggagaatggcgtgaacctgggaggcggagcttgcagtgagccaagatcataccactacactccagcctgcagcctgggcgacagcaagactccgtttcaaaaaaaaagggtggaggggacatccagatggtccaacaaaataacaaaaaccggctcaagaaacaaaaaggaagttctatgtcatgttgaatggcttcaggcacagctggatccaggtgtcattacaaatctctctccatctctcagctcttgtttatgtcactgtctctgatgaactcttttttttgtctgtttgttttgagacggagtttcactcttgttgcccaggctgcagtgcaatggcgtgatctcggctcaccgcaacctctgcctcccgggttttcaagcaattttcctgcctcagcctcccgagtagctggaattacaggcatccgtcaccatgtccggttaattttgtatttttagtagagatggggtttctccatgttggtcacgctggtctcgaactcccagtctcaggtgatctgcccgcctcaacctcccaaagtgctgggattataggcgtgagccaccgtgcccggccactggtgaactcttacattgtggcatctggaaactctgggctgacattccagcagcccttgtgttcctgtcctttctcttaatagtctctgtgtcagcccctgcatcccacttttttaagtttccaccaatgggaagagtcttattcaggtgctctctgatcccaagctcaaaaaccccaagccaactggaaagttctacaaacaatgcccagggccgggcccggtggcttacacctgtaatcccagcattttgggaggcggatcacttgaggtcaggaattcaagacaagcctggccaacatggccaaaccccatctctactaaaaatacaaaaactagccaggtgtggtggctcacgcctgtagtcccagctacttgggaggctgaggcaggagaagcttgaacccgggaagcggaggttgcagtgagccgagatcgtgtcattgcactccagcctgggccacagagcgagactccgtctcaaaaaaaaaaagaaagaaaaacagtgcccagactgtggtgtccaaaacctatttccggctcccaccctgagtccttaaccagggatagggatgggttagcacccgcagtccccagagagctgcaggcttggggtgtactgaggggctgaccccaggaggacaggccaggctgggcagaagaacccacggtgtccattccttatcacgaggcctgcaagtgacgctggcgcccgagagacaaatcacgcccagtgccccgtctaggctatggcctttccgttcatgctgtaaaggtgcctgtgggtcaggcagtccaggagggcttcctgagggaggcaactcttgaatatgggggaaaaggcacaaaagtgcaatggcggtgtctgggaatatgcccctcttccttctgcccacaccggcccggtgtgcaggggggaggctggaagctgggagctgagtgagcatgtacggtgctgcgccgggttgtgggagagcagaggaagcagggactggagaaaggcgagcccaagcgagcctggtgcggtggaaagcaggaggcagaaagacctgcctgtcatcagctaagagcatccagagacgttcaccgagcaaggagccaggccaccctctgctgccggaatgaggaataacccaggctcgcaaacggaatcctgcaaagagatttccgacagggcctccaagcaacgggcaacgctgaggctcagggaagcactgccgctcgaccaaagtcctacagcgaatcaggaacaacgcctgacgcctccaaaagtgggctccaatcccagctcttcccctctgtgtgactctgagcaagacccttccccgctggacctcagtttccttcattgtaaataacgttctggcacatactaggcgcacaaaatcactggcaggtagccccgcggagcccagaagcacaatcggccgccagaccacgtggccagaaagcaccgccctaacgccgcccactccggaccacttctccgcggtcgtccaaccctcgccggaagttactgtaagtggcttccgggtctgcgcgcacagtggcggatgatgtttttttttccttcccccccccccgccctccccgcgcgcgtgcgcgccgcggccgcgcctgcgcagtgtagccgggtcagctggacagggtcatcctgagggtgcgactccgccgcgatggtgacccggttcctgggcccacgctaccgggagctggtcaagaactggtgaggacgccgacccgcggccccatccgcgctcccgcctcggcccagccccgcgccgctgcgttccgtatttgtgcgcgtttccgggggccgggccgggccgggcccaggtcccttgttgttcccggtgacagagggggaaactgaggccgagaggcggagcggcgcgtcccggcgtgaacgggacgtgacggacccaaggccaaaccccagcatgcccggctccgcggctaggccgctccaagcctcagtttccccatctctaccgggggatccgaatggtgaccccctggacggaagcgcccagaaggtgccgagtcccgatccccagcccagcactcgcggcatcttcggcctttgccactattttggtttttatgatttttaacaaggagcgtgaaagcttcagctgcgcctgagcccacgtgggcagcgggacggcataggggtggcccccatagaagccgggctgggggtggcctccgtagggttgtctggtgtttccacgtggggtgctaagaagcaaggcctggctgggtgcggtggctcccgcctgtgatcccagcgctttgtgaggccgaggcaggtggatcacctgaggtcaggagttcgagaccagcctggccaacgtggtgaaacccgcgtctctactaaaaatgcaaaaattagccaggcgtggtggcgggtgcctctaatcccagctactcgggaggctgaggaaggagaatcgcttgaacccgggaggaggaggttgcagtgagctgagattgcgccattgcactccagcctgggtgacagaatgagactgtgtcccaaaaagagaaaagaaaaaaaaagcagcaaggtcttagccgggtgcagtggctccggcctgtgatcccagtgctttgggaggcccaggcaggagaatcacttgagcctgggagttcaagaccatcctggacaacacaatgaaaccccatctctacaaaacaaaaaattatcagggcatggtggcacctgtctgtagtcccagctactggggaggctaaggtgggaggatcgtttgagcctgggaatttgagaccagcctgggcaacacagcaagaccttatctctacaaaaaaatttagagctgctgggcgcagtgactcacgcctgtaatcccaacactttgggaggccaaggcgggcgaatcacccgaggtcaggagtttgagaccaacctgaccaacatggagaaaccccgtctctactgaaaatacaaaattagccaagtatggtggcgcgtgcctgtaatcccagctacttgggaggctgaggcaggagaatcgctcaaacccgggaggtggaggttgtggtgagctgagattgtgccattgcattccagcctgggcaacaagagcgaaactccgtttctaaaaaagaaaaaagcaaaggcttatgattggcagtgtctccggaagccagaacatacttcctctatcccagactgggggacaggtcggggacagggtctgcacggtggagctgactgggaccttcaagtggaatgtgatggtgccggtggcgttttacagcgtgggtaactcaggcctgggatgaggaagcctgctcctagctgagaacccagtggcccatggtagccagtgcagcccctcccgggtgcagcaggtctgcttcttctgtgttcagtcacagcggggaccacccgtcatccgtgctttcatccaacagcaagcatttatttatttatttattcatttatttatttagagacggagtcttgctctgtcgccccggctggagtgcagtggcgcaatctcggctcactgcaagctccgcctcccgggttcacgccattctcctgcctcagcctcccataagtagctgggactacaggcgcccgccaccacgcccggctaattttttttgtattttttagtggagatggggtttcaccgtgttagccaggatggtcacgatcttctgacctcgtgatccacctgcctcggcctcccaaagttctgggattacaggcatgagccactgcgcccagcccaacatttattgagcacctactatgtgttagg

SEQ ID NO: 97729 - DNA, 20597 bp, Homo sapiens
  misc_feature (1)...(20597): n = A,T,C or G
caattagactgcaagctcctgcgggaccctgagctgcttccaagttcctgagccacagaaacagaggggaaagcacttggaagccgttttaagtccctaccttttgggattatttgttatgtggcaaaaggtaactgatacagtgggtaaaagcacctagcacagtaccttgtacagaattggggctatagaacagacaagatctatagctctggattcaggacagagggctgggctggagacagggatttggaagcctttggctcagacacagtaaaggaatccatggaggtggctgagccattccatggagaggggtacatggagaggaggggattgtgttgaacaggaacttgagcttaagtgtcggggtaaagcaagaggagcatctttgtaagtctaagaggaggagctatggaagaaggaggagaacatgcatcctagaagccaagggaaggggctgtcccctggcagacgtcactgcagaagccttgctgcggagaggcctgagccatgcaggtcggaggaggttctttcagatttagtatcaaggaggattctggtgagccatttagatggagaggtgggccctgaggccagattgaatgttacgggttggggtcttaggggaagtggggggacacagcaaaggaagagagggagggggacactgtgtcgaaggagaagtctgaaaattcttgagtcagggacagagacctgaggctgtttatctgctgatgggcgtgggagatggggactggagagagggagggatggaagatctgagcctggagaggctaaagggcgggagaaggaatggactagagcccagggaggggatcacctggacaggaggtggaatcccccagccatctcatgaggggaggacagtgcaatgcaggtcattccaaaagagggcagaggagggttctagggggctcccactgaaggggaaaggttttcctgacaagtaggaggtgaggtcggctaggcagtgagagttgggagaagggagagagggaggggactcagatctccacacttcattgtcttgtcaactgctggtgcccctttgccctcccagcaccgtgctgggcttggttccttcctgtaacaggtgtagctgcaataataaacagccccctccaggtcagcctggccccagggcagaccaggatcagtatctttaccacaggagcctggatacttggtggccacctggaaaagaaaggtgcagagggtcaggggcagctgtaaaccagaagccagccttccccagcaggcttgcaaccctgagctctgtggaggcaaacagcttccaatataaaccctttccacccccaaccccccaaaccaacagatccagatggtttgcgggagaatcctatagaacattcaaactacagaaaatcccagtctagtgaatagacactcattccttaaggtatgttatgaggctcatgtaactttgatagcaaagccagacgaggagagaataagcaaatagtagcatatctcagtcatccacgtggatacaaaaaccctaaatgaaatattagcaaatggaaccctaaatgaaatatcagcaaatggaatctagcggtatactgaaaaaataatacatcatgacgtgtgaaattccttgaataaaaatgcattgacttaaaaaaatacattatcaaggcgagtttatcccgggaatacatggatggtttaatatagtaagatccatggttgtaattcattacattgcaatggggggaatctcacattgataaaattcagcacccattcatagtaaagaagaatagtgcttccttaccctgataaagaatatctatcaaaaaatccacaacaaacactatagttaatggtgatatgttacaagcagtcaagaacaggataaaaatgcccattaccatcactgctcttcaacattgtgtgagagaatttagtcagcacagtacagcaagaaaaaggaaaaaaaggacaggaagataccacactgttatgacttgcagactctatgattatttgcacagcgaattcaagagaacctacaaacttattagaactgaaagagttcacttttgctgaatataagattatataaaacccaactgcatttcaatagccatctatcaattataaaatacaaaagtgaaagtacaattagcactagttataaaaattttaagataggagggactaggtctgacaaaatcaccaacaaaattaatccatcagtttttatatggggaaatagaagccctgagaggggaaatgactctttcaaggatacccagtaaatcagaggcaattctgggttttcagtggcaccaaattctggagatctgagtattgggtaattttggtattgtccttctattaaaaaacaacaaaacccagtggggtggggaggagtggggggcaaaaaaaaaaaaaaagaaaaaccaaaccaaaactcattgtatttttctgattataaattcaatatttatgtgttctgattataaattcaatattcatgaaaattcagaagaacgttatgaagtaatgccattaacattccccatannnnnnnnnnnnnnnnnnnnnnnnnnnnnnnnnnnnnnnnnnnnnnnnnnnnnnnnnnnnnnnnnnnnnnnnnnnnnnnnnnnnnnnnnnnnnnnnnnnnnnnnnnnnnnnnnnnnnnnnnnnnnnnnnnnnnnnnnnnnnnnnnnnnnnnnnnnnnnnnnnnnnnnnnnnnnnnnnnnnnnnnnnnnnnnnnnnnnnnnnnnnnnnnnnnnnnnnnnnnnnnnnnnnnnnnnnnnnnnnnnnncatgcagacgtgaaacccaagtgagtttctaaggccagtggttattctggtggagaaggttaaacccagcatcaggtaactggtcccaccggaaggggacagtggcctgggtagcaggaagtgaatggacttggaacgagtggacggatggagaacaattagccctgaggcgttaggtgctgcccatcctctgcagccttggcttccttcctggtgaagtggggacaataccagcgccagtctcatctagggtcgagctcctccaggccccagagcctttgcatgggtcgttttgtctgctgaaggtagctctgcccttctctccacctggctgcccgtgttgctgagcttctgggcccagcagccctttgctgtcttgcccgtcaggccggaccagaccgtcttgccccggtggccccgggggcttcttcacaggcctcatcgcagggttgtctccccaatgcagggcaggcaggaggagctctggccgcaggtcggggtccaggtcttcctcggccactgcgtttggagcaggggctcccttcccttcttctccatctaagtcctcnnnnnnnnnnnnnnnnnnnnnnnnnnnnnnnnnnnnnnnnnnnnnnnnnnnnnnnnnnnnnnnnnnnnnnnnnnnnnnnnnnnnnnnnnnnnnnnnnnnnnnnnnnnnnnnnnnnnnnnnnnnnnnnnnnnnnnnnnnnnnnnnnnnnnnnnnnnnnnnnnnnnnnnnnnnnnnnnnnnnnnnnnnnnnnnnnnnnnnnnnnnnnnnnnnnnnnnnnnnnnnnnnnnnnnnnnnnnnnnnnnnnnnnnnnnnnnnnnnnnnnnnnnnnnnnnnnnnnnnnnnnnnnnnnnnnnnnnnnnnnnnnnnnnnnnnnnnnnnnnnnnnnnnnnnnnnnnnnnnnnnnnnnnnnnnnnnnnnnnnnnnnnnnnnnnnnnnnnnnnnnnnnnnnnnnnnnnnnnnnnnnnnnnnnnnnnnnnnnnnnnnnnnnnnnnnnnnnnnnnnnnnnnnnnnnnnnnnnnnnnnnnnnnnnnnnnnnnnnnnnnnnnnnnnnnnnnnnnnnnnnnnnnnnnnnnnnnnnnnnnnnnnnnnnnnnnnnnnnnnnnnnnnnnnnnnnnnnnnnnnnnnnnnnnnnnnnnnnnnnnnnnnnnnnnnnnnnnnnnnnnnnnnnnnnnnnnnnnnnnnnnnnnnnnnnnnnnnnnnnnnnnnnnnnnnnnnnnnnnnnnnnnnnnnnnnnnnnnnnnnnnnnnnnnnnnnnnnnnnnnnnnnnnnnnnnnnnnnnnnnnnnnnnnnnnnnnnnnnnnnnnnnnnnnnnnnnnnnnnnnnnnnnnnnnnnnnnnnnnnnnnnnnnnnnnnnnnnnnnnnnnnnnnnnnnnnnnnnnnnnnnnnnnnnnnnnnnnnnnnnnnnnnnnnnnnnnnnnnnnnnnnnnnnnnnnnnnnnnnnnnnnnnnnnnnnnnnnnnnnnnnnnnnnnnnnnnnnnnnnnnnnnnnnnnnnnnnnnnnnnnnnnnnnnnnnnnnnnnnnnnnnnnnnnnnnnnnnnnnnnnnnnnnnnnnnnnnnnnnnnnnnnnnnnnnnnnnnnnnnnnnnnnnnnnnnnnnnnnnnnnnnnnnnnnnnnnnnnnnnnnnnnnnnnnnnnnnnnnnnnnnnnnnnnnnnnnnnnnnnnnnnnnnnnnnnnnnnnnnnnnnnnnnnnnnnnnnnnnnnnnnnnnnnnnnnnnnnnnnnnnnnnnnnnnnnnnnnnnnnnnnnnnggcctgggcgggggttccggggcccgcccggcggggatgcgcggtttctgcgggcccgggttcggagccccgcggcgcgcccctcgtccgggcccggagcatcgcccgccctacccctggccgggtcgggttgcgggggcttcgctggcggggcagcagcgaagggcggcccggacggagatatttggggtgtgctcgaaaatgattgtttttgggagatggcgcttattagccaccaattgccctagtttaaagcttgaggcaggactcaaaaccctgcctttgggattttctgccctgaagagactctcagatcgcagctgagttctttatgcctagatttgtgtgtgtgtggtggcgtttttaatgcttgatgtcagaggtgataaatggccatggtaatggggagccctggcagcacctgctgggctgacagtggtggaggctgtgtctgggggtgggacggggaaatgaaacgtgacagagatcctgtttggatattctgccgaagttaccatgtttctgttcaagtataccagttctagaacaagttgatggatccaattttaggactttgtgatagaagaggtttgggtggcaaagtgacctgggatgacccggctcggctaagaatatttggggtagcctaagtatctcttctatatccccctggcatgttctttttttcgctgtcacaaatgccctattacttgaatcatcctgggataggagagaagcttggggacagcatgtagcacagtcctgagcccaagattgagatgttttcaaatgaacgaatatgtagctaggaaaaggaaaatgtgtttgtcagcagggttggtaggttgagagtattttctctttggccgaaaccatcagtccatactgatacttgattttgtgctatgccttagatatgaacgatggagtggtcaggatagccatggatgccattccaaagttttgtgatttgaattttcataaatcatattttaaccaaagcattactacttaaaggaatcttagggtgaaccctatgaatccttcagtgcgcttggattttgatatttggggtccatttaaaatggagtacctgtatgtatttggattcagctttaacttggagataatcccgagtcatgctttaaagaagttccttctgagatcaggagctcaggtgtttggtgaactctgggaaaactagacactcccctttacctgtatatagttctcccttctggagctctgggaaaaggaggacctggggagatttgaagcaaattaagaggctgcctcctccatatttgccgtctccaggccaatgctctaaattacttgtgttcacactcaagtttctcatgttaacctagaaattttgtttatgctgctgccactaatgttttcacatttgtctaatacttgctagtttacagatggttttatattcatgatctcccttattttctccatttccccaaagaagaagctgggcataaagagtgattttctcagggtctcataatcagtaayggagcagaattcaactacaggacctccctgggaacctgttctctttccttgtcctgatgtgttactcttataggccaatttttgcctttgtgttgtgcctaaatggtgtaattaccccgttttgggaaggtggtattatcccgttttatcttgcggaaactgagggttaagaggaatgttatgattttgtgactatttgtgacagctttttaatattaggtcacttttaaacctatagcttctctcttctagaccacatggttgagaaaggagaaagagaaaatgattacttgtagagaaaaatccatttctgcagtggtatggttaaggataatctaaccataatcacattatccttgtatgcctggctacttrtgctggcctgtatgtgaatgttaaccccaaagactcctttagatgtcgctgaactagttactataaaaagtatttcgctttcaaactcccacatttcaagaagagcaaaactcaatacaaggcaattttgaaggtaagtatagaaagagggagtttattgagtcttttctgactaccagacacgaaggtttcagtaaaaaagcatttttaaagggctgcctggaaactctgggaagtcagtagttggagttttttattattcgttggaggtttttattgcaacatataggtagttatataggattaggacttttgccccggagaattcttaatctatagcaggaatgataaacccagaatatttttgttaagttagttcatcataaccattaggcctgtaattgcaattctgcagtgatagggagaatggcatttaagsgttcttaggttatttttttaagttattaacttactgaattatgtatgcatttcttcagatatgctactttagaaaattaatacttccttttaaggtttctataaattcttcagtatgtgttttcttaagcttaattacctgctaacatgacactgtcagaatttatacattagtcacaataacctttgaagcttaaacatggttgaattttcagcactgctttatattctttggggagtgggcagtgttgttttcacaagaattttatttgcatcaaaggttacatcttttcaggtgaactgatttttcagggtcagaggcttctttgaattttatagctgtttgtgctcggttgcatttgctgtctttcaaaaccatctttagttttagtaaggaaagtcactataaaggaaaaattttttattgttaccattcctggtagattttctgaaatattagatatttctttgctttcatcaagtaaaataggcctatttgatacccatttcaagatcttccttctgctgcctgtcttgtggtcatttaacttctcattaagccctccactggagactgtgccagaagggagagaagatgaaaagcaaatgaatcattttctaattgttagtagctctggaaaatgattcagtagaagagattgaaactattctggaaattctttgggattgtatttcattcatctgcatcgtttcagagatgttcctaatggtcgtcaattcagaattcagaagccgatcattatccagctattggataacagggaatttttcatgctttttttttgtttgtttgtttcttgctgtatttaagcatctccacagaagatatttagaagcaggtagagataaaatttaaactaatcaatactgttttttccctttgaactctttaatgcacaatttgatttctttagacagtttactcattgttattggaagtgactaatagtaactttgcttcaatttattttgatgtatcttatacacaagtataggaaggcttttgggtggtttttaagaaacatgggctgtagaktcccataattgctttcctgaattattaagcgtgagctttcattacatctttgtaccggaacttttgcttttgctgtggaacagattcagggacatcgtctaatttttttttttttttttttagataactgctcaagaagttaccttgttttgatttagcagtaaaaaagaaaaaaagggttaatagtggacagacttttcgttaacggctgcaacattgatgtctgcttttttccttgtctttgatcttctgtttctcatttaatcatttggatattcacggattggagttctttatgtcactacagacaggacagcaaccgttattcacactagttgaatgggttcctgcctttttttggtggggggggcctcaggagaatttttacaaacccrttatgactgtttagttaggctgagttactgtaaaatttgtaaataaaaccctactggatggatagggttaatagatggctatagagagtttaaagttaagctttttcaatttcttgtctcttggattctgttctttcaatttctaccctaggaggggatttatggaaaaatctagactaagagtcagaacatgcaagttcttatctagttacttcccagctgtggcgccctcagctagtcacttaatctgccttgtttctctgttttgcatctttaagatgaggatagtaatccctgctcggcctactggtatcaggaatgttgtagggggaaaaaaagtctttcatgcccctgtctattaaattgtttcttccttctagaatcccttctcaggttgtccgaattttctttcaaggattcaactgaatgggctcttcccagaagtcctctatttcccatttgaaatcttgcttttcccctctcacgggcctctgctggtccatctgttatacagcactttgaattctgttctgtacttcagtcattgcatgttgccttccattatagatggaaagctccatgagggcaaagattgtctttttcctctttctgtgtgtccgcattgcacataggcaccccctccactccataggtgacccacaataattgttggctgaatgaatgattattgaggctgtcagaatgaatactttgggtgatgggaaaatgccaaagatgagcatcttaccagaacttttggatgagtggccttttaaattgctcagttactaatctgttgttatcagtaactgaatcagatcctggcaagacaaattggcaaagcccatttcttggtcctgtttacttcggatactatttgtgaagcaagtcagaggaatgaaagactgtcataacagtcttgaatttgacatttgttccatttctcaccccatagcatgtggaggcctgtctatatccaactgctgagtgtaaagaataaaaactgactgccccatagtctggtccacattttagttgtgtgctttgaaggatttgcaaggtagagaaatagatgcttcaggctctgatttcagcccatgctgtgctatgcaaatgttctctacatgcctgagtgaccttttgagaaagagcctttgtgatcttctgtagctagggcttgttctgggaattctgtgccagattcctctaaaagtgggaaaagtgaatctgttaaaggaccacgtaaaaaagccagtgcttttcctggatgaataccaataagtccatgtttcttaccatgtcttgccagagctttagaaatttgctctgcagtttgctttacaggttgatttgggattgaagtgtgtgagagggaactgactaaggcagttcagtagctgggaaactgtttgtttamatgcttttgaattgtagataaaaataaattcacattggcatcattagtatctgagcatttctcagtgtcttaaggctggctctccatgagtgctggctgattgactctcatctatatcggtaaggttctttttgccccaaattgtgctctttaacacttcggcatttaaatcactttctatttgttttaattgtacaaagagaaatacatcattatttaaaagcatcatcttttttttttatattgtaagataaataccattctgatgtatttctcttggaaagggatgctggtatcctgggaggtttatgatttttgatgyttttactcaggtgattggcttgtatagctgaaatgctgatgaaaaggagttttcccttctccctttttcttttcttttctttttttttttttttttgagatggagtctcgcactgttgcaggggctggtgtgcagtggcacagtctcggctcactgcaacctccgcctctcgggttcaagtgatgctcctgcctcagcctcctgaatagctaggattacaggtgcccaccaccacgcccagctaattttttgtatttttagtagagatggggtttcactatgttgggcagtctggtcttgaactcctgacctggtgatcctcctgcctcagcctcccaaagtgctgggattataggcrtgagccactgcgcccagcctgtccctttttcttaaatgacctttttggtgaggaccattataggtttgtaccaggataaggttgtagagttaatcataatattctcttatataaattctaaaaattgatgttctaagaagagaggtagaatttgaatgactgggttacttcctagactcttcctccttctcttaagtacagtatagttctttctctgaaaatcttcagtctcttagttccagatgggttctctatggtaagaatacaggacatgtagaaggccctaggggaatgctttcttccccagatctttgccctgtagtaggtttcagctgagcaaggacgagtagtttttctggtgtttggcctcctctgttgggtggaaaaagactttcttctctattttcctagttatatatgctatcatatgtctgtttttctcctcttgaagtttccctgaaacctgggctcttgaagacgcatcactggagcagatggataatggagactggggctatatggtgagtgcttcytggagatgcattttgaaggctggggaattatttttgtgtgtctttttatccttatgtatttttaggtatatcttataagaaaagaaaattgtgaatttgtgtaacctctcttcccccttttacttagtttagatgtattttggaggcgtttttgtcttgtgtggtgttttttaaatttttatttaattttttttatgtggagtctcgccttcttgcccaggctggagtgcagtggcgcgatcttggctcactgcaacctccacctcctaggttcaagagattctcctgcctcagcctcctgagtagctgggattatcagcgtgcaccaccacatctggctaatttttgtatttttagtagacacggggtttcaccatgttggccaggctgatctcgaactcctgacctcaaacgatcctctgcctttgtttggtgttttaatggaatcaaactcaaaatgnnnnnnnnnnnnnnnnnnnnnnnnnnnnnnnnnnnnnnnnnnnnnnnnnnnnnnnnntataatcactggagaggtaacgtgattttttattttttcaagtgtgttgctctgaagactctttcttcatgaatagtgactacaaagggatctagtgagtttggaggatattttgttgtggtttgggagattaatggttgagaaagtgcctcttctccccacttgcattttttgtgtgtgcatatgtctccctatttttctattcctttggtgtaaggtatattttacttgcctatacctgaagtctctgtctgcctttcttttttctttcttcctttttttttttttttttcgagacagggtcttgctcttttccctaggctggagtgcaatggcgtgatctcggctcatgactttccaagctcaggtgattgtcccacctcagcctcctgagtagctgagacgataggtgggcaccaacatgtgtggctaatattttgtattttttgtagagatggagttttgtcatgttgcccaggctggtcagcaactcctgggctcaagtgatccaccctccttggcctcccaaagtgctgggattacaggtgtgagccaccacacctggcctatttttttcgtaaatagtatttctaaaactgaaggtatgttttttaagagaagcttgcttctcagaattaaaggccagattgcagcattaatgttacaaaagtgaatacactatcagattatgaaattttatggctgctgtaagcttttgggtatgtgatgcttttctggcttggttgtattgactaaactgtatattttaacttagtatttgaaagtatcacttccatgaaaaagttaccaagattaggtctgcacagtttttaatttaatttaaataattttttttttttggagacaaaatctctctgtgtcgcccaggctgaagtgaagtggcatgatcttggctcactgcagcctgtgcctcctgggttcaagtgattctcatacctcagcctcccaagtagctaggactactcaggccaccacacccagtgaattttttttttttttttttgtatttttaatagagatggggtcttgccatgttgcccaggctggtcttgaactcctgagctcaggcaatctgcctgccccggcctcccaaagtgctaggattacaggtatgagccactgtacctggcccaaatttttattttaaaaacaaatttcatagtttgttccttttgtttgagggggagaaaccaaagaaatattgaaagtaaatgtctatattatcagatcattttaattctatctaatgttaaattaaattcagaaaaatgcaagccttaaaaaaaaatcagaaaaaaataagtgtattttagcgtggcttttcccttcccacatatattctggcctgaaaactctatagataatgggcctgaaatgatttggctctggaagtcaatgccctgtattcttagcataagtctttaaagagaaattggatttctcctttttttttctattgaaagcaaatgttagatcacttcatctgggtgggtttattgctggtagtaaagtcattttgcattagaggattactaaatacattatagcctgaaagaatcttgggctttgctcagtatcacttactttcttaatttgtcaaagttagtatttaaaaatttcagatgactgatcatttctttacaaatttcagatgactgacccagtcacattaaatgtaggtggacacttgtatacaacgtctctcaccacattgacgcgttacccggattccatgcttggagctatgtttgggggggacttccccacagctcgagaccctcaaggcaattactttattgatcgagatggacctcttttccgatatgtcctcaacttcttaagaacttcagaattgaccttaccgttggattttaaggaatttgatctgcttcggaaagaagcagatttttaccagattgagcccttgattcagtgtctcaatgatcctaagcctttgtatcccatggatacttttgaagaagttgtggagctgtctagtactcggaagctttctaagtactccaacccagtggctgtcatcataacgcaactaaccatcaccactaaggtccattccttactagaaggcatctcaaattattttaccaagtggaataagcacatgatggacaccagagactgccaggtttcctttacttttggaccctgtgattatcaccaggaagtttctcttagggtccacctgatggaatacattacaaaacaaggtttcacgatccgcaacacccgggtgcatcacatgagtgagcgggccaatgaaaacacagtggagcacaactggactttctgtaggctagcccggaagacagacgactgatctccgaccctgccacaggttcctggaaagactctccaggaaatggaagatactgatttttttttttaaatcacagtgtgagatattttttttcttttaaatagttgtatttatttgaaggcagtgaggaccagaaggaagttttgtgctttggcagactcctccatgttttgttcccttccccctgagtatgcatgtgcctgttcagagtctccagataccttttttataaaaagaagtctgaaaatcattatggtatataatctacccttaacagagcttttcttattacagtgctaaaatgatttctgataaaatggtccctaactcaactagaaggctaaaaatacaagaatgaaagaataagcagagtactcatgatgcctttgagaaaaatcaaaacatcatgtagggtgacctagtttccaaaccaataaataagtagtattgtaatattaaaggaaaactgttccaatcatttaaaagtacttattaagtactgctttttacagttatgacaactgtttctttctatgcatataaatcaaggaaccaaatatctgtagccatggaaatgtctgactagaaatatttatattgaattctgaatacaaaatgtccctgtggtagaaaacttactctttatgcctggtgcagtataattcccaagtgtactgtctaccagaaaaaaaaaacaaaactaataaaaaatgaaatatgaaaattaagtttgtatttattgattattattacttaaggggagaaaatcatatttcttgtctaaaatatgcattgtttatgtcccagtgtttactgcccatagcacatttgtatttgatttgagaggacacagtgggatcttaggttgcagtttataagaactgttgcgtcactgaaacaaggatggatggaattattaattttgactaaaagggtgcatatttgaacagtgaacatacagtttttcatattttttcaaaagaatttatgttgaaggttacagattttactttaattgcccacagttctatgaccattatttcagttttgtgctaagcacaggaacaaaatgactttagccctttatgctcatgttttgtgctaatcgacaaatgtattttgttaacaaagttaagtttatttctgaagagaagaaacaaactgcagtgaatgaatgacctagaacggttggagaaatgcacgtacttggagaaatacacgtacttttatttatttcactgtagtcttattttgcatagttcatgtgcttctatttcttgaaagtaactcataggaaggattattttaattgtactgagacttcctactttgttagaccacagtataaaaggaagtcatgtaatttattccctattttctaagggaagagtggagctctgaggctgtgtgccctggggcaagcaggccactccttttctccttctctctgtgagaatattctgaggttctctctctgcaaggaagatgacaacacttccttatgtctatttttgcccacgtctctgaaaatttattttaaaatgtgacaaatgacccacatccagaaacctgtaattaccctattttcaccatcttcaaactaagatcctttgatgttattgacaggttgctgtggtttcagtaaatcaatatacgagtacaaggttatcattttggaaaattatcttgtatttaaaattgatttgatagttaccttaaaaaaaaaaaaggcccaaccagttacgtgttgttgagctagctgaggtcaatatgaaataaaatgatttgggttgaaaacaagtggggaaataggaataatactagtttccagtttttatttttattttatttttaaatgatttttatttatttatttttgagacagagtctcactcttgtcacccaggctggagtgtagtggcgcgatcttggctcactgcaacccgtgcctcccaggttcaggtgattctcctgcttcagcctcctgagtagctgggattacaggtgtgcgccaccatgcccggctaatttttgtatttttagtacagatagggtttcaccatgttgaccatgctggttttgaactcctgacctcaggtgatccacctgccctggcctcccgaagtgctgggtttacaggtatgagccactgcgcccatcccaagtttttaaaagttaaaaacttatgaggcctcttccttgtcctgtttactggagataagtttgcttttggtaaattttctcaaatttactgattattaacaatgaaatgattgtttatatgagtaaattaggaaaagtagccagctgaatttttttttttttttttttttttgccattttacttgtctagtgacatttagagtgttttgtctaattgggcaattgaaaatgatatgaaaaatgtagcttcattttatttgggtaacttgagacagttatgtcttttaatgaaattttaaatcatcactgtggaagagttgatttttaaaaaatgatagttgcattcttagagctgtattttatttagattacagcaagtatacgcacttaggaggattgtgtgtgtgcatgtatgtgtgtccttttaaacccaaggataaatgtgtgcgaaaaacacactaactaatgagcctattggcttttgctagatctacagcaaaatccttgtatttaaccaaatagatgctataaatggacagtggtacggtttttttactgtgggaaatttctttctttttctttttcgagataggttcttactctgttgctcaggctggaatgcagtgatgtgatcacggctcactgcagcctcaacctcctgggctcaggcaatcagcctccctatagctgggaccacaggcatgtacccccatgcctggccagttttttttttttttttttttttgaggcggactctcgctctgtcacccaggttggagtgcagtggcgcgatctcggctcactgcatcctccgcctcccgggttcacaccattctccttcttcagcctcccaagtagctgggactacaggcgcccaccactacgcctggctactttttttgtatttttagtagagacggggtttcaccgtgttagcgaggatggtctcgatctcctgacctcgtgatccacctgcctcggcctcccaaagtgctggtattacaggcgtgagatagttatttttgtagagatggcatctctctatgttgctcaggctggtctcgaacttctaggctcaagtgatcctctcatcttgacctcctaatgtgttgggattacaggcatgatccaccacgccctactggaaattgcaaacacattcagaagtagagaggatagtgtaatgaacactcatgtacctgcccattgaccagcttcaacaactgttcactttggcttttttctcctatggattattttgaagtaaatcacagatattatttcacatatatcacttcagactgtatctaaaagataatgactctaaaacataaatatctaatttaaaattttaatgttgcatatatgccatagtaccattatcacatgatggtgctggttgcttcttgaatactgttggttatttcatagcttggatctccaactttgtaaaagtggtcttatatattcctcataggcagggttctcctgtttgtagaaagaaacgcattattaacacagtacatttctgccaggattaatgactttcactttcaaattaagtctctagcttcaaaaagtaacattacgtaagattcttaattttaaaaattatttctaagactcattttgtgtgaacatatggagaaacattttttccaaagggcatccttccttttctcatgcagattttaaattgtggatgcaggtggccaattaaaaacacagcttatcacttgcttttggaatttcatacaaataaaaggcttgactctttgaggctctctgaaactgaacattaatcacaaagcaaggaaccagatagggatcatataagcagtattctaggtccgactaggttatcctcattatgctgtaattcagtgtcttgattctttgtttcttagttctagtctcatcttttataatatttactttgtgtgtgtgtgtgtgcctgtctacactaaaactgtaagctcctcgaacactgggcttttgactgtttttttttggagacagtattgctctgttgcccaggctggagtgcagtggtgcgattttggctcactgcaacttccgcctcctgggttcaagcgattcttgtgcctcagcctcccgagtaccttggattacaggggtgcaccaccacacctggctaatttttgtatttttaatagagacggagttttgccatgttggccaggttggtctcaaactcnnnnnnnnnnnnnnnnnnnnnnntcttgttctccagtgtatcttcagtatctagtaatagtttttggcacaaagcatgtacttagtaaatatttgttgaattgttgaatgaatgaatcagtagatgtatttaatgcatctaactcctacttggacacatttttacaatagaataattggggaaaaacaggatttttgttttgaaattatccccaatgattcttcccttaaaccaaggaaagcacatcatcctgtccaggaataaagctcaacgctgccccagacagaagagagcttctcctatgattctaagatgtttaccttagcatagcacttttcttttggtagaaaaatgtcagtgaaatatattcctgtctgtacttttatgtctacagggtgtgtttcaacatagctgctgttttatttaaaatatctgccaggcatggtggctcacacctataatcccagcactttgggaggctgaggcaggcggatcatttgaggttaggagtttggagaccagcctggccaacatggtgaaaccccatctctactaatacaaaatacaaaaattagctgggtttggtggcttgtgcctgtaatcccagctacttgggaggcaggagaattgcttgaacctgggaggcagagggttgcagtgagccgcggttgtgccactgcatttcagcctgggcgacagagcgagactctgtctcaaaaataataataaataaaaatacataaaatatctgtagtgtgcctttttctattagtgcaaatgaggaaaatgtctcttattgcagcttcaaaattatagcattatatcttaagagtagggttaaaaaattatccacagcacattaaaaaatacactttaaaagtgctattttggtgatctctaaaaggagccagaaatgtaagatcatgtacattagcaggcagcctcatgtcattttaactgactggaaacagttcactaaggtcatttgtaacttcacattcccaaattatcatgcgtgaaagatccacaatgctatacctgtcacctttttaggaaggtaatataagctaggatgacaagagtgtgtggcactgtgtatgcagcagattcctttgtctcactatgcaggttgtaaaaccatgttcatttattccatagacgtggagtgtctactctgtgatagatcttggagttgggaaggtgaagactccttcgttgttcacagtcaagtggaaggagatagaagtgaatgggatgaagtgcatcaatgttttcccaaatgtgttgaccctctgggtcagtcattcctctcgtttagataaacatgttctcatgtagtatccagattaaagtcttttaaaataaatattaaaaccaactaaaacacaagaaagccccctccattctctctagagaaaccagaatgtttcctgtgttgccagtataacaggtttgggctatatatgtcagcatttctgacaggtgttatagcagggcgggtttttctgtggagcaccaaagggcacacatttatctttagaccatggaagctagtctggagtgggaggactgctgtatttttatgccaagattgaaatgttagatctaatcattagaaaaagtaacacactggaagtaggttaactgtactaaagcagtgaacatatattgtttatatttccttgagttaaaaggatgtctttctggggacagggagtgaccaagatgggttagttgtgttgtaactttagataatcatgttaaattaagccatgtggtatgacaggctgcaaattgttaagagcaagtctaacaccatgctgggtgtgaatgaaagcctgagagttgccaatttgatgtggtgttaagacaccttttctgaaattggaccaaagaggtaaaaaagaaagcttcaccacctgaatcatgtatttgcactataaaatttaaaataatctgttttgtacctatagactttttgttttgatcatctatgtaaaatctgctattaaatattggttcctcatattctaactacagggtttattacctcactcctgttaacatattcattgacatttacaacttttcccaaagaggctcataagcatagagctgcgagcataccctggcccttgagtgttgggaccttatgagtcctccccgtcttctcgctgttaatgatgtagagttctggtgtgctctcctaggatggctggggatttttttggcatgacccttttaattgtcactcatatggctttcctgggctactaatggcagtgcagcagctttctttgctccttggattgtattccttagagtgaagaggagagggta

SEQ ID NO: 97730 - DNA, 15408 bp, Homo sapiens
gtttatcgcaaatccacatctctagtgtgtaaaggatgattctctagctttaccacaggccggagagaagccctctcacagccgagggcggtggctcacacttgtaatcttagcactctggggggccaaggcgggtggatcacctgaggtcaggagttcgagaccagcctggccaacatggcaaaaccccatctttactaaaaatacaaaaaattagccgggcatggtggcgcatgcctgtaatcccagctactcgggaggctgaggcagaattgtttgaatccaggaggcggaggttgcagtgagccaagatcactgcactccattggagtgccattgcactccagcctgggggacagagcaagactgtctccaaaaaaaaaaaaaaaaaaaaaaaaaaaggaagccccagactttatttaatcgagcttcttaagtacacccagcatctattttgtagggttcatatggatgaacatatatgaaaaccttaatcttctctccttgccttgggacggaatccaaaaacttatctcattcacctatccaattaagactagaaacctcttatggtttttatggctaataaaaccattaaaaaaaagtatgtgagatcgggccgggtacggtggctcacgcctgtaatcccagcactttgggaggccgaggcgggtggatcacgaggtcgggacatcaagaccatcctggctaacacagtgaaaccccgtctctaccaaaaacacaaaaaattagccgggtgtggtggcgggcacctgtagtcccagctactcaggaggctgaggcagaagaatggcgtgaacccaggaggcggagcttgcagtgagccaagatcgtgccactgcactccagcctaggtgacagactccgtctcaaaaaaaaaaaatttgtgtgagatcaaatagaaacagacacgcactatatgcagaattatcctattttactcattgaggcctatccccttgctttctcagaaaccctaaatgatcagttacccttttctctgctgtgttcatttcccttccacacacgctcaagtctcaactgtcttcaaacacacactcatatatatatatatatatacacacacatacacacacacacaatttcatacactcacaggcctattcttgcccacaaatccccttcagctactatctcccttttctcccctttcctttccaggaaaactacttaaaagagttgtccatgcaagttgagtatccgaacgttttgggactagaggtgtttcagatttcggaattgggagtatttgcattacacttactggctgaacatcccatatctgaaaatccaaaactggaaataagcatttcctttgaccatcatgtcagtgctcaaaaagcttcagattttggagtatttcagattttggatcttcagtgctcaacttgtactcactttctccattttcttgcctgtgactcatacctcaacccacttgaaactcacttctgttcccattattttacaaaaccactctaagatcaacagtgatatccatgttgctgaacccaaaggacatttttcaagctcccttatctcacctcccagcactatatgctcctactgatcaccaccttcacgaaaccctcttttcctctgaatcttagcatagcggcctgttggtatgccttgttcaacagatgtttattaagcatctattttgtgccaagtactatttcaggcactgggaacatagtgatgaacaacagacaacctgtttttgtgacacttacattttacctctctgaccccactttctgctttgaaggctcctactctcctccttgaccattaaatgctgaaattttccagagctcagtcctaagacctcttctttccagaagaaatctcatcagtacccacagccttaatggccatacatgtcgatgccacacaaatatgtatctctagcttatacctctctcctgcttcttgagaaagcagaatatccacctgccttctcagtgtatctacttggaagacttacaggaacctgacaatcaacatgtccaagactgaattcatcatctccccttctaaacccctccatgactggaaccattatccatctatagctgtgtaaaccagtactttcttccttacaccttctccctgacccagtcccaatccattaccagatcctattgaataaacattcctagtatctctaaaatatttccattttccccatctgcaatgccaccattgtagttcaagctactaccatttctggcctattacaagtttcctaggtggcccatacactgaagccatatttcaaaatctaaactggatcgtgtcatccagctggctaaagcctttcgatgacttcacactgcctacgaggcctactggcctctggatctctcttaccctcatcagtatcatgctgctccttctctaggcatttccacacaggcctcctctcaggctctcaaacccgcccagcttctttactgacctgatccccccacccccaacacacacaccaaaggctcttccacagccgccccttatccaccttcacctgcagctactctagctcgttagcactcaatgcaagcagcatttcctcagggaaacctttgtagcaccttcagaacaaggtcaggtgccagctcataagctctcaaagatccttctgagacaatactatagtttttttgtttttgttttttaaataaagagatggggtctcactatgtttcccaggctggtctcaaactcctaagctcaagcgatcctcccacctcggcttcccaaagtgctaggattacaggcgtgagccaccgcacccggccactatagttttaattgtatattcattagtgtgattatttgatttgcttatcttttccactgaaccttaaagttccaaaatcagggaccgtgtgcatttgtgttcacccatggatcccttaaccctagcacaaagtgtttacacatggtaaacactccggaaatggttatttttttctgagacgaaatctcactctgttgcccaagctggagtgcagtggcgcgatctcagctcactgcaacctctacctcccaggttcaagcaattctcctgcttcagcctcccaattagctgggactacaggcatgcaccacgatgcccggctaatttttgtatttttagtagagatggggtttcactatgttagccagactggtcttgaactcctgaccttgtgattcacccgctttggcctcccaaagtgctgggattacaggtgtgagccaccgcgcccggccaacactccggaaatgtttaccgaaacacggacaaccaggcatgacactcttggagattacattcacttggctcatgtccacagaaaaacccacattaccgcaataataatcgtgagaaaccaaaattctaattaaataaattagtcctaataattagcacgtgattaactgctttattcacaaatctctatttatccaacaactatgcattgagaatttactatggaccaaggaccgtgctggaagttattcatactgtggtggcaaaacgaagtccctgtcctcacggagcttacaaaaattaatgtccaaccaggaggtgatctgaaaagcacgcacacatagaataatttagggtggtagaggagacgcctcaccaaattctactttatggaaattctatattactaaaacagtagatatcaatattcccaaagtttctgagataagtaggtgttcaaaacagtatcatgctgctccttctctaggcacttccacacagccctcttctcaggctctcaaacctgcccagcttctttaccgacctgattccctctacaccaagggggtagcgttgttgtttagcgttgctactacagaaaagagggagtgtatctgctgggcctgctttaccttggaagttatgattgcatctcatcctagccagtcagctttgtcccaaaaaaagtcaaaatccctgcctatttgaataaatcatctggttgcaactacaactccatgtccttccttctcaaatgagtggggagaattcaaataataagcaaaaaactgaaatcaaacaagcagagggataaaaccagtatgggtaacagctaagtgtttaaatattgttttgggtagagaataaggagactggtctaagtctcttgataatccaaaacttccacctcatcacttactttaacagaaatgaaataaggcctggactagagaacaggttactcctgagtgtagcatgtttccactacataaagtcaccaaacttatttttagtcttaaagtaacaataaatcttaccccatatacttttattatctaaagtctcagcttaagtcatcttaagctgaatatagttacttctctgttatcaatgataatgatgacccagagaaaaataggataaccaaattcactgacgcgctcagaaattctttttaaaactgtaatttaagttaggttttatggcaagctttcccaaagtactaacgtagaaccctttggatttaggcatcaggcttgagtaagtatttcaaagttctaaaaagtattagtagcaaagaacataaagtcacacaaaaccagaactgtccacaaatattactaggcactaaagaagaaagcaacttactcctggacagaaattcaaacgcaaatctcagtttccaaaggattgactaaggactaagtaaaagtaatagtttcgtaattctaagcaactctaacaagcattctttaaacaccttctacattttaagacacaaagtatgtaaagaattaagcctttcattgaatatttcctatatattagacatgtgctaaatgcttcacttgaaaagtctgagttaaatacttttccaccacaaaagaaatactttttccacaaccacaactacagtgctattttcacctccattttccagatgaagaaacagaggcagagaataaagtgacttgcctaaggtcacaatatttatcatggcagagccaacactcaaaaccagttctagccaacactaaagtcactgccctacactggccctccctcaagagtaatgcatacatggcccaaaaaatccggggagaggaaagggacctccctggctagaaccgcagttcagaatataaacactgagcatatgatggatgcaacttatccgtttcaaaaggggtgggagcctagaaacgaagccatttttcctcctcgaataatcttggctgcctgtccctttgtcttcaatgttagttcctttcactattctgctcccaaacaggccaggtcccacgtcagttccaggaggaaagggctctctcagcctgcgggtcatctttgggcagcagcaggaaggaggcggcgaccctctgaatacctcctttggactcgccatctggacgtaaagggttcgcctgctccatctcagattcccaagggccttcccatgaagttgtctaggcaaccggtgatagggactccaatgtccttgctaataaaagaaaaatggcaacagtcacatcacatctagtcccattcaaacccagacggcagggcacacaccactcaggcacaacccctgggccgcggatgacacaaatgtcacggctaggatcccctttcctgagccgcccgccctctcccatcgtccgagccagcagagtccatgcccacccccgcgcccatcccgcggccccggcgcgctcccgaggccacggctactctggtccagcgggcttcccggccacggaaggagttttaagaaggccgttcagcccgccaccctggccacggtccggtccgacaatgggtctttcccctaccttctcccttctagctcacccaggccagaagcgagaattcccgccatccacgtcttcaaaaccaaaccaaccggtcccggcgtgctttgcgatcctgccgtacaaaagcatggcggcgctcagggccccgccctgatcccaagatgcaccggggagtaggtccggcctttcgggtggtcaggaagatggcggcctctggggcggagccgcaggtcctggtacaatacttggtgttacgaaaggatctatcacaagctccgttctcctggccggcgggcgcactggtagcgcaggcttgtcacgcggccaccgcggccttgcacactcaccgcgaccacccgcacacagccgcttacctccaagagctggggcgcatgcgcaaagtggtcctcgaggtgaggcactcgggcggagggggaggtgctgagacatcgagggcggaagtgggtgtggtcttcggtccgaaggcctggctgcggggagtgggtgcggcgggagttggggtgatcrttaacatttagactggagctgtttccctggaggtgcgcccttgggaagggcctgactgtgtgaagagtggacagcagtcctccgccccctgctgggctcgcggtaaagtggtggctcctgtgtccccgctgttccgcctgtgcactggccgactttttaaagccatgccccaaagtgctgtcctcctgcaaaaccgagcccgaagggacagtgcaaagtgaagtcaaactgagtatttacctgggtaggacgccaaattatttgaaaataaatactaaaaacgttagtataaattgaacctagcttcagctagaccaggcaccaggtgtgtaaatcggtacaccttttaaaatagcagtcaggttctgtttgcagatgaccaaacaaatctcacccttaccctttgactctctatcctgctgctagagatgtagcctaagaaaataatcagatgcacccaaagagctttgcacaaggatattcatgggagcccttatggttttgaagcatatttagtggtcgggaagagtgctcatgatgcgaagctaactgaactatatatacagaatgatccagactttgaaaggaaaaactaaagaaatacatctacatattaagtagtgcatggtgagattttggttatttcctaatgcttaatctgtatttttaaaattttctaccttaagcacatattttataataaggaaaaacggctttaataataaacggctttttataataaggaaaaacggctttaagccagaactcaggtggaggggtggagtaatcccttcatgggtaactggcaaagatagattatctttcaagagaaaaattgctgctggatagtgaaacatcaagcggtaacctgtaggaaaaatgccttgagaatctgtgtaggcagaacagaagctgctggcttttcacttagattttcttcctagtaagaggtctcaagaaatcaggttagactcctcttgtcgcaggtgaaactctctgaagcctacagggattaagtgactcccctgagtttaaaagagggtctcatgattcttagttgttagtcatgactcaagaaagggacttaggagtcgctactgattacattgaggtgctgctgtagtcagaagggccaataaaatataagaaaataccaggattaactacatttattgagtgcttagtgtgtgccaggcacaggtccaagcctgatttcattgatccccattaggaagcattattcctgttttataaagggacgaagaggccagcgaagtcacctaacttatccacgatcacacagtcagcaagagtttggagtccagtagtctgattccagagcctcactgtatctcactatgctctgctgctgcccgaggctgaagaagctgatgagtcctccagcagagctctgccagaaggactcagcaggttaagagtcgcaatactggcattctctaatttattaaaacaagcctctgagtagcttagtggcttctgccttcataggtaagagataaactttatgcaaaataacacaaaaataataattttctgagtgatcgttttaatacttcctggaatgggattcagcatgggtgaattggcagtaaggatgacccagaaacaatttcagaaggatgttagagaatattgtactctccctttaataaacaagtgggagccatcccagcagaaggaaaacccctctaggtttcagtgaggtagagtgggaggggtggaggaaagtggaagtggatgtgcttttagaaatccttccactaggggccgggcatggtggctcactcctgtaatcctagcactttgggaggcttaggtgggtggattgcttgaggtcaggagctccagaccagcctgggcaacatggtgaaaccccatctctactaaaaatacaaaaattagccaggtgtagtggtgtgcgcctgtaatcccagctactcgggaggctgaggcaggagaattgcttgaactcgggagccagagactgcagtgagctgataatcgtgccactgtactctagcccaggygacagagcaagactctgtctcaaaagaaaaaaaaaaaaaaacttccactaggcagctcttaaagtcagaggcacttaaaattatgggcgccagccataggagagctggaaaatgtatagagcagaattacacattacacatgtgtgtgttgggcatacaacatctcacaagggaagatacaaatctccattttctaaactggaatatgaagcctctctcccctccccagtgcaccacggaatgacatcattgctctgcagctccctccttggtaaagctgttactccactttcaggcaagaggactccggaaaccttttttggccttttgacacttcctaagtgggctattcagtttgtgttctgtgttcttctcctttaggccccagatgagaccaccctaaaggagctggccgagaccctgcaacagaagaacattgaccacatgctgtggcttgagcaaccagagaatatcgccacttgtattgctctccggccctaccccaaggaagaagtgggccagtatttgaagaagttccgattgttcaagtaactgctgctttgatgtgtttgaatacgcaggccacccattccaaagcatcatgtgttccttgcagtgtcagcttgctcccgtctttcagttgtgacaatttcttgagggttaagcacatgttcatattaaagttgtcattaataactacttcctcttattaataagttcaagtggggaaggtgggagagcagtattgtctggggatcattgctcaaatrgaagatttggttagactctcctgtggggctcaaggaaactcccttccagtmactcgggtttgaaactttgcttttgaattccttcttattcacatccagttatcatatttcattgaatctaagataacatcaactttaagatgcggtagtattttatgtattgttaaaaaatatgccggcaaattaaacacttgtatttcaataacaaagatgttaaaatttggccagtgtggtggctcacatctgttaattccagggttttgggaagccaaggcaggaggatcgcttgagcccatgagttcaaggttacagtcagttctaatcatgccaccgcactccagcctgggcaacagagtgagacactgtctctataaagattaataacaagttaaaatttgtgtgtgtctatatatatgtacatacatacagatttattagattcaatgaaatctgtcaagtactacagctgttttcttgtcatttcagtgccgttgccctgtgtcagcctctcattttgctcactggcgtgtcccacggtctgttcaccgccagtgtgacactccaatccagcagctgctttgccaccacataggacgactgaacacctacctgtgtagtctaggctcctctctgcctatggagtaatcccagcactccttagcttagacttcaggccctcctcatgtgtatttcctacctatcttttttgttttttcgagatggagtctctctctgttgcccaggctggagtgcagtggcgccatctctgctcactgcaacctgcgcctcctgggttcaagccattctcctgcctcagcctcccgagtagctgggattacaggtgcatgccaccatagctggctaatttttgtgtttttttagtagagacggggtttcaccatgttggccaagctggtctccaattcctgacctcaggtgatccgccagcctcggactcccaaagtgctgggattacaggtgtgagctaccgtgcccggcctcctacttatctttttagttgaatcttctattcccttattcaaacttgatgtttccacagagtccctccagttgctattctccagtctctggcatgggagttgaatgttactactcctcccctccctttcctgcccctggactttacttaaactatttccagctcaagtgctatcactgccaaaaattcttaccaagccaaaaatgatagttccttctctgaacatctgtaacactctgtacaacgtttacaatatttctataaacatttggacacatctacagaaattgcttagacatctgtgaagcaaagtttataaggggtaatttgttcaacagatatctattgtttgtctgctgtggcaggctgtgcataaaacagttttgccctcaggtagctaagaacctatacggatattacccgtcccccttagataatgttctgctaagatcccagataagatttcccttcatgggcccggtgcagtggctcatgcctataatcccagcactttgggaggctgaggtgggaggatcacctgaggtcaggagtttgagaccagcctgaccaacatggtgaaatcctgtctctacaaaaaaaaaaaaaaaaaaaaaaaaaaaaaagatttccctttatgaaaggtggtcacctgaatcaaggagagtggatgggtctctctcacagggagagttggtagagtgctgagggcagagccaaccccaggaagccaagtgaatgaggagttgaaggggtagagaacaatcaagtgcagcatagaatgtcagtaaataaaacgtggaaacatttagcaattgggaatgtactggtgaacttagtgaagtttaaatagcatagtgagggtagaaatcagattgtaacatgttgagacaagaatgggaggccaggcgtggtggctcacacctgtaatcccagcactttgggaggccaaggcaggcgatcacgaggtcaggagttcgagaccatcctggccaacatggtgaaaccccgtctctactaaaaatacaaaaattagcagggtgtggtggcaggcgcctgtaatcccagctactcgggaggctgaggcagaagaattgcttgaacccgggaggcagggattgcagtgagtagagatcgtgccactgcacgccagcctgagcgacaagagcaaaactccgtctcaaaaaaaaaaaaagaatgggaggggagggaggtaagaggtgagaagtgtcctttccagaagcttgaaagggaggagagagaggataatgactgaaaaggggctggaaagatcaatgctgggtcccctagtggggattttcttagatcttgagcaggatgatgggtgaggaggagaaagtaaggagaggagagattaagagattaaagttcccaaatagaataactgatgaagtccagagaaaacaggaagagatggggtcaaaggctacgggaagaactggccttgaactgagagaggggaaacttcttttctgagactggtggaaaggcagatggtgaagatatagatgtacgtaggtttaatagattgtaggagaaagaaagttgaagttgaccatacctgctgactttttttctattaagtaggaggcatatgcactatactcagcaaactaaagcagcaacagaaaaccaaataccacatgttctcacttgaaagtgggagctaaatgatgagaacacatgaacacacagaggggaacaacacacacggggactgattggagggtgggaggagggagtggatcaggaaaatagccagtgggttctaggtttaatacctgagtgatcaaatctgtaccacaaacccccatgacgcaagtttacctataaaacaaacctgcacatcctgcacaggtacccctgaacttaaaagtttaaaaaagtaggaggcatacgatctttcataacactgaataaacttattgagcactatattagctagcataacagtgagtaggagcctaggctttggtgtcaaactgcttgagtccaaatctgggtctcatactttcaagctctgtggacttgggcagtgactctatttccctgagacccagttcccttatccgtaaagcggggatttaaatgtgtttggatgtacaaaccccttagagcagtgcctgggacttcgtgctagaacctaaacttgggaagatgcagatggcacagccgtcagagctgccctccaagagttctccatcaagtaggccattgtctacccctttctgttagggagtgatgccatccaggaatcatcaagtaccatttccattcaagccaattaggaaaatgtttctaaatgacactgcatcttaaaaaaaattaagttctgaattcttcagtaagacatagtataaagctagacaggccaggtgcggtgggtggctcacgcctataatcccagcacttcaggaggccgagatgggcggatcaaaaggtcaggagttcgagaccagcctggccaacataatgataccccgtctctactaaaaatacaaaaaaattgccgggcgcagtggctcacacctgtaatcccagcactttgggaggccgaggcgggcggatcatctgagattgggagttcgagaccaccctgaccaacatggagaaaccccgtctctactaaaaatacaaaattagctgggcgtggtggcctgtaatcccagctgctcaggagactgaggcaggagaattgcttgaacccaggaggtggagattgcggtgagccagagatcgcgccattgcactccagcctgggcaacaagagtgaaactctgtctcaaaaaaaaaaaaaagttagccaggcatggtggcacgtgcctgtagtcccagttgctcgggaggctgaggcagtagaatctcttgaacctgggaggtggaggttgcagtgagtcgagatcgtaccactgcactccagcttgggcaacagagtgagactttgtctgggggtaaaagaagctagacagaaatgagacacagctgggagttagcagatttaggcaaatccgtaaagcagagatctgagcacaaatagcataaatgtctgcccaagggtggggaagaacaggaactcatgcgctgacgctgagtgagagcaagacagcagcaggaaagcaatagattttcttattggtatcagcttaagaccatgatcatttgaactagatcagtggctctcaaagcggtggtctggtccctagatcagtaccacttgggtacttgttagaaatgcaaattatcaggccccaccccagacccactgaagtggaggctctagtgctacctagaaacagcctgggccctggagacagccaacctaaaagaggaacaataaatgtgtgtggtttagaatcaacacattatgagagggtattaagtgctcacaggaaggagtcaaatagcagaaatctggcaccaagtgcactgtatttggccatgcatactaaggttacagaaaattatgatttctccaacagggcaaagatgtgctgcaaaccctagaatagacgctatatccttgaaaacaatctcctatgctttcatagatttcttttttctttctttctttttttttttttttttttttctgagacaagagttttgctcttgttgcccaggctggaatgcagtggagcaatcctggctcactgcaacccgtgccttctgggttcaagtaattctcctgcctcagcctccagagtagctgggattacaggtgccggccaccatgcccagctaattttttgtatttgtagtagagagggggttttatctgtcacacacatccctgtgaagagaccaccaaacaggctttgtgtgagcaataaagctttttaatcacctgggtgcaggcagacggagtccgcaaaaggagtctgcaaagggagataggggtggggcagttttataggattgggtaggtagtggcaaattacagttaaagggggtttttctcttgcgggcaggggtcacaaggtggccagtgaggagcttctgagactcattgtccaggagaaggaatgtcacaaggtcaactgatcagttagggtggggcagaaacaaatcacaacggtggaatgtcatcagttaaggcaggaactggctattttcacttcttttgtggtaattcagttgcttcagtccatctggaggtatacgtgcaggcttgggctcagtggcctgacatcatcatgttgtccaggtggtcttggacttctgacctcaggtgatccacccgcctcagtctcccaaagtgctgggactacaggcatgagccaccatgcctggctggtaggtttcttatatgtgaaaaacattgtataattaacaaagtgctcccatatgaatcaatcctgacaattgttgtgatgcaggccatctagtctcagagtttacaagattcagaaaggctttgacttgccaagatcaaagacaatggcaggactgggattgaaaaaaaggtcttttgtcagttcagtttttcttttttctttttctttagatagagtcttattctgtcacccaggctggagtgcagtggcacaatctccgctcactgcaacctccgcctcttgggtccaattgattctcctgcctcagcctcccgagcagctgggattacaggcatgcaccatcatgcccggctaatttttgtatttttactagagacggggttttcccatgttggccagactggtctcatactcctgacctcaagtgatccgcccaccttggcctcccaaaatgctgggattacaggcatgagccactgcactcagcagtttttctaatctcttgtagttggttaacaatttggttttccagccatatagatactggagggtagtttgaaaaggggtcacgagtagttcaagtgctgaaaagctgtatcttccatttttaattggttaattgacattctggattataaatcagcctcctgcgactgtaagttttctgactcaacaccctagagcccaattatcactggatgagctgacaaagttgagtttctgaacttataaagctgagggtcaaagcctaggtcaccgcttctcatggcgctggcagagcgcagagggctcccctccaggggcaggttaagaattgcctgttttattgtctaatcaacacagaactttcccacaggttctgagatgctgtcctaagggtgtgaattccttcttgcttcctgattgagaat

SEQ ID NO: 97731 - DNA, 103283 bp, Homo sapiens
aattcttgactcgaaatacaaggggcagaagggagaggggcaagggtagagtctagaccacagctctattgcagtttctgcaggaaacacagatagggcaggagaaacagtttaggacaggctagtttgaataatttcagtgggctctgagctacaagggtgggccctttgctgtctctaagaattaactgacctgcagagggacactgcatccccagtaagaaagtgactttaagacgcagaaacattacaacatacagaaaatgtaaaaatacaaataatatagcaagtatgctttcttttctcatgactaaatacctagcaatggaatagctgtgttctatggtaggtgtatgtttacctttttttttttttttttttttttgagatggagtctcgctctgtcgccaggctggagtgcagtggcacgaatcttggctcactgcaacctctgcctcctgggttgaaatgattctcctgcctcagcctcccgaatagctgggactacaggcatgtgccaccacacccagctaatttttgtatttttagtagagatggggtttcaccgtgttggccaggatggtctcgatctcttgacctcatgatccacttgcctcggcctcccaaagtgctgggattacaggcataagccactgtgcctggttggtgtatgtttaccttttaaagaatctgccaaataatattccaaagtggctggacccatgtcccctcccaccaccaggatctcttcacactcaccagcacctggtgtcttagtttgtttgtattgctataaaggaatatctgaggctaggtaatctacaaagaaaacatgttccttgactcatggtcctggaggctgaataagacacatggcgctagcacctgcatctggtgagagactcgggctacttccactcatggcagaaggtgccgatcacatggtgagagagaagcaagagaaaaagaagggaggtgccaggctcttttaaacaatcagctcttactgaaagtaatagagggagaactcacccattaccgagaggaaggcaccaagacattaatgcaggattcacccccatgacccaaacacctcccactaagcctgacctccaacactggggattaaatttcatcatgagatttggaagggacaaatatctaaactgtataatttgatattgtcagtctttttcctctcagccattctaatgggtgtgtaaattgtggttttaatttgatttctctaatcactactggtgttgaatgtctttacatgtgcctgcttcccatctgtataccttatttggtaaatgtctgttcaaatctttgcacatttttaaaaaaaaattggtttattttcatttctcttcattgaattttaaaggttctttatacattttggatatttcttctttaccacatgcatgcactgcaaatattttttcccagtctgtggattttttttccattcaactttttactttggaataaatttagatttacagcaagtttgcaacaaatagcacagaaaatccccaaatatcctgtacgggtttcccctatcgttaaatgttatgttactgtagcatatttatcacaactcattaaccaacatttgatacattatgatgaactaaagtctatgttttcttcagatgtcattaatgtttacctaatgtctttttccatttctgagatcccatccaggataccacatgacatttaatcatttaatcatatgtctccttcacctcctctagcctgtgacagtttcttagactttccttgtttttgatgactttgacagttttgagaagttctggtcactttttctgtagaacgttcctcggtttgagtttgtctaatgttttcatcatagactggggttatggtttttggaaagaagactacagatgtaatgtcttttcttgctttcttgggtatgggatatccaattgctgaaaagactattcttctctccactgaattgcctttgcacctttgtaaaaacttggttattcatacaactgtgtatttctggactttctattctgtttcattgacatatttatgaaatatttgattactatcctttgtaggaggtcttgaaatgagtcagtgttcactctcttttttttcttgttttccattgttgtttttgctattgtaggtccgttacatttccataagaattttagaatcagtttgccaatttgcacaaaaaaaaagcctgctgggatttggttgggattgtattgaatttatagatgaactgggagaactgacatcttaaaaattttgagtttttcaattcatgaacatgactgtgtatttaggtcactcattaaagttttgtagtttttagtgtacagtctttcacatcttttgtcagatttagccctaagtatttcatatttttatgctattttgagtggtattttcattccaattttcaattgttcattgctgctacagctgacccttgaataaagcgaggattaggggcaccaacttcgtgcagtcaaaaatgagcatagaacttttgactaccctaaaacataactacagtagcctactgtttgctggaagccttgccaataacataaagtcaattaataaatattttttgtaatatatgtattatatgctgtatttttcttacaataaagtctgctagagaaaagaaaatgttaaaattcataaggaagagaaaagatctttattgccaggcgcggtggctcaggcctgtaatcccagcactttgggaggccaaggcgggcagatcacctgaggtcaggagttcgagactagccttaacatggtgaaaccccgtctctactaaaaatacaaaaaattagccgggcgtggtgttgcatgcctgtaatcccagctactcgggaggctgagccaggagaactgcttgaacctgggaggcagaggttgcactgagccgagatcacgccattgcactccagcctgggcaacaagagtgaaactccatctcaaaaaaaaaaaaaaagaaagaaaaaaagaaaaagaaaagatctttactattcattaagtgaaagtgtatcaccataaaggtctccatgctcactgtctcccattgagtgggctgttgaggaggggtgggggtagggggaagttggtcttgctgtttcaggagtggcagagggggaattggtggaggaggtggaaggggaagcaggagagacaggcacactcagtttgactttatggaaatacatcataattactgtctgatagttttgctttttcaattctttaaaaatgcctgagctgtgcgcagtggctcacgcctgtaatctccgcactttgggaagctgaggtgggtggatcatgaggtcaggtgtttgagaccagcctggtcaacacagtgaaaccccatctctactaaaactacaaaaaattagctgggcgtggtggcgggcacctgtaatcccagctacttaggaggctgaggcaggagaatcacttgaacctgggaggcagaggttgcagtaagccaagatcgcaccactgcactccagcccaggtgacagtgcaagactctgtctcaaaaaaataaaataaaaataaataaataaataaaaatgcttgcatacagtactaatccttcttctactatttgctttagtttcaatgcccgtatcatagaagggtccaagttgtaaaagaagtcaaaagcagtcttaaataatcagaacccttctgcaagattgtctaatgtcaattcattttctgacagtgcttcttctatatcttcttcctcattgtctggtactgattcaaaagcactcatctccatcaagtcatcttctgttaattcctcagatgtggtatctattaactcttgaatttccccaagatctagatcttcaaacactttatgcctctttttttttttttttttttggtgccatatccacaatctcttccatgacttccttgataggctgttgtaaatcctgtgaactcacacacaacatctggaatctggacgcagttttcttcagcactaatgtattgtttggggcttgatggctttcacagctttttctgtaacaacatgggcttcttcaatggtgtaatccttctggactttcacgatattctccctgttgagattctcttccatagtgttgacacccctttccatagaaaaccgtacgtaatgagccttaaagttccttatgaccccttgatctaagggctgaattagacatgttgtgtttaggggcaaggaggccactttggtgctctcattgcagaatctatggggttctgggtggccagggacattgtccaatatcaaaagcaatttaaaaggaagtcccttactggcaaggtacttcctgacttcagggacagagcattggttttcatggaaccaaaccagaaaaagtgttttcgttgtacagggctttttatcataaaacaaaaagacttgcagctggtgtttatcttttcccttaaaggctcagggattagcagctttatagatggcacatttgaaagcactttggtaaataggtgtgtagtgagaaatacagtatgaaaagaatgttgggaccatcagtgaactaagaatcaaaataaagaatttccacagtggatgttgagaaatcgtggaagcttctttagcagagaggtttgagctcaaagtgcaccttagatggatagtgcatcttatagtgacgtgcaggaaggggtgtgtaaaacgggagtccactgaaaaggctatcatcctaatgcaggtgagatttcatggggatctgataggaggagaggaagctatggaatgaaaggattgtccagacaatactttgacatgccattagtttgattcacagacgaaagacaaagatataagattatataaatataatcttatatctttataaatgtgaccactcattcattcatatttataagattatataactataatcttatataaggttatataactataatcttatataaggttatataactataatcttatataaggttatataactataatcttatataaggttatataactataatcttatataaggttatataactataatcttatataaggttatataactataatcttatataaggttatataactataatcttatataaggttatataactataatcttatataaggttatataactataatcttatataaggttatataactataatcttatataaggttatataactataatcttatataaggttatataactataatcttatataaggttatataactataatcttatataaggttatataactataatcttatataaggttatatagctataatcttatataaggttatatagctataatcttatataaggttatatagctataatcttatataaggttatatagctataatcttatataaggttatatagctataatcttatataaggttatatagctataatatagctatactcttatataagatcatatagctatactcttatataagatcatatagctatactcttatataagatcatatagctatactcttatataagatcatatagctatactcttatataagatcatatagctataatcttatataagatcatatagctataatcttatataagatcatatagctataatcttatataagatcatatagctataatcttatataagatcatatagctataatcttatataagatcatatagctataatcttatataagatcatatagctataatcttataaatgtgaacgaatgagtggtccgctggccgagtggacccgcgaactcaccagcggacttgtaagcgagctcaccttgcccgctcccgctcccgctccagttcccaaactcttggagcagaagagttacatttcccataaggccccgtgcgaggggccggcgctccagcggggcatcctgggaagcatagtccacgatccataaatcactttctggagacccgccctcgccaacatggcggcgcccagttggggcgggttcgttcgcttcgcgttttggccagggcgggggtctgggctttaggcagtaagtgcggctggcgcccggggatcctgggagggacgtgggaagcgtagggacagtgttggtggcccagtctgaggagggcgaggcgagaggctgcccaggcctgcctgaggacgcggcgctctcctggagtcggggcagtggtttcgggccacggggacctctgcctttttgcgcccctgggcctgtggtggcttggagggcctcggccggccgtaggagttgggaattcaggaatgcagacaacgagctcgaggctagactctcgagttgtgtttttttagttttcttctgaggaaaagaaaaataattgcatttcagcgcttcctgtcatttggtrcctatgctaggcgctttacgtttctcatctccaagtgaccctccgccacactcgatgtgaaaccttggggaagtcacctaggcccccagggctaacgatgggattagtggatacatactggaaggcctttaggcttgataattttagtggcagtcttccccgccctccgctccccttcccccctccctccccagtgaactgacttccggcccaacagcttcgggactgtactaaagtgctctaaaaaaagttaacttgatctgtttaatttaaatgtcataatctggtatatagtactgaagggtgtgacaagcagagattttagagagttgattctcagaatttagggttggctttgccgtcccagcagtggattagttgtggcracaggttttcttttttaaaaaaattagtgatgtgaacgtgcctttttaaaaacagctgttacttattgtgggccaaaccctgtacactaactgcccttctttcgttatgtcattggatagtttaaatgacccgaagagacagatggtatcctattttacacataagaaaacagattaacatatccagggtcacacaggtagttagggtcctgatagggatgaaaaaaatctagatcttgctgcctccaaaacccaactactgtacatagaaacagtagtcctgtgttctaagaaacaacagaatcgactcccaagtgtaaggtagggggatttggggaaaatttattttaaaaataaaagcatttatatgtcactttttttaagggtagtatttagtttcacaatgtttggggacctgtttgaagaggagtattccactgtgtctaataatcagtatggaaaagggaagaaattaaagactaaagctttggagccacctgctcctagagaattcaccaatttaagcggaatcagaaatcagggtggaacctgttacctcaattcccttcttcagactcttcatttcacacctgaattcagaggtatgctatgttacgtacatttaactagcaatatgtaccatcttctttacatgtaattaattatgcaaaatcacaaatagaccaattatcttaaagatatattctacagtatgtgtttattgttgcacatataagatataaattggtaattccctctgcagagaaatgtgaagcttaatcttaaatatatcctgggtgatgacaataatgtttagtaaaaaaataaagcaatatatttcttttttaattcctgtaatttaaagtacaacgtaaagacaattgtcataagtatcagtcttcattattgttacactgtttgagttttaagatttctctagaataacaaacacttaagccagagttatccaaccaattatatctaccttttggagtggggaagggtgtcatattatttatatgggtgcacagttgttcatacgcatttctgaaatctggaaagctcacaccctcatctgatctcacctgagcttgtttggcttcagaaccagacctggtgtgaggctatttacagtttttagttatctcatgtgggtgaatgttcatacattcattacaggaatattaatctgcttgattaatggaagctggcccagaccctgctgggaatgtaacattttatatatatataaaaaacacttttttcatattatctttataaactctggaaattctgaattccaaagacccagagattttaggtaagggattgtgtgcaagaaacagacccaccacccaaattagctaaatttaaaaggggggttattgtaagaatataggggatctcagaaatcaactgcaggaagccagcctgaccttactggacccttgatttcttgcccctgtttctctctatatatttctcccataccccatctctgcaaaccagcttcctccacaagggtcctaggagctgtgttcccgtgagctcagtgtgaacattactttgccttcacctggccctgattggggtccccagcactacatggctttgtagctcagctctccacagtgtctccatattaggaggacagacagcctgactcatcctatctggtttgccatgttcctcttccctactgccaccacatttatcaaatctttgtggttcttctgttgcttctaagcttagaaagacttgctgcctccagagatttagtaaatatttaccgctgttaccttcctaggagcaatttaatgggttggattgcatgtgggatttaagtggtacctcttagccttgactcgatcccctccataaaaatatctccctgatgcaatcagtaattccaccagtaaaaattgccagcactaataagtacatttctaatagggataacacttttccaggttttaatatagttgaagttaaaggacaactcgaagtagaaacgtagcctcaaagggactgaggaagatggtgaagtgtagggcgggtcatggagcgtaccattaggcaagagtagtactgagagtcccaggccaacttcctctccagcagaggggattgctggccaagcatatgatttgacatcttagtgcacaatgtgcactgcttgtatagcttagcctgaatcctgatggtgactgacagggaggtataatttggaaagaataaggactgtcagagaactggcgggggaaattttggaatagtattttaaataatagggctacattgggttccattgtactccattacaatgtagctgagagtactgggagattattataaaagtttttgtatggttttatgctttaacttgtagatttgtagttcatttttgccgagtcccagcacttagaaagaatataacattcattaacagtaagcactagggtagcaatagtttttcaatagggagacacatttatcccattccttgtatccctagagtatatcagagtttcccagtaagagttcctacctaggctcggatacagacttctcaaaagattcaggtatgccccattgggtggcacatcacctagatgttgggtgataaagaaattctggagactcgcatggggttgccaacttctttttccagataagaccactgccatctgttattaccttcaacacggaaaagacattttcacaccaaaaaaaagggcatctcagagtaaaagaggatccttcccacgaaaggatgtttgttagccttacatgtggcaggaaaactgcaacactactgtatttcctgagattcttgggcttttgggacctgatgccatagacagtgggaagccatgaaagatttctgatgttactgtttttagttttatgcataaagattattttcctttcctagaattaggaaatgctgaagccttagcatgacactattttcttagagtcactggttaaaaatgttacaagaaagtaaagtgtatagagtaaggtataaatattgccacaatcatatttctgaatctacttgattttacttaaaggtggtcttggctttctaaaacaattttttaaaatgaaatgatgtcatttgcatctctgattctacctttttctttagaagctctattttctcttggcccagaagagcttggtttgtttgaagataaggataaacccgatgcaaaggtatttttattattattattattatactttaagttttagggtacatgtgcacaatgtgcaggttagttacatatgtatacatgtgccatgctggtgcgctgcacccactaactcatcatctagcattaggtatacctcccaatgctatccctcccccctccccccaacccacaacagtccccagagtgtgatgttccccttcctgtgtccatgtgttctcattgttcaattcccacctacgagtgagaatatgtggtgtttggttttttgttcttgcgatagtttactgagaatgatgatttccaatttcatccatgtccctacaaaggacatgaactcatcattttttatggctgcatagtattccatggtgtatatgtgccacagtttcttaatccagtctatcattgttggacatttgggttggttccaagtctttgctattgtgaataatgccacaataaacatacgtgtgcatgtgtctttatagcagcatgatttatagtcctttgggtatatacccagtaatgggatggctgggtcaaatggtatttctagttctagatccctgaggaatcgccacactgacttccacaatggttgaactacagtcccaccaacagtgtaaaagtgttcctatttctccacatcctctccagcacctgttgtttcctgactttttaatgattgccattctaactggtgtgaggtggtatctcattgtggttttgatttgcatttctctgatggccagtgatgatgagcattttttcatgtgttttttggctgcataaatgtcttcttttgagaagtgtctgttcatgtcctttgcccactttttgatggggttgtttgtttttttcttgtaaatttgtttgagttcattgtagattctggatattagcccttttgtcagatgagtaggttgcgaaaattttctcccattttgtaggttgcctgttcactctgatggtagtttcttttgctgtgcagaagctctttagtttaattagatcccatttgtcaattttgtctttggttgccattgcttttggtgttttagacatgaagtccttacccatgcgtatgtcctgaatggtaatgcctaggttttcttctagggtttttatggttttaggtctaacgtttaagtctttaatccatcttgaattgatttttgtataaggtgtaaggaagggatccagtttcagctttctacatatggctagccagttttcccagcaccatttattaaatagggaatcctttccccattgcttgtttttctcaggtttgtcaaagatcagatagttgtagatatgtggcattatttgtgagggctctgttctgttgcattgatctatatctctgttttggtaccagtaccatgctgttttggttactgtagccttgtagtatagtttgaagtcaggtagtgtgatgcctccagctttgttcttttggcttaggattgacttggcgatgcgggctcttttttggttccatatgaactttattttctcttggcccagaagagcttggtttgtttgaagataaggataaacccgatgcaaaggtattacatctatgatttactggggtgttttagcgtattcagaaaattttttttaaagaaggaattaagtggcttgttcacaaagcaataattttattaattatcaaatatgctctttatttccagaaagtgacttggcctgtaccctatgggtaatggaatttgccttccgagaaagaatcagttttccaagtacaatactgctactgctttataaacatgtaacactctttactatgcttattctttcttctggtgaaggaaatatttgcagaacatccacattagcttcccccagaagtctatttaaagcactttttttgcaacaataccgacctctccaccccacacaaaaaaaaatagaggctagtattctttcaatttggtactctggaaataaattgagtaatgagttaattattttgtttgttattgtggtgatatttaaagtgcatatctaatcatgttcctccctgcttaaacataactcaaaagtttcttaccatgttcaggctcaaatttgtacttcttaggagtctttcatgatctagcccagtacttctcaggctacctgtgtggcaaaggacctgtttttgtgtatttctttttattcccaatctgttgcagattagcacttttctagtatataataaaaatgccatgggaatgtcaaattgccattacaatttctaaatgcttattctcctttaaatacttaaagtctagcctacagaccagactctgagcaacattgctcagtctgccccagccctcaccacatcaagtaaggcaggaactcacttggagccaggagaaagtgaggcagggtgtgctgagaactccagagcgagatacagtattgtgcctggaaaatttctacagaggggaaattgtgtgtatcagaggtattttagagaaataatggactattagaagagattcaaactactgtcaatctgtaatcagttgagtggtttattaaggcctatttgagttttaatgtttgtctgaaccatatcaaggtagaaaactccaaataactattattttttagattgcattataattttcacagaagaactgaatcataattagtttttcccttataataggatatttataaactttctcctgaatgaactgggagatataaaaaagctagtatgcagttgttttcaaaagccttagtcaacacttaaagaattcatttagaaatgtgtttgtttctcattcaggttcgaatcatccctttacagttacagcgcttgtttgctcagcttctgctcttagaccaggaagctgcatccacagcagacctcactgacagctttgggtggaccagtaatgaggtacgakgatcagctctttaaggaagagttaccagcaatagaggaaagaataaggctggtttaatgttatctaacttcctttaattttgtcttagggtctcaacatattgtttgaatgtttccttctcacattaaaaaattacaagccagaaatatatatttttagacacttgctgtatacaggattttatgaatgkctgtgatttggggctggggagaagattggaaaaacggggagaagtacaagagctgatttttacaatttctaccctaagagtctttatgtagtctagttgagatacaacacckattacatggagattacctaccatttatataggaaactgttgatcagttttttagtctttgaccaacaataatggatcaattacattgtaagtaaatttttaaaaattctttgtttgttatgtgctttgtgtttgaatccacatgttctgatttgaaggtttgcttcagtcaaaaaagtgaaatggttcttggcaggtctttttattcctgtcctgactttctcctgaccttctccattttctttatgaatcttgttgtatgtgggctttctctcactttcctgtttgagttctaaaaggcattctactgtatacgaacactacacacttgtcagcaatgagtaaaggtgcttgttgcacatattgatgagctgttatagctatacaaatccaaacaaatcccagtctaccatttttatatggaatagatggatgtaatcctgcaaagacaggtataggcaactgtcacagaagttaaagagcaaacgataggaatactgttatattgcctttaatggtaaactctgaagggtagtcttctaaccaggaacacttcttaactaggtgatactaactatgtgattaaggaggtaaggcatggactttcaagcaaaatggggtataatacattccctaaacaagtatgttaaatttctggtgtagggctggtatttggcgttaatccgattaacaacaaaaacaaacaaacaaaaaaaacactgtattgagatgtaatttacatgccacagaattcactcttttaagtggtacagttcagtggtgctttctagcatattcacagagttgttcaaccatcactacaatcaattttagaaaatttttaccaccccaaaaagaaactccatacccgttagcagtaactttccatccccctcaactcagccgctggcaaccactgacctcctttctgtctctatgaatttgcctattctggacatttcatagaaatggagtgatccaataggtggtctcgtaacagtcttctttcacttaaagtactgttctcagggttcattcatgttgtagtatgtgtcgatacttcattccattttattgccaaatgagattctattagatggatatgccacatgttttttgttttttttttttaatctagtcattggttgatagatttttctttgtttttgataatgagcttcactaagttgctggtttcttcttaatgctgtgaaaattttttttgttttttgtctaaataagatcttgcagaaaaccctctaggactggacctgcagtggtaggagaaggtctctgtggtaccttygcgaagtgtaggattgtttaggaacagagcttgaaaacttccacaagttttctatcccatcatagccagtgatattagataaattacatccttgagggtcttgtattttaaaaggcaagatagaagtcctccagctttcatccactttatctgctgctcttcacacaaaactttttttttttttttttttttttttgagatgaggtctcactgtcaccagcctggagtgcaatggcatgatcatagctcactgcakccctgggttcaaggcatcctgctgcctcggcctcccaggtagctgagattttaggcatgagctattgctcttggttgaaacttatttttgaaattgtcttcccttattgcctctgcttctgaactctccatttgttcctctccttcctttctacttttttggttgaagtcaacagtgacatccctgtgccaagtccagaagacacttctctgttctcagcagaaggagctctcagcagcactcaccaccctccttaaagcctcagctcctcctgcttcctggggcctcactctcctggccctccccccagctgctcttcctcctcttctccacttctcagtcttggtgtgccccttggtttggttataaatttttcttaagcacaagttcacacacaactgcgtgactcataatggattaaagcaagttccatcaggatttttttctcagtaacactgtgttagtcttgttttagttgtttttacttcaaagcagtacattctagttcttttctattgttgataattcggactattcacatgtgctctgatctcagtgaggtgttcctgtgcagacactgccagctcttagacactggtctgtgcctggtatatccctctctgctttctgtggcatggccatgtgtgtggtttcccacaagaataaatgcacattctgggtgtcaaaggaattgagttacatgtacacactgaaccmagcctgttcatattttcattttttagtataaataaaaataggtggtaatctcttaaccagctcagcttgttttgctgagtcattcttatatctgatcttcagattgcttgataaatcttgagtttttattgactaatgtttgtttttttaatgttttaaaaaatctgaagcccggaattacatctaaaagttacctgttttgtaggaaatgaggcaacatgatgtgcaggaactgaatcgaatcctcttcagcgctttggaaacttctttagttgggacctccggtcatgacctcatctatcgtctgtaccatggaaccattgttaaccagattgtttgtaaagaatgtaagaacgttagcgagaggcaggtaaatatgccagagtattttagtaataagttatgttgtaaattataatccatgtaattaaatgtatgatatataccacacaaggattaaagtgtttattactaaaagtaatttattgagtttttttttcttctaactacacctaaatcatgagcctataatccagatttctccatgtagattgaaagaagcaaatatcttgaaacttaatcttttattcagtaccctaatatttggaaaatagatttgggggatatttacaaatagaagactgtggcctcatgtgagaagccagtgtcatcatggttggaatattgtaaagaaagttaattagggaggtaataaaaatagataatactgaggaccaaggagtgtttaatttgacaaacatttgtaattaaatatgggatttagtttattaatattcttcagaaagttcatttatatatgtgtgcttatgtttatatattatatataaagctattgtaatcctatgttaattagtataaccttcagttctttgtaatgacacatattgcccatttaatctaattggaattagaaattggaaatttgctcatgtaaatgtaatcctgtttgccctacaaatcttatatagtcaattatcactgaattcatcactgatcctttaataaaaggctgcttttgttatttatgccaaggaagtttgtgtatttgtatcaggacaaaattaccattttctttttttttttttttgagatggagtcttgctttgtcgcccaggctggagtgcagtggcacgatctcagctcactgcaagttccacctcccgggttcacgccattctcctgccttagcctcccgagtagctgggactacaggtgcccgccaccatgcctggctaattttttgtatttttttagtagagacggggtttcaccatgttagccaggatggtctcgatctcctgacctcatgatctgcccaccttggcctcccaaagtgctgggattacaggcatgagccaccgcgcctggcccaaaattagcattttcaaaggtgttaattgctttcttgaaaatagatgtgtatataaaaatatgtgattttcaggatgctgaggcaggagaatcgcttgaacccgggaggtggaggttgcagtgacctgagattgcgccactgtgctccagcctggtggcagagcaaggctccgtctcaaaaaaaaaaaaaaaaaagagtgattttttaagtttggaaataattaagatgttgcatgtgtctttgaattactacatgcttgacttagctatgatgtagtaaatcagagtattttcaaaacaacatatgtaaggccattataaattaaagacattaacttttcacgtatatattataaaccatatactgtataaatgttacttttggtacttgaaatcttcaccatgagttaacaagtgccctattttcattccccaaaatctcttaaaataaagctgttgcacacacatacagaactataaatataaattaaatttgccaaattgtaagtgcttattactagaaatattgtgattcaaatgtagttatagcagatttcataaaccctctttttacagactattctcttggattttcataggaagaccttcttatcctagcttaacgtaattcttttttttgagatggagtctcactctgttgcccaggctggagtgcagtggygcaatctcggctcactgcgacctccgcctcccaggttcaagcaattctcctgcctcagcctccccagtagctgggactacaggcatrcaccaccacacccagctaattttttttgtatttttagtagagatagggtttcaccatattggccaggctggccatataatttttttttcttataacttctttagtatatcttaaggcaaccctagcaaaagaaaataaagaaatggagtttacattagaaaattcaaccctgcccttgctcttatagtctagtctaaaacagtactgtataccttgtatatatgcacttctgaattcagatacgtgtcttattgtggtttatatttcctcataaaacagattttattgtatctttggtaaattcataaacttttcttatatttttctgatagattttaagctaaattatagttcaatttcaaaagaaggataatttagtgttatgaacttcacaacatctaatcaggagatctacatctttatttgtaatgttttagaaaacatatatctgattattcccaatwtatatgtgagttgatgatgtgtttgtaaacctctgaaattgtttttcaatattatattcatgtctatttcaggaagacttcttagatctaacagtagcagtcaaaaatgtatccggtttggaagatgctytctggaacatgtatgtagaagaggaagtttttgattgtgacaacttgtaccactgtggaacttgtgacaggctggttaaagcagcaaaggtaaagacagataactgctttttcccagggtccccactttgtagttagtacaagtcaacttgtatgaaaaagtctcgaggatatacttgaagctgttgacactaaggattgaaaagatatttacatcattttctgtattttaattttttacaataatgaatttttaaggctttcaacccaacagttcacccaacttccttttctccggggaaaactttattgtacctcagtgtttcgtaagtatccctcctttttgcaattactgctgtgaaaaaagttgtatatatttttatttctgtcactgagaagcttgttgagctttgctttctttactactatgaaagtagatggctgtcttcattttcttaatatacagttattttataatcttgacatatgttcttccacactctggcaaatccaatatagccttacctcctcccccaggtgggagtatttaacttgctaattaaggaatttaacagaatacttctgattttctttctgtacagtcaagcaaaatataagacaaaagaaaggactgaagcaactgatatcttttgccatgtgagagctaagagggaaaagtaaaacaaaccaataaacagaattctgacatttctcaaatttattcatcacattcatatatcagtagccattcctgtagtataattcatagttattttccattccaggaaagaagagatactttgataagaggagaaatgagaggcaactactgtttagcttagtggaacacctccctggtgttattttcatgcatcttaagttttgcacattccagctcctttctgatatggcagggatttattatatcagcactttggcatttctgaaaatccctctgccacatattggtgttttatcccagtactgatgtgaggtctgtctctgtgctttactgtccaagccctttgggtccaggatatctatttgttctaagggagatggacatctgaataactctttttggaggacagatttttaaaaaatgttttgtgggtttttttcccattttatcttctagcagccattcatttatatttccttttcacaattctctgtgatttctcactatggaattgttctttaatgtatttttcacacacttaatttccaccaaaagcattaccaatgctagttaattgctaaatactagtaattcattaacattaatataaaaatgattattatagataaatgtatctatgtctatgtatgtatattaataccatttcctgtggcctggatgtgctgtctctaaccttctctgtcccttccttctcagcttcttgtacctatggccaatatggcatcaaccctgctgctgtcgttattatctgcagtggtgacgttcccactgctgtgggtgatgtgatgagcttttcataaacatcatcaccttgagctcagttcactcagtgggttactgaacattgtcttaaacagctaccacaagagacatatttatgcggtcacttcattatgatagcactattcctatagctgacaattattgaatttttccagcaaataaaatgagcattgatttagataatacacaatactgattttgtatcctggagattatagataaaactataataaaaccttaaaccctrtgcctgtagctttcacgggaagattgaattttatactgtttcacatgtatttccatccagtttttgccccttcatcaaacccaaagagagaggtttatcatttgcttatttattttgtatttcactttggtgtataaacttcagagtttggaacagtgttggaaagatacctacacattcagcttttggttagacttcatgttcacattacaaaataagaaccttttgctaaacaaatgcagtttttaaatataccttttatcacatttctttaattctttttcagtggaagttttttggtcttgatacttctaaatttatattctattctatgcattggatttgttgcattctaagtttatgtttggctgtactgctaaataaatgcagattttcttgtcctaagcagtcttttctcagccacatwatagttgaattactcagtttttttagatgcatttttagagcttgtttgaaaatctaccatgttgttatattgctggggttttttgttttttttttttcattcaacttttttttttacccactagatttgtgaaactgttttttaaaatatatttttagcactgttagatatatatgattatgggtaattttatatatcaaggaggattttttttctcctcacagaccaataatccaagaggttgggcacagctgatactcttaaaaagcagcttaatcccaatcaatagatcttagcccttggggaagttagaggccttttgcaagtctcatgaaagctatgaatcttctcctcagaaaaatacatatgcatgtataatttttgtatcatttcagatcctttaaaacaggttcctaggtcccaggttaagagctccagttcttcactgattaaaaagaactgtagacctgccaggtaaagtggagacaccaaggatgaaggtgaaaggccagaaattgggcaggaaataggcaccactcatcaaatagtatttcaggatatcaacattaaagataaaacygggttgtaaattattwattgtaagcacaaatgagtggctccacctttagacccataaaatagatgagttgacatcgagtkatgttgaatccatggtaatgagtttatgtaatatttctcttagaactgtgtcataggttgttttttcagaccttaagaaacattatgtatccttttatataaccctgtttttaaaaagctttgtaaatttttcttttaacagtcggccaaattacgtaagctgcctccttttcttactgtttcattactaagatttaattttgattttgtgaaatgcgaacgctacaaggaaactagctgttatacattccctctccggattaatctcaagcccttttgtgaacaggtttgaactattttatttttaaattctttcttttcccctctcaagattgaatctattattgacccgattttcagttggtttattgtgagaatctctaaaccttggcaccattgacattttcagttaaactattctttgttgtgggagactgtctcatgcattagggtgtttagcagcatccctgccctctacctactggatgacagtagcagcctcactccccctctctcagttgtgacaaccaaaactgtcttcagacaaagccaaatatgtctcctgcgaggacagcgtgggcaagattgaccctgtttgagaaccactgatttatttagagtcattttgaatttccaaagtatagatttattcccagttctttttattaaacccttctttaaaatatttggaatgaaaatttaagaacaaaattagaagtttaccctgcatttagaaaactcaccattaattggtaccactaatttggatttagtttattttacatgtaatgatgaatttatgcatctagaaagtcaagaggcaaatggaaattcactagtctagaatctgtaatccttaagacatagggaaagaaaaggttttgaaaacaaattaattacaaaatcaacctactttgtaagccatttaaaaatgttttttataacattgctgtacataccaaggtctgggtgaaaagagtaattatttcttatcacaaatcattcttatatgtttattcagaatagaacatttattagctagctattgagtttctgtgtaaaaaaagtaatctttttctaaacattcttaaattcgggatcttcacaaatgggccttcctttacttcaagccaaattgctgagctttttggggtttttttttttgttgtttgaattaccactcaaaggttctaatattctgttgcccctgaggctattattgacgtaaccaaataaataattttcccagagttagttaatataattgtttcttgttttataaaagatagtttgtcacatgatttttaacatactttgatgtaacaaaactgaaataattgaagaaattgagcacttatataggaagtccacattcattttacttttggatttctgtattaatggaaaaaagtcacttggcatctttgtgtacaccttgtcttttgcctgtactagacattttaaaatgctgcccacttaaaaagtttaatattttaagcaaataaattattaaaataactgacacccatcaagcggccaccatatgtacatctgaacatcacagatgagcactgacttgagtttagacgtcaaagccagaagagagcttatatcatgtagttttagagccctcagatgtgaaaaaggcttcttttttcttctgcatcagaaatttaaataaacatctttaaagtatctcttaatctaaattagctttttattttattttgtttctaattgctagtgtgggagtacatctgtttgatcactcatgattatggagcatattaattatagaaaatgttgatcatagaattaataaaacaagaaagaacctcttccactaaactgcctctaaacaaaaacagttgatagtcataattagtaagttcctattctatacagaggactgtagtgtcaggaggggtgatagttgatctggctttgactttgaggcacatgacaacctagttgaaatagaggacaatytcaactagatatatatcaataaaaaaaaggggatgcattttaaaagaagagtgcatctataaagcagcgtaaataggtattgtacgaagatgggtttctcttgctaaaaatttctacaacagactcactgatagggtaacatatttcattgttttattggcttacatgatcttagccaaagtacataaaagtaacgtatttttcaggtacttgtgttcatggtcaactaagaggcagaatttgattggtgtagtgtgactggccattagatcaattaatttaaaaattttaaatttaaagccaattacttgaattcatctttactcttaaataacaaacagtgaagtttcttattaatttcagtagttgaaattattttttcttttgattattatcagcattttatgaaaactatatcawtatttttgttcttttttcttttagagtgaattggatgacttagaatatatatatgacctcttctcagttattatacacaaaggtggctgctacggaggccattaccatgtatatattawagatgttgatcatttgggaaactggcagtttcaagtacgtatagaaattcgtttagaaatatctttgcaatttcttttctattcctattattttgttgaggaaattttgtttaccatttattatatatccactctatagaaaactttgataggcactgaaagttaatacagatacaagttttaaatttttatttctaaataatttcacacatacagaaaaattaccagaatagtaaaaacacctcctgtataccctttacctagattctctaattgttaacattttgccacatttgtgcatgtgcatacacagacacacattattaacgttatcattattagtgcgaaccgtttgaaattaagttgaagacaccaggtccctttaccactgaatacttgagtgtttatcttctaaaaccaaggatgttatcttacgtgagcattgattaaaataaggaacttctaacattgatataatactgttgtctaatagttatgttcagattccaccagttttccagttcacatccttcatggcaatttttcccccactctagtgtcaaatccagtgtcaagcatggtatttagttagctaactctcctgtaatctggaaccattccttagctatacagttactccattatcataaagagacagcacaattcctatagctgacaattattgaattttttctgaaaaataaaatgagcattgatttagataacacacaatattaattttgtatcctgcagatggcaggtgaacatgtgataaaaacaataaatcccgtgtctgtagctttcacaataggatttaaaaccagggtgaattttgtcctgtttattatgcatagtcatgtctttcatggttgctctttgaaacagtgctcaataaccactgattgaattacatttaaaactttgatcttcctagaatggtttcctatgagaggtgtaagaaggatttttttccacttgaaaaaattacctatttctatttattgagtaatcaatttttctctaccaatstactatgccagttctgttatgtctactcttcatttttgtgtgagtctgtttttcagctctctattctattccattgttcatttttttctattcctgggcaaataccacattgtcaatttccatagctttgtaataagtcttgatctctggtaggacaagtctccctacatgctgtcattcttcaggagtgtgggacctgtcttcattttttatgcttctgtgtacatttctagaatcaccttgtcagtaatctcacagatacacatgtgtgtgcacatacacatatacacacacatactcagtgggatttcctgtcttcatatgtgcacaagatatacattttcattttctaaagtccctttaatgtcttattaaaaagttttataatatttctcaaaaaaagaatttgcagatgttctgagggaaagtgctaaccggtgtctagttcccaagaaattataatctattacacatcaaccccagacacagtaaaacgtctataagtaagtcacaaaccgtaatgttaggatgtaaaatgcttaaagcatagcttcctgttatcagaaagttaatgctgttgttgacgaatacttgctccacatttacttgtaatacggcatctcgtggtgccagcagtatccaagatgcacagtccctttgatgacactcagccagcttttcaaagtgttcgtctgtatttctgacattctatcagttgtatttggaacgtattgagagatacatgttctgtaaagtttggatatgaaaaaagtcaaactgtgttctaccaggaacatgtttaccagggagatgatctatgcctaaattttgtgttttctggagtgtttgtggcygatgtattgaaatgtaactttctttagtatgttgattttatataccaaaatatataaaatattaaacaatttatacactaacaaccaataatcttgctaaacactcatgttgaagtcatctatggaaaaagacagttttgttttacctgtccaaatcctttgccttccatttcttttgcttactgcagtgaatggaactcccattctggcttgggaaagctgtacaagcattgctctcaaatgcttgtgtcacatttgccaagataccagcttgccgggcaccttcccaattagaggaagttaaacacttgttatcctcatctactgtgtttcggcccttactgttaccatgtttaatttgagccaatccttatcgtgttgttataccttccctcaaactaccttcttgtatttttagtttcccacagtagagaatccttaagaaagtggccttctcactccgccttaaactccccttatcttatcaaataggctttattttgctctctctttaagatgaagcctttcattagattctgatcgaagcttgtccatgtctggtaagtgtttattatggtgttcattttttttgccttgcccattcccattgcagttcgtggctcttttcttccagttgtgcctccaccttttgtgacctttttcaatattgccgtgtctctcttcagtcttaggaagtgctcccagcctctgtgccagcccaggttccacctcagggagtrtgcccctacattccttgatgcctgctacagtttttgctcagccagtttgaagatttgaggtatttttctagctggcaatatttatcctcagttttttgatgcataaaatatctgtttgcaatttcatcttcaggtttatcactgaggtcatgtacaaaggcagtttcacactctggtgaggcagcatgttttgagagtagtgatttctctcttccttgaatttcttttgggttgtggtttcctggacatctcttttgsagttttgtgctcatttcttcagaattgatcagcttctttctagcagcatcaggatctcttcccagttctgtgacatgactcaaagggcaggcaggcattccttcatgtggcttcggtctctgcactgcctgtccatttttgaagctctaacaccttagcaaggtcttcctcaggacttagagaacaatagaatattgtgcttggtatgttttcttgttaatggctatcaagcatcccatttgttatttttttttcttattgttctgttgtttaagaatcactagcttttcatccagaacttcatggtgttcagataatgattttgtgctttaagaatttcacctgcagtagatatatctggtggacactgtgcttgtctctttactaccattatcctgacagatcccctgtgcccacagacaaagggtcccaaatattctaatcgtagccaggtagtgttctttccacttacagttcagcaattacttcttccctttgaaggagctgtgccctgcatacatggagttctttagtaggtactgcctgtaaggagtagttttcaggaccaatctcgtgtaattttctctgggttaaagccaacattttagtctctcttagtgtgcctggaagatgatccctttcttctagcatggaggccactaactgcaaaatgtgaatgtagatctggctataaagaggagcctgatccatgccaccagcttcctggggggactttggcttcacagatggttggcatcatttggaacatcatcttgcacatttgaggaagtggggcaaagaaggctccatgacagcacccaattggcagctctatgactggaccagcctgtcccaacatggccagggtcagacactggcagagtggaggaggactgggcccagcctatatgtcatctggatcaacttgtcatatgttgggctcataggctcaagcatcatctctacattgccggtttgcctcttccctcctgtcatttttaaatctcttattccgttgtcataaatttcttcaagcaccttaaacatacttattttattattttctttctgataattgcagcatctgaagactttgtaggtctgacttggatatcttctgatgttgctgattgtatttccttgtgattttagtattgtggactgtaggcttcttgctttgcttgtttgtttgctttttaagaacttgatttacgggagtaatttgaggactgagttaaaagtgccttcttccaagaaagatttgtgtttgtctctaacacaagcctgagatcgctaccagcccttaacaacatcaaattgatggttttagagcaatacagctagtatgaatttgggacacaaacccacatgaggacctacttgtgattattaaaggacatttttcccccttcatccagtatcaaggtcaaggcaagccagttcctcattgtcctttattgtaaggtggattttttttctaggtcgtggttatattgaaggtatagmcatttagggattccaactttttgccggattttgtcattgtgatatattaagaagtatatatttggtcatcctttccagttcccattcctagcacagagctccttggaacttcctgagtgataggagtgtcttttgttattcataatgggcccctttccaccaaacctgagttgatgttaatgaagtcactcttagatgcctcaggatggaggctggttgccagagaagscagtcccattattagagggttgaaactttcagccctgcttccctgaccttggggaggggagagagacaggaaattgagttcagtcaccagtgacgagtgatttatttaatcggtcatgcctctgtaatgaaacttcagtgaaacctcttgaaaaattaggtttggggcatttctgggttggtgaacacattttcatgctgggagggtggccaccgcgactccacggaaacagagtttcctgaactctgggcccttctggaccttgccctatgtctgtctccatctggctattcatttatatcctttgtaataaagtgtagtataagttcctgagttcttaactgttgttccagaaaattatgaacctgagttggggtgatgggaaccctagaatttgtaatcagccaggcagaagtgtgagtaccctagggactccgtatgtagttggtgtttgaagtagggaacagtcttacgggactgagtcctcaacttatggagtctgtgctgtcacctgatagtgtcagaattgaatacaattgtgtgacacctagttgatgtcagagaattggagaattgattgttgtttgaaagaccagtccctcgactccctcctttgggtaggcctaggctttctctccccaactctgccctgtatgggcatcaaaatggaagttcagtgtcagcaagatcggtgtcttagtccattcaggttcaggctgctctatcacaacacttaggctgggtaatttgtaaacaacagaaatttattgctcacagttctggaggctgggaagtcaagattaaggcaccagcagattttgtgtctgtgaggacttgctctgcttcatagatgactctttcttgctgtgtcctcacatggcagaaaggacacacaaaactccttcaggccttttttataaaggcactactcccattcatgagggctcatcttttgtgacctaattatctcctgaagaccccacctcttaatactattgcattggyggttaggtttcaacgtatgaattttgggggaacctaactactctggccatagcagttgcacatctggaggcctcatctttggatttcttccccacattcccatttcacttttttgacctcagaagagttttccctgatgttcttgcaagctcatggtgtgtttaagatgtttttatttgtkttggttttactttatctagcatttttagtaattttgtagcaggatggttgtatctggcctgccatatttttccatcacttattgattatttatttttggcttgcattgtttaggactatctgtatttctggttttaagtccatttaaaatacttctgcaagatggcatgtatggaaataaaaggcaatgaaaataacttaccggggaattttgacatgttccccaataccttcataaaatggggtgaaaacttggatgatcaggaaatagaaaggagtatttaatctgagcctggcctgcaaagatgagtagaatttccttaggtcaacacaagtgaatgagaccataygggatgaagaccagaaaatactttgaactgaattttaatgaaaactcaacatatcaaattatgtaaaatgtagctaaagtagtgctaagctggaaaatattggaacccactgtgtgtattgtgctagaaggtttacttgtttcatattcccaatttacaactaaagccagagagatgaagtaaattgtccaggattgctcaaccaggagctggaattcaaagccaggtctgcctcattccaagcatatgcagattattgtgatgtttttaccaccatttcatcatcttgaaaccttttttttttttgacaacgtcttgctctgtgtcatccatgctggagtgcagtggcgcaatcacggcctactgcagccttgacctcctgggctcaagcagtcctcccgcctcaacctcctggctaattttttttatctttttgtagagtgtgctggtctctctatgttgcccaggctggtcttgaactcctggctcaagcagtccctctgcctcggcctcccaaattgctgggattacaggtgtgagctactgtgcctggccaacattcctattttgttactttttaaggggttagtgatagaaactcatactgttttccttcctaggaggaaaaaagtaaaccagatgtgaatctgaaagatctccagagtgaagaagagattgatcatccactgatgattctaaaagcaatcttattagaggtatagtatgtgtgtgtatgtatttgtatgtatggtatgtattgtgtgtatgtgtgcatgtgtgtatatatgtaagaatgtatgcggtttarttgctaggtgtgatattattaccattcatagtctttccttaaggacattctctgtatctatattttaatgatgtttgtggggattttctggttatgaatgaaatacatattcatggtagaaaattcaagaaaaaaacagaaaatatatacaaaagataaaaagtataagtaggccagatactgacagttattgttaacactttgatatatattctttgcattctgttttctttatgtttatatatgtatattggaattgggttatgacttttttggctattattgtcattttaaaccaaattgagctttactaaatgctgttttgcaatttattgcatttccatattatccttttaatgtctatgtgacctgaaagtgtgtcccctttttcattcctagcactcactgataatatctcaagtagatgacttttaaagtttgtttaatatgctgttttaaagatgtgaggtcttctttcatttattcattcatccttaataaatgatttgttataattcctgctagggacctgggtcgagtactttaattatattgatctatgactattgtatgaatttactagggctgccatgacaaaatgmcacagactgcatggcttagatgatagaaatgtattttctgacagttttgaaggctggaagtccaagattaaggtgttggcagttttggtttcttctgaggcctctctccttggcttgcagatggccgtcttcttcctgtgtcctcacatggtgtttcttctgtgtgtgtgcttccctggtgtcactttgtccaaacttcgtcttcttatgataatgccaatcagatttacttagggcctactctaaaatggaaaacagcctcgttttaccttaatcacctctttaaaggtctaatctccaaatgtggtcacattctgaaatattgtaggttaggaattcaacatatgaattttggggagatacaattcagtctgtcaccgctacatctcacccccttttagaacttgtttatacttcaaaacatktagataagacattaatcatctttgtttttgtacttacgtatytcttccaaaattcttgtttaatatcagtaatttacacatttaaatggaaaattcctttttaatgttgggaatttacgaaaccttgagctacttttgatattgctcttcaaatggaagatggcacatggaaaatggcaaaaatccaagttttctcaactgaggcttaaccagtttttaaaaaactttttataataaaataattatgatggaatcaacttacgtgtttgctgttctaggcatatttaattaggtataatcctgttggtctctttgaatttgttaagtatgcarttatttctcatcagattttcttgagtgactgtgtttctctcataaggaggagaataatctaattcctgttgatcagctgggccagaaacttttgaaaaagataggaatatcttggaacaagaagtacagaaaacagcatggaccaytgcggaaggtaatacatggcatcgttttgggaagtcctagtcccaagaaatttcattatgatcgcaacaacatgaattcctttgcagaaggatatttaaaataggtgaaaataaaatcaccgtatttgtataatggctagaatcctactaagttacttattaagtattacttactgagttatttatcatagaaacaagaagtaagcaaaaatagtggggagtgactcctaaaaaatgtcagagttcatcccctaaagcttatcattttacttagagaaatgtcttcaggtattcacccagatttcacttgattttttacacaaaattctagtaagggaatttgcctttttatctatggtatcaaatttattgkcataaacttgttcaaaatatctcattatccttttagtgtctgtagaacctgaagctatgttccattttcatttctgatattaataatttttattttctcaccttttttcatcagtgttgcttgggggttatcaagtttttttttggtttgttttttgttttttttttttttttgagttgaggtccactctgtygcccaggctggagtgcagcggcacgacctcagctcactgcaacctccacctcccaggctccagtgattctcctgcctcagcctcctgagtagctgggactacaggcatgtgacactgcacctagctaatttttgtagagacagggttttgccatgtcacccaggctggtctcaaactcctggactcaagtgatctgcctggccatcaagttaattttttccttttcaagaaaccagcttttgccttagatataatttgatgcaatgctattgattttctctattgcttttctattttctatttcactgatatctgttcttattttaaagtattttcttctacttcttgggacttaatttgatcatctttttctagctacttgggttggtaactcagttttttttttaaaccttctaatacttttaaagctataaattttcttccaagcactagttatattcaacaaattatattgttgattatagttatattgttgaatatagtcagttatattcaacaagctttcattttcattcagtttgaaatattttctaatttctcttattttttctttggctcttgagttctttggaggtgtgttggtcaatttccaaatatttagggggtttctagttatctttttgttatgtcagtaaattgatttctaattaatttcattgtactttgagaacatactctatatgagttcagttcttttgaatttcttaggacttgttttacggttcagagtgttgtctatcctgctcaatgttctgtgttcactaaagaggttgttttctgcagttattggatgtagcatttcacaagtgacaactaggtcaaattgattgtgttctttgtttcttctctattcttattattttttttttttgccttttctattaattactgaggaatttttaaatctcccaactataattgtggatttgtctcatttttttaaaaaaaagttttgacagtttttgcttcatgtatcttctggaagctatattattaggtacatacacatttaggattgttattgcctcctggcgtgaaatgcttgccttttttttgagacagagttttgctctgtcactcagactgaagcgtaggagcacagtcacagcccactgcagccttgacctcctgggcccacgtgatcctcctagctcaacctcctgagtagttgcgaccacaggcacacctggccacacctggctatgtgttcttttttttatttttcattttgtagagatggtgtctccgtatgttgcccaggctggtgttgaacttctgggctcaagagatcctcccaccttggcctcccaaagtgctgggattataggcatgagccaccacaccagaaatgcttgtctttatctctgctaatatcccttgccttgaaatctaccttgtctggtattaatgtagccatataagctttcttatacatgtgtgtctcagtatgaagttggatcttgtttattttggaaaattatggtttttaaggaatttgttcatttatctgaggtgtcaaatttgttggcataaagttgtttaaaatctcaccttattatccgtttagtgactgtagaatatgaacttatgattcctttttcatttctgatattgataatttgtctttttttagctttctttttcattgctggggtttatcaagtttattaaacttttcaagaaaacgactttgcctgtgttgattttctctgctcttctgttttctgtcaaatgacagagagtttgacagtctcttcctttttattagaatgtttagttatttacattaatataattgatatggctgtgtttgaatctctcatcttgctatttgttttctatttctcctctattctttattttctttttcctttcctgccttcttttggattaataaatttttagtgtcccatttttagctcttttgttggctttttaatctatttaatttcatctagcgattacactatatataaattaacatgataaattacaaattaatagtataccactttatgtatactgtaagatgcttacaatagtataatttcattttcccattcccatttttcctactattgccttcttatattttaccattacatgtaatgtaaattacactatatgttactactwctgcttaaacactttagtgacttttaaagaaattaaggaaagaatagtgtttcgtatttatcttttctggagtttactgctcrttatttatccaggtttgcatttaatatcatttcccttcaacctagagagtttcctttagcatttcttgaagttcagaattgcaggtgaaaaatgctttcagattttgtctgaaaatatttattttacctccattttttagtgatatttttgatagatacagaattataagttaatcatttttgtgtttttctcagtgttttaaagaggcccattgtgttctggcttccagtatgttggatgagaagccaactgtcattttttatttcattctcttgaatgtaatgtttctttttcttggtctacttttaagattttctttttatctttggttttcagcagtttgacaataatgtatttaggtattgtgttccttgtgtttatttacattctattgctaagtatttttaatatctgtggtccaaagtcttttttaaaattttggaaaaattttggccattatttcttcaatttctttttctgcctcatctctctttctttttctgggagtctaactatatccttccatatctatgggggattggttctagaatccccagatgacacccacatctgcagatgctcaagtctctttcatgaaatggcatagtatttgcatatggcctagtcacatcctcctctattctttaaactatcactagattacgtataatacctaacatagcctggacgtggtggctcacacctgtaatcccagcaaaagggaggtctaggcaagaggattgcttgagcccaggagtttaagaccagtcctggcaacatagcaagaccccatctgtacaaaaaatttaaaaattagctggatgcggtggtgcgcacatgtartcccagctatttgggaagctggggtggaggattgcttaagcccaagagtctgaggctgcagtgagctatgatcatgcactgcactgcagactgggcaacaggatgagaccctgtctccaaaagaaaaaaaaggaaacaaaaaaacctaatacaatataaatgctatgtaaatagttgtactgtatttttaagtttttattatttttcactattatactgttgtttatttattttaatgtttttgattcatggttggttgaatctgtggatttggaaactgcagatactgaggaccatctgtatgtattcgaccatttgatatgtcctctcaggtcttggatgttctgggggcttttgttttgttttgtttgagacaggatctcactctgttgcccaggctgaagtgaagtggcacaatctcagctcactgcaatctctgcctcccaggctcaagcagtcctccagcctcagcctcccgagtagctgagattactggcatgtttcaccatacccagctaattctttgtatttttttgtagagatgagggttttgccatgttggccagactggtgttttgttctttaatttttttcttttcctacttcaatttggacaatttccagagatctgtcctcagctttgctaattttttcttccactgagccactcttctgttaagaccaacaaatgagctatacgtttcagatattatactttttagttgtagtctttccacttagctcttatttaaagtgtacatttctttgctgaaattccccttctctttacccattctattcatcttttcctttaaattctttaacatatttataatagctgtttgctattatagtagctagattaattctgaatttgattctgttgactcttttattctcttttgaattgaccattccatctgttgattatgaataacattgtcctgtttctttgcatgtcatataatcttttcaatataaatttttattttttaattacaaattgataaattttagttgtatatatttataagggtacagattgatgttttaatttgcaaatacaatacagaaaaatctaatgaacatatccatcatctcaaatacttattttttgtggtgaagtttattctcagcaattttgaaatgtacagtatgtttttattttctgtatttaccatactgtgcaatagattttttaagaaaaacaacttattcctaccattgaattgaggctttgtatcctttgaccatcatctccccatgtcttgcccccctgctccatataatctcatattgtggatgatgtgttgtggagagtctagattatgttatttttctctgaagagctttgcattgcattctaacaagccctcaaattacctttgagtcttttagattctgtggaagttaaattttgggctttagggtgggtctgttacaattttggctttagttccagggaatagcttagccctgggtcatggtccttcctcttacagtagggctcagctaactatggcctgtgggcaaaatgtggcctgctgcctgttcttatagtcttgagctaagaacatgccttacatttttaaatggttactttttaaaaggtgaagtgagtactaagtaatgttctcagttttgcttctaaaatatttaccatctggctctttaagaaaaagtttgctatctctttctaatttggtaggacttgaactccttgttctttcttcttggcatcaggcagccctgctcagatattgaacctcctaactgatactctctgctgggctctttgagctgtccattctaccatttaggagttagccaaggatttagggggatttgttacagaattggggctccttcgtgggatctcgcctctctggtattctcagattctgtcccctcatcccagtaagactcttgccttttcttgaaatctgttccatcatgcactgctacaaactgggtagtaggtaggtgagtgcagaactcacctggtttgcttcccttctttgaagtattatatcttcactttatgcctactttgggttcctttcccaacagttgttttccttttttgcctagagtttatcatttttattaggaagattagtctaagaaaatttctttgtcattaatgggactagactgcactgatgtttgaggcttaaaagagttaattctcaactatcaaacaaagaaaaacgtggctatatagaaagttcattacttaaaaacccaaagaacaaaaaatgaaaagaaagttcattactcaaagctttcaagttgttgatacttttttgtaccttaaacaaactagctgcaaggctgttttaccttctgttctcatacacaatgttaacaatgttgtctttgggttatgccctacactcttctgtttgttgataaaataatacttttgattctcagagagttgacattaccacaaattactttctttccaagcgaaaaattagcaaatcacctttccagggtgattgatgaagtacccaagtgtcaaatttaactcccaagtaattttctatataaagtaaattaggctgagagaaaagaaagagactcaaggccagacagaggttaaagagtgagaggataggggcgtagtggatggggaggtagagacaggcaatggagaaagagatttttttcttcttaatcctttagcaagaactttgggattgtgacttaacmcttactatgctttgattttctgagcttgtctgccagcttttagaacagacaacattcactttagtccaggttaaaagataatttaggttgataattactaccttatcccaacagagtctgtctgggttttcaaattatcttttatggtggtacactgtgtgattgcctttgttttgtgccttgtttagattgcttttaaatatttcaaaagtgtttgttctacctaatctgttccagttaaatacttttttaaacagcactagtgaggtgtaatcaaaatgctttttagattgtggcatagcgacctcctccctggatgtcactatcagactatttaacagagcactgtggttttattaaatgttttatgatacctagatggattttcccccgtagctggccaggtcagaaataaagatgaagttaaatgatctaatcacagaaaggaagaaaacattttttaatcacatctaatttttgtttaaataattaacttagcatttttttttttgtttctgtgtagttcttacagctccattctcagatatttctactcagttcagatgaaagtacagttcgtctcttgaagaatagttctctccaggctgagtctgatttccaaaggaatgaccagcaaattttcmagatgcttcctccagaatccccaggtttaaacaatagcatctcctgtccccactggtttgatataaatgattctraagtccagccaatcagggaaaaggatattgaacagcaatttcagggtaaagaaagtgcctacatgttgttttatcggaaatcccagttgcagagaccccctgaaggtatggaaagaaaaatgttcctatttgtttcagttaatggctttagaagataaacatggaatgctgtttgaatttttattcttttaaaaaaaggtttactcttggaacatttttaaatattttaaagctaacaagaactatattatgccaaatgaaatctaacaatttgtcattttataaagattatatacttctctttaattttctaccctgtaataatgtaagatcatcattacattttcaaaattggatttccttggatagcataaaaccttcttgtgttggcaaacttgagtgcgattgccatatgctcagacttggctctgtcattcagccatatgttgcctttgaattttaagtggccctggtcttatttttatatcttctcctttattttcctgattcttttatatcttctcctttattttctgcttatttatatcttttatttctattatttatcctttatttatatcttttcatatcttctcctttattttcctgtttctcaataagactttttgtttatttattcatttatttatttttagagatgcagcctcactctctcgtccaggctggagtgcagtggcatgattgttcactgcagcctctaattcctgggctcaagtgattctcttcccttagtagctaggcctacaagtacatgctgccacacctggctaattttttcatttttttagagacagggtctcgctgtattgcccaggttggtcttgaactcctggcctcagatgatgctcacacctcagcctcccaaaatgmtggtgtcatcggtagagggtcatgagtgcaagttgtccaggttcttggcatttcgaacaaagaattagacaaaacgcccagcaaagcaaagaatgaagcaacaaaagaccaaaagcagagatgtatggaaaacaaaagtacactccacagtgtggaagctgcctgagcagcagctcaagggcccagatacagaatcttctccggtccaaatatcccctagaagtttcccattggccacttcatgctcacctcatgtaaatgaattgggagcccgccatcagtctgattggttgcagaaagcagccaaccagaggctgaagtgaagttacaaaggtcactatcatgtgcaaacatctgattggttgcagaaagcaaccaatcagaggctagggtgaagttacaacgttacacttatttgcaaacgaagacatagctggcaatcagtctgattggctgcaggcaacacccattcagaggctggagtgaagttgcaaagatgcaaacgaagaccctaccagcaatcagtctgatttgttgctcagtcttatttgttgccaacagcaaccattcagaggctgaaatggttacagagttgcaaacgaagactccacccactgtctgattcgttggggtcagccaatttcctatgtgtgcgcagaaaaggtcaaaggaagtagcctctggtccttctgttacttaggaatggaaagttagggtgttcctttcaatttagttctaggaagtcggtgtgaaacagccttaggttccctgtctccagaccctattctcctgcctcactgggattacaggcatgaggcctaataagatttttcgatcacttctcaaagtccgctcaaaagttaaaaaccccagtgagaaaagctttatagattgagacatatctattattagagatgagaatattgttcttagagaatgagaatagccatcatttttatgaagaataagaataaagcagttactaatttgcatgtgaatcaaaggaaattaactttccagatctaaaacagttacataactatgctgttaatgaaaaaggmtttgtatttttctgggaggaaaaaaagatatggaaatggttctggtaaaaatattgtgtatcagaattcacagttatagaaatatatactatcagaaaaagaatatcttcaaatggagtattagtctttttcacagaattgaattttagtgtgtatgtaattggaatatgtaaatgacagttttcttgttagcttaggaattgaacaaagatccaacaaaaaatytaggtgtacttttttgggaaagaagggatagaatttataaaatgattctaaaattcacctggagaaataaagtaataaaaactgaagaagagatgactgagggagaatttgctrtatcagtaaaaacatatttataaagttatagcaatgaagacagtgtagtggtaatgcaaaaaggtagacagatcattgaaaaagagcagtaaacccaggagttgatctaagcatatttgtgttttaatccgtggtaaggtagctcttcagatattttggggaaggaagggagtgaattactcaataaatacaactgggaagttggttatttgctagggaaataactaagccatttttctttgttatacaaatcacttaaatgaaattatagttcctttaatatttatgtaaaaaaggaatcgtaaaatgtgtaaaatataaatatttsatcttaaggtaaagaaaacctttctaagcataaaagcaaagaaagaaaaaactagggcaaagtgatataacccttaaaacagaattaaaaggcaaatgacaagctaatggaaaacagtaaaatatatgacaaattaatttcccctatctgtagagtgcgcttacatatatttcattgtgctcagtagtaaattggggaaatgatataaataagcaatttacaaaaagaagattcctgtgtttcaaaaaattttcaatttaacctgtaatcaaaaagaagaagaagaatggcaatgagatgaacattagtgagatgccccaccaaatcagatactatttctgtgactcttgggtttcaacaggtgacatttcctccagagctggtaggtatggaatacgatcagtttgagtatgtgtatttaaaagccttgaaactgtcataccgtttaaaccagtaattctactttcacaagtttgtcttaaagtaatcagagctgtatatgaatgttgatgctcaaagatgtttattgttcctactattttaaaatagtgattaattggaaatcaccttaatgtctaacagaaaaagattggttaggttaattatgctccttatagaatggactactatgtaatcatttatttaagactttggaaaatacagtgtatgaaatgaaaatagatttgttgaatattatcccagtttttaaaattgtgtgtgtttgtgtgtgtgcctgtgtgtgtgtgtgtgtgtgtgtgtgtgcttgggagtgaaattatgagcagtatctatttcttttacacttaaaaaaattccagaatttttacagtagtcatttattgtatttgtaatcaagatgaaaatctgaggccaggcgtggtggcttatgcctttaatctcagcactttgggaggctgaggcgggcagatcacttgaggccaggagttcaaaaccagcctgggcaacatggcgaaaccctgtctctgctaaaaatacaaaaattagccaggcgtggtggcaggagcctgtaatcccagctactcagaggctgaggcacgagaattgcttgaacctgggaggcagagtgagctaagattgcgccactgcactccagcctgggcgacaaagtgagactccgtctcaaaaaaaaaaaaaaaaagaaaaagaaaaagaaaaaaaaaagatgaaaatctgggtgttctttttaaaaagtatacttaaaagagttgaaaaaatggaattcttctagcttgtcttaaagaaatatttacttttcatttgttctaactttttcatttttcagatgggaaaactgagatcctgagaaaattcgtattcacacagctaattagtagcagctttcctagctcctaaggacagtccttcctagtcttcatgctacctcttccagcaaccagatttcatttagccaacacaagttaatgaaaaattttgttcacagctcgagctaatccaagatatggggttccatgtcatttactgaatgaaatggatgcagctaacattgaactgcaaaccaaaaggtaattttaaattgcttttagagtttgactagtattccggagaataaagatctgatttaggccttaagcattcagtaatgaaaattaaaargaaaaaaaatagtcaacttgttaatgcaagtgtctgtttggctgctgaatttttatagtgagggtaactttaactctgaaattatcccttatgtgtgagagtgaattaaatggtgacatataaaacagccattgctaagtagggatcgaagcctaacaagagtagagaaatcagtgagcacatagttgggctgaatgaattgtatcctggcctggccagattatttccttgggtccaaagagagcctgccatgaaaatcacccctcataggtaagtagttgtagcgaactggcatgtagtgagagaggatcagtggtgggcagattttcaaaaggagggaaatatggatgctataacctattgaatgcaatgctgatcttgggggaaagcctatgatggattcttacttaaagagatggtttgtgagaactttatgatctcagcattctcttttggggcctcacctttgactctgaactgcttctttatttgtgctctgttagggtcaatagggtattgggttaggaaaatggatgttaccgtgatctccttgtggaccaaactgcctgattatgtgacagggtgtatttgacatttttatcattggcttggagctgggggaaaaaagtacagtgaatgacacgagcaaagaaacaacaaaaaccaagataccaaaaagattaaaacttaacagagcgaaatatcttaagtctaaaaaataacctgcataagtggtctggactagcagttgttattttaaaaaaataaaaataaaaaaataaaaggcagagcctgaggggctgtcgtcaacccgcactaaggtctttcgtgtggttgtgctctctgaccatgttcattgaagtgtcctgaagtacgtgagttgcgtgataagcctcattccagctccacattggtcagaccctacctgtgtttcgcactggcttcgagtcagccaagtggattcagagaagagcagccaacaccaggctgctgccaaggacttttagcctggataatgtggtctcgggaggttcatgctactggcttcaaatatttcatggggccggtcgcagtggctcacgtctgtaatcccagcaatttaggaggctgaggcaaatggatcacctgagatcaggagttcaagaccagcctggtcaacatggtgaaaccccatctctaccaaaaatacaaaaattagccaggcatggtggcacacacatgtaatcccagctactcaggaggctgaggcagaagaatcgcttgaacctaggaggtagaggctgtagtgagccaagatcgcagcactgcactccagccttggcgacagagtgagactctgtctcaaaaaaaaaaaaaaaatcatgggagaatgtgcaaaatctagtggaaataaggatgatagatgacatggaagtaaatctgctacttaacataatgatgtaagcaggtctctagcattttgttcataactataatctcagaattagaagatttcaagtgtcagcctttgttcagagaaatggagttaacattgcagcctatgttaaaacagttttctcttggaattcatggtgacagaactgaatttttgctattgactgaaaaattaaagtgactaattgtggcacatagaagaaaaattgttactttggtgggatggagaactttattgtaagccagatatctttggtttgagataaaacacagtgtctgttataaaaacacagtatttatgtatttttgtgcctctttaaagggcagaatgtgattctgcaaacaatacttttgaattgcatcttcacctgggccctcagtatcatttcttcaatggggctctgcacccagtagtctctcaaacagaaagcgtgtgggatttgacctttgataaaagaaaaactttaggagatctccrgcagtcaatatttcaggtaatatcgccttacttcctcttaattcagacatcgagcaccatctccagctagactctccatttcattctgtttaggatacaactttatttttcaaagctgcttaggaagatctgacatctgccacttcatagagggttgacccaaatcttctctcctaagtmttttagagaggcttttctccacagctcctaccagcagcttttcaggtagacaatcaggcctggtacattttatttgaggggaagaaagagtataaagttgtctcttttttagaaaataaatgaaagcaaattgcctttcaaagagagtgaaaagataaagatgagcatgttgtgtaaaactgagaactgctgaacaaataaacgcaactaactttataccctgtagtatagaacagtatttattaataatattcttaagtgaaggaaagtatctgctagtctagagtaaaaacagtgctgtagtctccaagtcatttttctaggtatgttttaatgatgatagcaacagcagtgttctttattttacttacactgctttcatataaatcatgtgatttggttctttaatctcatgaagacacattagccccattttgaagttgaggcagtgtgatttaaagagactcaatgtcttgcctgtggtcctaaatctagttgatggagctgggactctgtccctcttctccctactcttcatctagggtttttttctcctaatcaccctcctgctccacactactttctgatcaaggaaaagggagatagaaaatgttagcttttttgtgttttttcccagaaattagttaaatgaattttctgaaaaatcctattaccaaaactattagctttctttcaattttcttctgctaagaaaagcaaagcaatttcccttttaaccttagttgatttgaagttttttaaatactagatcagtgtcaggatttctaaagttgtctaatatttctgaactttttcattagaaatttatttctgagccaattctggcactgttgatacaggcagatgtgggaatctgaacctagtctagggggatattttaaatggaaaggatcttattcactttgtaagtgtgaggtacactccagtctgtgtgttttggtgttttaagtgtatatgcctactaactattctcttagaaggaagccactgacaagaggctagaaaacttaattcacagcaaactaatcrcttgtaaataagaagtttctttttaagaaaataccttatggtattgtagagaatgactagataggaatgacttttatggtgatattattttggtgaccttgccacagtgctcagactctcagatctagaaacttaaagagcaaagccatggtaatctattaagtaaactggtaatgcacctttataaatttgcaatgggagacattcctttcaagcarctagaagatgagtgtgtgctagagtcagggctacatttccctcaacattgctaattctgcaaattagtcttgctcttttgagtaaaaattcctaggctgacatgctcatcaacttgctttctgagaaaagtgctcttcatatatattaagcagaattgtttagatggttgttgtgccctttgtgtaggccagaattcttcactcagraatggaggagattagccgtctttggctttgactaatttaacaagtgatgccttcttttcaagttttcggtgttgggtgggggtgagagtattcatttgcttgctctctgtgtcatcttcatatgtgagttggcacagtaacctggaaaggtgatatgtatatgtcacttttcaacattctcttttccttcattaatattcttcagctgttagaattttgggaaggagacatggttcttagtgttgcaaagcttgtaccagcaggacttcacatttaccagtcacttggcggtaagataaatatgaaaacatagcaactcactctatatatctacatttttgtccggctcacctgcgattttctactctttgtcagtccttccccacctactactttcttaactaagtagattatcttcacactgtaagttttccaaaagaaataaaatatccacgttttaatgtatccagtttatataatgtgtgaaattcttctaacatggaaacattttattttttctgaaattaaggctacctctactaaaatttcttgaaaagctttagaattttttatattgacacatattgttgaacaacatagtttcaaaccatctgaatcatatttatgtgacttgattttctgcccagttctcagcttcagattttgtagtaaaacaagaaatactttgagagtttgaaagcatttacttcctttaaatagcaggaaaacaatgagaattaacagtagcggcagtaacatctaatttgggccaaaatctgtaataggtgttttatgttaattatctcacttgattttcataaaattcttttatctccatttcataaatgagaaaactgaagctgagagacttgaagcacacaatacagcttgtgttatggacatatcggtggagttgggaccattccatgcttaagcctaactcctgtttccaatgtcatgtgcctcaagtacacttgacctttggattatctctcttgtcctgccaccatgctcacaagcttttgtcacaacgttttaaagaaaaattacaatgaaataatgtcaatagaataaaaataattactactttttaaattttccttagtgaaaatactttttcaaacaaatatttgtctcagctctttctttagctcagttgtttctgatggtcatgatgaatggtctcactggtgatctctttctaggggatgaactgacactgtgtgaaactgaaattgctgatggggaagacatctttgtgtggaatggggtggaggtaaaaaaaattaytgaagaaatattcgtgataattttggatgttttaaaagtcatygtaatggccgggcatggtggctcatgcctgtaatcccagcactttgggagggcgaggcaggcagatcacctgaggtcaggaattcaagaccagcctggccatcatagtgaagccccatctctattaaaaatacaaaaattagctaggcatggtagcgtatgcctgtaatcccagtgacttgggaggctgaggcaggcgaatcgcttgaacccggaaagtggaggttgctgtgagctgagattacaccactgcactccagcctgggtgacagggcaagactccatctcaaaaaaaaagtcattgtaatgaaattttattcagcctatgtgagggcaattagatattagaaaactactgaaatgcttgataaatgttagggacaatcagtgctagttgtacgccaaggagacatttcttgagcgcctccgttataccaggttgtgcgtcagatgctagatcaaaggccagtcagttgatctgtgtccttttaggccctcgtcgtgtgaagaactgcaccatacgtgctggagtagggggtctgtgcatagtgcctgtgggaatttagaagagtgagaatctatactgagttggggagtgggggtggtttggaggtagagagtgaattttctatctctagaaggcggccaggagcacttcagccactctgtgaactgaccttggccaatctggcttcatcaccacccatgataactcataaatgtctatctccagtctatcatagatttctcctaaaaaaataaaagataagaaagtttcaaaagaaaaatctgaagttgttcctctgatgcttaacagacatttgtgaaaattttattttacttggaaaaaatgagggttgttctctaagagtaatcttttaccatgttatgttgayggtgttggcaaatatcagctgtactaatggttgtcttggtatgattgcaggttggtggagtccacattcaaactggtattgactgcgaacctctacttttaaatgttcttcatctagacacaagcagtgatggagaaaagtgttgtcaggtgatagaatctccacatgyctttccagctaatgcagaagtgggcactgtcctcacagccttagcaatcccagcaggtgtcatcttcatcaacagtgctggatgtccaggtggggagggttggacggccatccccaaggaagacatgaggaagacgttcagggagcaagggctcagaaatggaagctcaattttaattcaggattctcatgatgataacaggtaactcgctaacaagagaaaaaggatttctaaaagtcattttaattacagtaccacccagcagaactctaaagctttattttagtgacaagagttgaatgtttctttatttctagacattatgttctaaatattgcatacaggaatgttttaggttatgtaacttagagaaaaacatgattttttgtaaagggactttttggtaaatgtggtgagaaaataatataagtatccctgattttctagactgtatagagtatcaattagttggctgtaatgcaaaagttatcaagtgaattctgattagtgccagttataaaaccgaaggaaattctcacagagaaaactgaaaattttcctgaagaaggtattaacattatggctaaattgtttctggatattttgtttcaggagacccataagacaactcattgtttccttataatccgttctgtgactcttgagaacccagttgcccaaatagagcagttacstggcgaattacccccatgaatcctgtggtcacatttaaagctgcatctctttgtcatctatgtctgtgacagtacattgctgtagtcaatgtgtcatacactgtaactgcaatatttccatatattgaagacttcaagctccctgttttctcagtgctacagatttacttagattgcaggatgtctgtatcattatttatagtggctttgatgcagagaagcagagcacttgtggaccgtttctttcgtagtacacttaccactattactcttttggacaggggttttgcagacattccctaccttgtttataagaactgtatttcctttataaaaggcagtatgcatttattgggactggggaaatacaaaagtgaagacagaagggacccaaaacagtatccgtcttctcagcatgcagtgttaatcactgttagcatttgggtgcctttctttttaaacctaataatgattattttgtagataagtagttgtatcctgctttccattacccctgcccaaccttgagatttgtagactctttataaactgccttgaatggctacatagtaatctatgtgacattatagtttgcctaactgtgctcctaggcaagtcagtaggctrtagtgggaccttgggcaaggtatttcgtctttctctgctcagtcttcttgtctgtcaaatagggataataactagtgccaacttcatagacttgagaggattgaaagagttgagtgcttacaaagtacacacagtaagtgctaaatgttttagttaatatattacggtcattgtcatrattatcatacagtttttcactattttaaagtagtcttcatggagcatcttgtgcttcatactttgttttatttgggattgctagcttaaggtaggagctcagaatggaataactgcaataaagagtagaatgatgtttcagagctctaatgtacattcccaaagaggacttcggcaagcccattaatgcttctgtgtgaattagaaagaaggcacctcttcaggaccctttactactatctgtgggaaaatgttagaacaagatactctactgccggctgcaattataaaacaaaactctatgtagaaatgcagtatacaatatatatgccatgtgtgacactccttagatgtggcccttttgtgcagtgtcagtctacagactgcacatggctgccctgttgttaaatgaaatctagatccagtggggtaggctcctggcataggtgctcttttaaagctcccctagtgatttgcagggtgcrggcagaagccagcaactgtttacttacagaagttctctgtgaaaaatgtggcaacaaattatgtaggtaaatcaaagaatatttggagtcatgaatatagactctatagactactgcctaacattaccctgcaaaggtagcccacttatcatagagacgactcagtagaacttggtcacctctaattagtcacattaagtgacacatgcagagttttggaagtgatgcctaaggaaaggtattaatttctgatcttttctttttacctacagcttgttgaccaaggaagagaaatgggtcactagtatgaatgagattgactggctccacgttaaaaatttatgccagttagaatctgaagagaagcaagttaaaatatcagcaactgttaacacagtgagtagaatataattaaaggttggctgatagattttcagttaacagaattttatttagaaaacaataccttaatctttcagaacagttgtctcaatagacttcagctcttaggaagtcagctttttatttaacatttgattattgcttgtttacctatgttagcccttagcatatttcaagaaaatacgtgccttttaaaatttcctccaaagcctagaattagaatgtgggagttactcatttagttagttcatggaattctctggctcccacaaaatgaaattctttggcttccttgaaaatgctgttttcaagggtcttttctgtattttttttaagccaagtatacatatgttttggttttgtgttgtggacttctgttttttaaatttatcttaaattgttttacattatactctgtttttctgtaaagccaggtgttcttaaaaggaactctttcagttctccatttgaagactagtttcgttaaacaccatctcaggaaatacctttttatatttatgtagtctcaattcattatgggttttttttctataacaagttgaaacttactagaatgttgttttcttttatataaatattataatttcttaaagtgtgttaatatttacactgtatgatgaatacactaaagttcagaagatctagtaccttgaccctaagtgagagactttggtgaagtcctttatgactcactctgtttcttcttttcacaatgtggggtgctgtgggaggacagattgtctgacatcggttttactcctaaatttacaagattttgtatcctagaggaaattaggttaaactgaaaaagggaaagaatctaaaataaagtcatttaaacagaaattttaaatagtgcactcgggctgatagtatacatttttatttatgcttactggccccacattcatcattcctgacatagagaaatgtgattgcctgcagtttattttgtttgctttcatgagaaaagttactggtttgtcagcttattgcctttcagctagtttctttagtttctgtagttttctacagtttctgtagttttctgtaggtgtcctttctgttccaattaacatcaatttggtaaaaacttaactatgaagtcctaagtttttgcttttgatcttataaaaggatttcagggatggaaaaatttccagtgggcaaaaactactaaatgtcaggtaattaatatctcaaataatttgtttatgcacacagtgacaatcctcattttcatctcctcccattttttacaacttagtcattattttatttctctgttttagatggtgtttgatattcgaattaaagccataaaggaattaaaattaatgaaggaactaggtaatcatttacattttcttttcggttcttagtttagcttaattttggtcttgaattgaagaaaatataggagaatacaaaaaacagtttagggagaactcacatacctaccacccaaaatggacaaatattaacattttgtcatatgtttgtttttgtttgaaacattataaatgaagttaaagtcccctgtgttctcctcctcagacctattctttctctccttccccagatacaatgagtatatctgatgtgggtgtgtatctagtccatgtattcatgttgtactatactgaatgtatattctgcaaactcactattcacttaccattaggctttctgtgacagccttattaagatataatctacataccataaaattcactcagtttaagtgtttaattcagtaatcatcagtaaatgtgtagagttctataaccatcaccacaatccagttttagaatacttccattactccaaaaakatccctgtacccatctgtattccaagcccctggcaaccactaatctgctttctgtctctatagactttattttcttaatgtttaatgtaattggaatcataaaacatatagtcttttgtgtctggcttctttcacatagcatatcatttttgaggttmgtccatgatttagtacgtatcaatagcttgttcctttgcattgctgactagtctagtattccattatatggatagtatcacattttgtttatcctggacaaacatgaattgatagacatttggattgtctctacttttgtgcttttatgaataatgccactatgaacttttacacataagtcttggtgaggagatatgttttcatttctcttgggtacatgtaccggattggaattgctgggtcatttgcaaatttatgtttaactttataagaaactctcgcactattatccaaagtgactgaaccatttatactcccactagcagtgtgtcagggttgcagtttctacatgtccttgtcaatctgtgattaattgtgattatcttttttttttttttttttttgagacagagtctcactctgtcagccaggctggagtgcagtgacacgatctccgctcactgcaacctccgtctcccaggctcaagcaatttttctgcctcagcctcccaagtagctgggattacaggcgtgtgccaccacgcccagctaatttttgtgtttttagtagagacagggtttcaccatgttggccaggctggtctcaaactcctgacctcaggtaatcygcccacctcggcctcccaaagtgctgggattacaggcatgagacactgagcccagccatcttttttttttttttttttttttttttttttagaatctgttactggtttggttttgacttttaaaaaaaaaaacatattttgagcacattttttattgttattttttccataggttattggggtacaggtggtgtttggttacatgagtaaattctttagtggtgctttgtgagattttggtgcacctatcacacgagcagtatacactacaccctatttgtagtcttttatccctcatccccctcccacccttccccccaagtccccaaagtccactatatcattcttgtgcctttgtgtcctcatagcttagctcccacgtatcagtgagaacatacggtgtttggttttccattcctgagttacttcacttataataatagtttccaatctcatctaggtcacggcaaatgccattaattcattcctttttatggctgagtggtattccatcatacacacacacacacacacacacacacacacacacacacacacaccacagtttctttatccactcattgattgatgggcatttgggttggttccatgattttgcaattgcaaactgtgctgctataaacatgcatgtgcaggccgggcacagtggctcacgcctgtaatcccagcactttgggaggccgaggcggggagaccacaaggtcaggagatcaagaccatcctggctaacatggtgaaaccctgtctctactgaaaaatacaacaaaaattagccaggcgtggtggtgtgcgcctgtagttccagctactggggaggctgaggctggagaatggcgtgaacccgggaggcagagcttgtagtgagccgagatcgcgccactgctctccagcctgggtgacagagcgagactccgtctcaaaaaaaaaaaaaaaacaaaaaaccatgcatgtgcaagtatcttttttgtataatgacttcttttcttctgggtagatacccagtagtgggattgctggatcaaatggtagttctacttttagttctttaaggaatctccacactgttttccatagtggctgtactagtttatgttcccaccagcagtgttgaagtgttccctaatcaccatatccacaccaacatggccattctactgaatgtgaattagtatcttaatgcatgtaaatttagcaagaactcaaaatcatatacagaaattcattgcctttttacctaccagcaacaacaacaacaaaatcgacatcaaaattaagaaaacatttataatagcataaaatattatgggatacttagacataaatgaacaaaatatgtgcaagacctgtacactaaaaactagaaaatactgctgtgagatatttaagaagacctgaataaataaagcaatatacaacattcacaaatcagacaacacaatattctttttttttttttttcaattcgagacggagtcttgctctgtccccaaggctggagtacagggcagcaatcttggctcactacaacctctgtctcctgggttcaagcgattctcttgcctcagcctcccgaatatctgggttacaggcacctgccaccacgtccagctaatttttctttttttttttttttgagatggagtctcgctctgtcacccaggctagagtgcagtggtgcgatcttggcccactgcaacctttgcttcccgggttcacgccattctcctgcctcagcctctcgagtagctgggactacaggtgcccgccaccaggcccggctaatttttagtggagacagggtttcaccgtgttagccaggatggtcttgatctgctgacctcgtgatccgcccgcctaggccttccaaagtgctgggattacaggtgtgagccactgcacctggccagatgatacartattcttaagaggataattcttccccawttgatgtgtagatttaatatattcttacacagaatcttaacattttttaaagaaattgacaagctgactctacaattttcatggaaatacaaataatttaaagtggccataacacttttgaaaacaagagaacaaagttggaagagttacactatctgatttcaaggcttactctagacagtgtatattggcatacaggtagacatatagagaggaggtcagcaaactatggcctacaacctgttttttttcagccagtgggcaaagaatggttttcgcactagtaaagggctgtttaaacaagaagcatgtgcaacagagatcacatgtggcccgtgaagcctaaaatatttacagtggaactcagagaatctagaaataggtgcgtagtcrttgactttcaacaaaggtgccaaggtattttcatgcagagagatagcattttttcaacaaatagtgctgggccatttagatatttgtatgtgcagaaatgaacctcaagctttacttcgcctgatgcaaaaattaaatggatcatacaactaaaagttaaaacctaaaactacaaaatttctgggagaaaacatatgaggaaatctttgttactttatcataaggaaaggtttttgtattaaagataggactcaaaaagcacaaaccatggaagaaaagcctaattaatttacattaaaattttaaacttctactcttcaaaaagcatttgaaaaggcaagccacaaactgggagaaaatatttatgaaacacatatttgacaatcaacttacattcagaatattaaagaaaaaaaaaaacccttgtaacctaacccaggtttagaatcttgaacagacactttacaaaagaagacgtacctatgaatgaccagtaagtacaggaaaaaatgctcagaatcattagcaatcaaattaaaaccaaatgacaccctactgtgcacccagtggagtaaataaaacttaaaatgttaagtcaaccaagtgttagcaaggatgtggagcaactggaactcccatatattgctgatgggarggtaaaatgggtaagccactttggaaaagttagcttatttcttataaatttaaacatccacttaccaattctacgtctaggtatttactgaataagagttaaaacatatatccttataaagacataaatgttcctaaccccaaactggaagcaatcctaaagcccatgagcaggcgaatggatgaacaaatgatggtgtatttaagcaatggatactgttcgtcactgaagagcaaggcactgctagttccaccacatacaacacatgaatgcatctcaaagtcattatgccaagagaaagaaagtagatgcaaaagagtacacattgtgtggttccatacataggacactttagacaaataaaatctaagctgtagttacagaaggcagatcaggattgggagggaggaagagggattggctgcaaattgacagggagttttaggggggatgatgcaaactatacctcagtttgctggtggttaccagatgtttaggtacttatcaaactattaactgtacatttaaaccagatgtattttattataagaaaattataactcagtaaagtccattaaaagtcattggtttattaaatgcatagtttgctgtcatcccatgaaacttgtctcccttcttccactcttgcccctctccaaaccatttgatcatcgtcaatacgtgtgaattagatcctgtcactcctccgcacaaagccctttagtgctttccattgcacttaggttaattccttaacctagcctacaagaacctgaataatttgacccctgcttaactgtaaccttgtgatctgcttttctgcgtactcacaactcacttcccatgctgacttytctgcgtttctcagtgcacaagctctctttaacccccaagacttcttagtgctcagtctctctttcaagtctcttccctttgcttttaacttcagctgtttatttggtcttatatgagatgttccttctcctttcatccctgaccacacagtcccagttaatcttgctgatgtactctcctaacaccctgtacttttccttcatagcatttatcactgtagctgcccttttatttgtgtttttaatatccacctcccccattagacaaggttctgtgaggactgagtttacactgctttgcttaccactgtatttccagtttctagcacagtgcctggcacgtagccaatacacagtaagtacctgttcagtgaaaaccaacagattttaaagagacagtattttaaaagcactttttaagttggggaactctttaagtaaattgtttccgtcgacaagagatttatgtgagaattgtatgctagcctcatattactgtaatacaagatattgaactcaggaatctcagaaagggattctgctgtggtctaataaagttagaacttctaaggctcagactattgttgtctatacagaacactcaaccttcccccacccctccaatttatgtcctactttttaagaattctgtttgaactgaaaacttggtatgccccttccaagcaccaggggatcttgaggaaatatattcttccaaagcaagaatctgtatcctcaaacatagcacatgctggccgatttaataagcataaaatcacccaacatattttaaatataggcagtctgcttgtactgctctgacatgcacraatttcattactaccatttagttatataacatcaatcccccagcaagatggttaaaatttcagcaaccatggtatatggtatattaactgtaactgaataaagtacacacttgactgccagctcttcagggcacaattcatcacataaataacacatgtgcaccacaagcagtaaccattsacttcatttctttcaagtctggtggtttgtcactgcatgtacacttcattacacagacagcaaagcatgtagttgtgttgyagtgctaaacccaccatgacattttacaagaatacataatcaaaagagggaattgaccaacagagaagaaagtacacaaagaaacaaaagtatatggagttatagaagcagcagctacctctgggaatgttgaccctgcagtcactcaagagactctagatattggaagctgatccaaacttagaaaggagtatgacagtttgccacaggacaggaaaaatgtcactctatattataagctatgcaatgagaagaaaccaagccctgcttaaacgactctttatatgtaatttacaaagacagaaaacattttaattctcaaagattctagtattttaaattatagtataaatattggttttactgttttttcctttcccaatacatgtataatattaataacgaagagggttttaaatgtttcaacaaaaatttttaagtgtcatggaacgattgtaatttttccattgattattaatattgttttgcacagtttgaccaggtacttttagtcttgcactactgcacaaaacaaagactgcctgtacttattttgggggttttttctttggttgttggggggtttttggtttgtttttgtttttagctttctgtagttttctgctaattaacacaatagagcatctctcttttgttttctgwgtttgatgctgtaaccagcttccttttattttgataataggatgaaggttattaattcctagctctctaagaaaaataatattccttttatatatagctgacaacagctgtttgagacctattgatagaaatgggaagcttctttgtccaggtaaatctttttgataactttcaaaaggtggcttatactcgtctgtctttcttgataaatagtggcctccaatacctaatatttaaaaattaccttttggaaactgatttataggacatattttcttccaggtatcttacctttatattgcagaaatccttaaccagaaacaaacacttctgttttctaaatgaaacaccattctttctgattatccgattctcattttactcacgggtttgatctagttatattttttccagctttattttcaaaatttttccatttttttgtgaattttattgcgataccaattatgaaataaaatcttcagttctcatctctgtatcacctcttaccattagatttaatttagtcatggatgagcctaattattgatggtaataacaatctcaactttaaacttggaagaagctacttcttcatttatggattgatttggattatctggcttttaatctatataaacaacagctctttgaacaagtcatttttattaagtaggaaactagactttcatagcttccatttagcattgttacatagaaaacaggaagacaatatcttaagagtatggaaattgaaaatcaaacctaatcttagtgcatgtaatccttttgtctgaagtgcaactcatttttcttctttcttgatattcttgattttcaaagaaatactgatttcagcatttatttttcttagagagctaggaattaataaccttcatcatattatcaaaatttttttaagtgccggacagctatactttgaaggaagcagaattgaagatgggaagttcattgggactgtgtcttggaaaagcaccaagttcgtctcaggtaaaataaggtcacctgtttcaaaacaaaatcaacccttccataaccagaattataactagtaccttagctactccagtaatattgtttttctctaaaagttttttcttaaatcatacattttattttaggaatatatccttatagttctagatgtttaaatataaaatattatgccaaagcatatttatgtttctttttctgtgaagattttgtggttaaaaggaatctttgatgctgagtggccaccactttcaaccactatatttcctaagttctaagatacaccttctttttctcacatttttacatctgtgagattaggttgcatcttacagtcagggacgttctgcagttatagctggcactggtacagaaaatagtaagtctaacactcagtagcattttaggttgaatgaaacacagtttattaattttagacttaattactctctgcactaatagtctcagagcagcctccctttccccttgtctttaacagtgtccattttcagtataaaacaccatcaggtttgacctttgccagaagccatacccagctaatcagcttattacagtgcagaaatcataaggatattcttattgtgaataccctgtagcagggtaatctggactcaaatcaggttgcccatggttcccaaattcacttcattactttcccaaccacttcccccttaacttgctttcccctgaaccgtagcaaatagtagtgcatgacaagctgataggagggaaaacatgacaagtgaggttgagttagaaaggaaaagcagggctatgaggaactgaataagagatcagatttgtatttttcctttggagtcttgagaattgtaatatttgaaacccttggcagaaaataaaatcataaccaagtgactcagaaaaaacatactaatgctaactgtgtgtagtaattacaaattccttttgggagtgatcgagacagagatggagatcatagtagaagaaatagtgtatgttggccgggcgcggtggctcacatctgtaatcccaaccctttgggaggctgaggcgggtggatcacctgaagtcaggagttcaacaccagcctggccaacatggtgaaaccctgcctctactaaaaatacaaaaaattagccaggcgtagtggcatgcacctggaatcccagctacatgggaggctgaggtaggagaatcgcttgaacttgggaagcagaggttgcagtgagccaagatcgctccactgcactccagcctgggcaacaagagcaaaactccatctcaaaaaaaaaaaaaaaaaaaaaaaaaaagaaagaaaaagaagtagtgtatgtgggagacatttattaggagtaaaaaacattgatgatgaagcaatttatacttctgggtaggcataattattgcttaaattgtaacattaatcatagtcgtattttcatataaattgagattttttgttaaagtttcatgggcccttggctttacatttttgaaagtaaataatacatttattggatttttaaattcagattaaattgcatttacacatctgtcttgttattagttgttcctgttttttgcaatggggagtgacgttcaacctgggacagaaatggraatcgtagtagaagaaacaatatctgtgagagatgtaagtaattttaccttttgttttcagaggctgtgtgtgtttgtatgtttgctgtgaggaacagtggtatcctgtsttaagatttggaggtcctaaactaggcctgatatggtgtacttcagagaattatatgtactcactagaggaattattttgggagcttgaaaattggtgaaccaactggatttttttttttttttttttttttttagagagtctcaactctgtcacccaggctggagtgcagtggcatgatctcagctcactgcaacctctgcctcccgggttcaagtgattctcctgcctcagcctcctgagtagctgggattacagttacctactaccacacccagctaatttttgtatttttagtagagatggggtttctccatgttagccaggctggtctcaaactcctgacctcgagtgatccacccgcctcggcctcccaaagtgctgggattacaggcatgagccattccactcggcctcaactggaaattttaaataagattacaatttttttctttctatcaataatagttttttattatagaaatgttgaatgtgcagaaattgattaaaagaaaaaaatgaaaacctatcattattctttatcctaccaatattaacattttggcatattttttctagtatttatatacacacacagtggtatgaatgtttgtatatatgtgtgtatgtgataaagtaaataattatattgctgttattgagaactgagacctttagtattggaaaacagagagacaaataaaatcagtgtggtttaaaaaaacctgttctcctgaatttgaaatagaaaaatctgaatgagcttcatatattttttcttaaaaaattttttttccagctctgtcccctgatacaggttggaaagagtgaccaacctggtagcagcagagtacccctggcacccagattatggctgccaaataccattttctacaaacaggaaccagggcatcttagaataatggctggttatatatctaggtcaggaaataagatgagcctgaaacatcttaccatcacagaaagcagtgaagccgctatccaagaccattggaatcatcaaagagattgaggagcccactagtcaaagatgagacaatttgaacttgactgagaaaaataataaaaattaattgaaacaagtacataaaatctgtaaatctgtgagttcataatgatcctatacaaaaatgtgcagttacctataatggatgctaggcaatcataaaggtaaaaaataaagcattttttttcctgtttttcccttgcaaactatatcccagggtagctaagcagataatgataagttttatttataaacatattccaactaataaatgaaggcattttagaattttacattttttcaactcctaataaattaatgaacctaggcaaggatcctcaaagattgctagccccaaaaaagagcaacactcagacaacatagaaattcagaacaatacccatgcccttattgcaaaaaaccaaacaactggacctgaatctgaataagcctctaggtctaattaccaatttataggaaatacaggaggcagaggaacaggttaaattcatcacaggtctgcaattagccaaatgtagatcagaaaactcttctacaaaagataaattgcaggggacaaggacaacctataggtcaaaagaggcttaaaagacatagcaaccagttgcaatgtatggacttctttggaccctaactcaagccaaaggaacttaagtaataatttaagagaaagtagagaaatgtgaacattagttggatatttgctggtattaagaaattcttaattttttagctgtcataatcattttaggtttttaaaaatatcttttagagatgcataataaatatttacagatgaaattatatatctggcatttgcttcaaaaaattctgggcaagggcagggaaagtgggttattgacacataaaactggccatggcaatatgagttgagcatccctgatcccaaaatccaaaatccaaaatgctccaaaatctgaaactatttaaaaaaaattaaattgacacgtatttatggggtacattttaatattctggtacatatatgtgttgtataatgattaaatcagggtatttagcatactcattacctcatgcacttagcatttcttggtggtgagaacattcaagagcttttctaactattttttaatatacaatccttactgttaactatcatcaccctactgtacaatagaacactagagcttattccttctattagattgtaactttgtacctgttgaccaccctctcccatcctccccttacatctccccctcagtcactagtaactgctgttttactctctgcttctacgatgtcaactctttttttttttttttaagattccacatatgagtgaggtcatattaccgatcagcctttctgtgcctggcttcgttcacttaacatgatgtcttccaggttcatccatgttgtcacaaataacaggattttattcttttttatggctgaatagtaccctgttgtgtatatataccacattttccttacctattcatccactgttggatgcttaggttgatttgatatcttggcgattgtaaataatgctccattaaacatgggagtgcagatatctctttgacacactgatttcataccctttggacacatacccagtaatgggattggtgaatcacatgatagttctatgtttatttttgtgaggaacatctgtactgttttctataatggccgtactaatttacagtctcaccgacagtgcataaatgttcccttttcaccacattcttgtaaatacatgttttctcttgtttttttratagtagccattctaactggagtgagatggtacttcattgtggttttgatttacatttcctttatgatttgtgatgttgagcattttttgtgtgcgtacctgttggccatttgtatgtcttttgagaaatgtttrctaaagtcttttgccaatttttatatcaggtactttttttttgctgttgaattgtttaagttccttatataatatattccggatattaactctttgttagattttttttttaagacagtctttctctgtcacccaggctggcatgcagtggggtgatctcagctcactgcaacctccacccccagggctcaagtgatccttccatctcagcctccgaagtagctgggatcgcaggtatatgctactatgcccagctattttttttytttttttttttttgkattttcggtagaggcagtgtctcaccatgttgcccaggctggtcttgaactactgaactcaagtgatctgcccatctcggcctcccaaagtgctggtattacaggcgtgagcaaccccgcccagctccctttgttagatttatactttgcaaacattttctcccattctgtaggttgtctctttactctgttgtttcttttgctgtacaaaagctttttagtttgctataatcccatttgtctatgttcttttgttgcctgtgcttttgaggcaaccaaagcttattttaaaaattcttgcctaatccagtgtcatagtgttccccctatgttttcctttagtagtttcattgttttgggttttacatttaagcatttaaaccattttgagttgatttttgtatttagtgagagttagggaatctagtctcattattctgcatgtggagatccaattttcccagaaccatttgttgaagagactatcattttcccaatgtgtgttcttggcacatctatcaaaaattagttggctgttaagtttgtgaatttatttctgggctctttattctggtgctttggcctatgtgtcagactttttgccagtaccctgctgttttggttacttttgctttgtagtatattttgaagtaaggcagtatggtgcctccagctctgttctttttgctcacaattgctttgactatttgggtttttttgtggttccttatgaattttttcatccttgggatgaataccacttgataattrtgaatggtctttttaacgtgcttgttaaattcagtttgctaataccttgttgacagtttttcatctatgttcatcagggatattggcctatagttttctttttttgttgttgaatctacatctggtcttggaatcaggataatgctggcctcataaaatgagtttggaaatattcacaacttttcaattttctggagtagtttgaggagaattgatattctttaaatgtttggtagaattcagcagtgaagccattaggtcctcagcttttctttgatgaaagactttattactgaaagcattttctcacttgttggcctgttcagattttctatttcttcatcatttaatcttagtatattgtatatgtccaggaatttatccatttcttctatgtttttaaatttattggcaagtagttgttcataatagtctcttatgatcctttgtatgtctgtggtatcaattgtaatgtctgattttcatctctgactttatttgagtcttcactctttttttcttagtctagctaaaggtttgccaattttatctattaaaagaaccagtttttaattttgtttctcttttgaattgttttgttagttcctattttgtttatttctgctctgagctttattattcccttctgcttcttttgggtttagtttgtccttatgtttctagttccttgaggttcatggttaggttgtttagtagaaatctttcttcatttttgatctaggcatctattgctgtgaacttccctcttagaactgtttttgctgtatcccatgggttttggtataatatgtttctattttagtctcaaggcattttaaaatttccctcttactttcttcattgacttattggttctttggaagcgtgtttaatttccatgtatttgtaaggttttcaaagtttttctttttgatttctagttttatcgtggttagaaaaaatacttgatatgatctctgtcttgttaaatgtattaagacttgttttgtggtctaatgtatgctctatcatggataatattctctgtgcagttgacaagaatgtgtatcctgcagttgttgatggactgttctataaatatctgttagctccgtttggtctatggtgaagtttaagtttaatgtttctttgttgattttctgtctcgatgatctttccattattgaaagtgaggtgttgaagtccctactattattgtattgcagtcttgttcccctagaggtctaataatattagctttatatatttgggtgttctggtggtgtttgcatatatatttacaattgttatatcctctcattgaatccctttatatcattataaatgacataataatgatatatagtgattatataacaagttattatataatgaccttcttctacaatgaccattatcaattataatgaccttttacagtttttgagttaaagtctattttacctgacataaatgtggctactcttgctcacttttggtttctatttgcatggactatctttttccatcccttcactttcagtctatgtttgtctttaacagtgaggtgagtcttttttaggcaacatatagttgggtcttcttttttttaacccattcagtcacttttatatcttttaattgaagaatttaatcaaggttattattgataagtaagaacttactcctgccattttgttaatcgttttctggttgttttgtagatctttttcttcctttctggttgtttacttctgtggtttgatggttgtctatggtgctaagctttgtttctttttcttatttgtgtatwttctgtcatgtctttctttgtggttactgttgcactaagatagagagtcttgtacttataatagactattttaagctgtatccaactcacctttggtcatataaaaatagtctagaattttttcccttccctctacaatttatatttttgttgccttaatttacatctttattgtgtccttagccactaatagtaactgttgttgtttttggctattttgactttaaaccttcatggaagaggattgataaatttatatagcaccattgcgacactggggtattccaagtatgattatgaatttacctatacttgtgagttttatactttcatgtgttttcatgatagtaattatcatccttttgtttccagttgtagtgctcccttaagtattttcttgtaagattggtctagtggtgataaattcctttagctttttgcttatctgagatttatatctcgcctttatttctgaaggatagctttgctggatatgatattcttggctgacagtgtttttttctttcctatattacccccattttcttctggcctgcaaggtttctgctaagaaatccactgatagtctactggggatttccttatatgtgacttaatgcttttatcttgtagctttcagaattctctttttgtctttaacttttgagagtcttattataaagtgcccaaagaggatctttttgtgttgaatctaattggggaacctgtgagctttctggatctggatgtccatatctctcctggacttgggaatttttcacctattatttaattaaatagatacgctgtgtcttttgtcatttattctccccctggcacttctacaatgagaaaacttgttcatttaatggtgtcttgttggtcctgtaggctttcttcattctttttaaattgttaattctttttattcttctgactgggttatttcaaaagacctgtcttcaagttcagaaattctttctctgatgaatttctgattcagattatgaatgaatttttctgattttgttgaattttggattgtctgtattctcttgtttatgagtttccttaagatcattgttttgaatttctcttcaggcatttcataaatatacttttcttcggggtttgttactggagacttactgtgttcctttcagaatatcatctttccttggcccttcatatttcttgtcttcttatgttgatatcttcacatttacttgaacacttactttttccaattttatggagtagctattgtagggaggagctttttcctatagatggattctagggtgtctgttggaaatgatgtgttgttggctttggttcttggtgggctcagtagcatgatccctatgccagttcttcagctgtaatcctcattaatgatgtgtgcagttgcctcaatttcctaggttacgggtgtttgtgacagaggtgacatggtttggtggaggaaaggatgctggtttgtgctgctaccaagcacaacctgagcatagctgtgtgttggtctctctggggagggggatactgccacacttgctattgggctgggtgcaaacatgtgtgggtcaggcagctgtgcagcgctctctctggggaggcagggccactgccagattgcaaaatccaaaactttttgagcactttttgaccctttgacatgacactcaaagaaaatattcattggagcatttcatatttagatttttggattgaggttacttagctggtaagtataatgcagatattccaaaaattttttttaaatccaacacttccagtcctaagtatttcaaataagggatactcaacctgtaattgggactgggtgatgggtatttgaggatcattttactattttctgcaggtattttcccagttttttactggcctttttaactttacattttttaatttcaaggaaagaaaccacaaaacttttcaaaagtgatgtatcttcctttctgtactccgttgaaccccttgcaggcagacttgttccttgctatgtcactgaaacagcttatgtcagggtcattagtggcctccacattactatgtccagtgagcagtttttactcttcatgttacttgctctatcaccaacattcgatgtacctgatgactctattctttgaaacacttttgtcactgggctccagaagaccacaactccaggttttccttatatcccactggcctacccttctcagtttgctgtctcctcctcttctctatctttgarcattctgctgcccagttcttagattggacctcggcccagaacatccagctgccacttggttgtctaacaatcatccaaacctagaacatattcacagtaaagctcttcttattctccctgaaacataacccgctcatatttttctctttttcagttaatggcaactccattttttacttgcttaggctgaaagccttgaagtcatccttgattcttctctttcttacttcacattcagtttcacaaggacatcttttggttctaccatcaaaatgcatctaggatctgaccacatctcattctgttcattactaccaccctgtcaaacctgtcatctttttcatctgaaatgaatttcatccatcagcttcctaactgatctccttccttatagccttgcacttcccagggtctgttcttataaaaagttgagtgatcctttaaaatgtaagagagattagtcactcctatactcacaaccctcctgtggtttcccattttacccagagtaagaggtgaagtcttgaatgtctgcacaagggcctatgtgatctggttctctggtatcatttttgttatattttcaaacctccaaccatttccccctcttactcactgtgcttcagccacactggccttcttgctgtttctgaaataaggcttttatgctctctatttccccttcctaaaacacaattaagttgattgctcaattgtttgattgtttttcttaaatacaatgtttaaggctttaagttttcttagaatataagcttgctttcattcatccaccatattttagtatactgtgtttttatcatcattttctaaacaatctataattatattttaaagccttattttttgtcatacaagtaatcatggatttcttctcactttttaaacttctaggggattaacaatcccccttggttaccactctattctagtcctttctctagaagtcactgttgcaatcagataacatcatcttatccacatcagcagagtatgtgtccctccagacctttgctgtgcctataccagcatgtgtctatatacatacatatagaaatgaagagtgtgctttgcttctgtgatttcttttaaattataaatgggatcactttgcatgtattatactagaactttgtttcacttaaaatattttaaagatcttttaagaccaatatatatgaatctgtttttttctttgaactgctttaagacatttcctactttttaaaaaatctcccattaatgtgtattttggtggggttttttttgccatttttcttttattacaaacagtacagcagtgacttccttatttttgctctcttttgctctagtgtaatagaaatcaaattgtatttgctcgcttgtccaagatttaattagcaatgtttttccctcaagaaattgttttaattactatttttgttttatttaaacttttgttaatattgtctcatttttgcattatgccatgacatcacagcttgcacaattcttgtgagtttttatatttagggaaaacggggaaattcagacagtcataaagagaagagagaagggagaactttccccaaatgctatcaatctcgccttttataggattcagagtttaatgtctatgaarttaacttgattaatcatatctggccaaagacacacagttaatccttacaggaagaaagtcatggttcaaacctgggagttggtggatgaaactttgaactaagtcctgcttgcaaacaccagaaactgctttttcctcttcctgaattggccccatctagcctttagaaaggaaagctgactcgtgtattatcttcttaactatgtctatccttgcctattcaagaatcattaaatatagtcagacttaaataggcctagggtccaaaaagggtgtttgtcctagaactgtaactcagaaacagaaaactaacattggacattgtttttctttacagtgtttaaagttaatgctgaagaaatctggcctacaaggtaagttacttaccatgatgacatattacttaaaagcctaataaaaatttttttgactttttttttctccagggttgtaggaaaaaaaaatttatagggtgtggagaaataaaaagtagtttacacttccatatgtacataatgaattctcctggttcttgttggcatgctgaaagaaaactaatggtatagctctgagtagagaatttagataggatccagcaaaggtacaaagtaggaatgttttacagtgttggtgggaatgtaaattaggtcaaccattgtggaagacagtgtggcaactcctcaaagacctagaaccagaaatgccattgatccagcaatcccattactgggtatatacccaaaggaatataaagtattctattataaagatacatgcacatgtatgttcattgcagcactgttcacaatagcaaagacatggaatcaacccaaatgcccatcagtaatagactggataaagaaaatatggtacatatataccatggaatactgtgcagccatagaaaggaatgagatcatgtcctttgcagggtcatggatggagctggaagtcattatcctcagcaaactaatgcaggaacagaaaactagacaccacatgttcttacttataagtgggagccaaacaatgagaacacatggacacagggaggggaataacacacattggggcctgttggtgtatgggggggtgggagtgggggagggagagcatcaggaaaaattgctaatacattctgggcttaatacctaggtgatgagttgataggtgcagcaaaccaccatggcacacgtttacctgtgtaacaggcctgcacatcctgcacatgtaccccagaacttaaaataaaaagaacgctaagatgtataccacctggagccacgcaggtcttccactgattcctttcaattttattgattccaaatttcagtgcattctgtttcatgtcagtatttttgtggtatagatgacggaatgtaaaatgaatgaaaaaaataaatctaagataactgaagcaactttccaggtgagatcatgtcagtgagcttgatgagacctcattctgatttcagtagcacactttgctgttctcagacttcattaacatggaggcccatagctttattatctggaaaggaagttaaggtgctctgggtgcaagacattcttctagaagttacacgcaaygtctcacctaactttgaattttttttatcccaattttgactcctttataggagatgcctggcatttacgaaaaatggattggtgctatgaagctggagagcctttatgtgaagaagtaagatgatttctatacattgtactttcgtatrattacatttrtgtcatattttcgtacaaggtacccattccactcatgagaaagctttaattactttctataggatacaaatatctatgaatgggtctattttacttttttcttactatagttttttgataaaggggaagtcacagtgcagtgggaacatttctgacatctgtggtaaacccccttgccatgagagtatgcctctaggaggagcagttcatgagaaggcagagaacttcacagaacaaatgacatttgagctcatgaaggaattttatagatacactctgaagttttggcccctgaatgttttgatctcagagtttctctgtaaggtaatggtggcagaatttcttactaaccattcctaagttaggctttggtccaaactctcgatccagccaaactgttagggtagccttaggaataattttatcacaggagagttggaatctagttggtcatcttgttggtccaaatagcatgatatttcccagttcaaatgmgtagccttagaagaagacccaaaataaagctctgtggggagtctgagggagctgtggtcagccgccctttccccagtcttcacctgcctacttcctgttctttaagaaggggcactgaatgccagcagaaggttgatttagggaggtatgctggggccttgccctggaatgctctttgctgtttagcagtcagtaagtcaatagcaagaggcccctcttggggcctgggcaggagtttgactgcctggagtaagaagtggacctcaaagcatctttaggacataaaatttggatgtcagaagaatatatttacccaaatagcttcagcattttcttctctattaattcccaaattggcatcaaagaattcagccagaagccaactcattacccttggaactggcttctcgttccagccttgccaggtatctttcccatcctaatcttcaagagtaaaatatcctccttatctttcattcttcatgtttcctctcagcctccaaactgtcagcttttccaccccttccctgaccattcccatgcttggctccaggtccaagccttcgtatgcctctcacctaaattattatggctttcctgggcccaggcgttccctgcttcaatgtcatgcatattgcagccagattgatctggaaaatctcctcagaaatcttgtgtggctcctttatttctattccatgtcctgtggttagtgcctgcccttccagtccggtgtgacctcctggtactttccactcgaatcagtgtggctttagcgctttaccaaaacaagccatatttactatcaaccttaacttagcccttgtcctttttttcgtgagaaattccttctgttattttctctagctttccaaatccaacccatctttttaggattaattaaaatttcatcttctgtaaatcagtttctcatttctcatctcatctaactcccttgcctcagttcttctgtcagacttacagcttatgccccacaatttaacaaataatgctgtactgattttatagtcttagcttatttcctgtgtcttccatatctgctttattattcatttaatttttgaaaagataatagaggcatggggttttaaaaagatcaatgatctgctcctttcagaagtcataagtgacaaaaaagcatttttgtcttcccaggatgcaacactgaaagaacttctgatatgttctggagatactttgcttttaattgaaggacaacttcctcctctggtaagattttacttctgaatagacaactcktaagtaataattgttatctgattacagagatgatacagcctcatttagggaaaatggggaaattcagacagtcataaagagaagggagaactttccccaaatgctatcaatcagatatgtttcctaacttgtaaatattctcacacaaaattaaaatcaattatatgtaacatttttatttcctactttttatatttgacattttaaccttctcataaaatccaaaaataatcatcatatccaaggtaatgttttactaatttaattgatctatatcctcattgttggaaacttaccgtgtttttaacattttgtttttataaatagtactgaaataagtccttcagaaaatagttctaaatgtggaattcctaagtccaaaggtgtgacctcttgaaagccttgatgttctatgcagtagcatatgagagggctcatttcactgccctttcgtaagcatygcatagcactactttctaaaaccagtatcgtttcttttaaactgaggatgcacgtaaaagtgaacccaaaagagaaacaaatggccccaaactccaagactcagataactgtttgcttatgattagaaaagtcagacagtacagaaagcttgaaatgaaaagcagaaatcactcctacaccttttctctgcagagagagccacagttagctgatttttcctcctgtatccttctaagaaaaacattacacatatttgtttgctgaaggcaaatatgtgcatatcctttttaatgtattcgctacattgttttacacttgttttgtttgcttttattcacttactgtatcttgcggagctcctcatatcagcacatacacacctaccttattcattttcgtaactttgtagaattctattatattttgtacaatgatctttaaagttaatttttgaataggcaatactcataatacaaaattccaggtgttatgaaaagctgggccaggaaaagcaagtgtccctactgtctctgggtccagccacccagtgtcctctccccgacaggcagctgcttttctctgcatccttccaaaggcctttgctttttaatatacacacacacttgcacacactgaagtgtgctagcttttcccacctcattttttgttactgaagaattttaataggtttattaagagataaaaggtaggctaggcacggtgmctgatgcctgtaattccagtactttaggaggccaatgcaggcaaatcgcttgagctcaggaattcaagaccagccttggcaacatggtgaaaccctgtctcttttcaataaaaatttaaaaagtaaaaaaaaaaacaagaagagagataaaagatgttactgttacaacacttaatttcaaacaatagacaatgacaatgtgaagactaaccatgtaaaatattttaaatacatagttcaatgtgtatatacatagcatatatatccacacatacacagatttattcctttttatttgcacaaaagattatttgctaggcaacctattctgtacctagatttttttcattaatattttatctcctagtgtatgctgtgaagctatctcattcaatttagtagcttcataatactccattgtttggaggactataatttatttaaccagtctctttttgaagaatatttaggtcatttccagtcttttgttgatacaagtaacaatgtaaaaaatatatttattttatatatttatttatttatttattttttatgtgtgtgtatatatatatatatatatatataaatatatatatatatatatatatatatatatatatatatatgccattttgcttgtatatgagtatatctacaggataaattcctagaactgaaattgcacagttttttttttggttttttttttttttttttagaaaggatctgactcttgtcacccgggctgaagtacagtggcatgatcatagctcactgcaagctcgatctcctgggctgggactacaggcacactgtgcctggctaatttttaaacatttttttatttttgtcttgctttgttgcccacactgatcttgaactcctgggcttaatcgatcctcccacctcagcctccccaaagtactgggattacagctgtgagccaccaagcccagccaaaaatcttttaaagagggtccttgaagttggttcatggtttttggtcccataaacaatttgtaagaatattcttgcatatgtggctttctatgcatgcactagtatatcagaatgtaaattcctaaacgtggaatggctgggtcaaaggacttgcacattttaaaatatgacaggtacaggcaaattattctacagaaacttctcagcagtttatattcctgctaccaacttacaaatgttcaagtttacccatattttcaccaacataattttctggtttttgacagtctgctaggtgaaaaaaaaaaatggaattttgttgttctgatttacatttatttaatcgaatgaaggtcaaatatttgttaatcttcactaatctgataaacagaaaaatattctaatgcacatttcttgaactatctatttaaaatgttttaggtggttaatttttattctcatcttctattgttggaaattaagtgctgcaacaatagcaccttttatctcttaataaacctgttaaaattcttcactaacaaaaaatgaggtgggaagaactagctaaataagtaaaactgaaattacagggtatgtataagacaatgggtttatttcctttagtttgtatcagaaacccattagatcaatgggctcttgcatctgtgtgataaactgcactgctgggactggtatcctgggccagcagtgcttggacagcgcctggaaacgctggtatagtgtgttcaagcaaatgcattgttcttgtttatgcttctcatttatattatctactaagatacctttaagcaagggatatttagtccagtcaccccaaagtctgatttttatgattttaaatttttgattgtaaaaacaagtataatttatgacagttaataaatctaaaaggaaaaatgataagttcaagracatcttaggtcatcaaggtgtttctttctatggaagtaaaagtagagtttcacttaatctttgtaatcacagcagttaaacatgctccattcttcagggtttcctgaaggtgcccatctggtggtaccagcttcagggtccctcaggacactgggagagtcatcaggaccagaccaactgtacttcgtcttggggcagagtttggagagccacttccagccaaggtgagaacagaatgggatttcagcagccagtgcatcataaagagaagtaaattgactgcctgtgctctgagagtcaattgatatatttatttttaaaacgtaagatcttgaaaatcaagacctattaatttcataagtcattccagacatcacataataataacactgtgccatttctgtacgtgctctgtaacctctgtaaagcactatatatcttgttgtttattattatatcaatatattacactttccaaagacttttatgtatcatctctcaagatcctcagggcaacaggggccccatttatcaccacgtaccagaatattgagacttcatccaattctaatgatgtcattttagcccacaggggcagagaccaggagtccacatcctacatgtcttccaatctttctgcctcaaaaccctcaggaactgcttctagggcatttgatatcatctcactgacttctgagaaggaacatagacaagtacaagcatgttgtcttactcagcactcagccgcacacatcacgatgggcagaagtcactatcagtgagttctgttgcccttgtacaaagaggagttccacttcattataaagaaatggagcgagtatatttttaataggcccaactctttagctatgtttttctttttatcaggctttacttatttagtttttctagtgccttgaagtatattacttatatttctttttaatcttttcagcctcagtaataaaattaatataaatgagtcaaattcttatctccttattctttgaagttaggattatatagagagagtaatgttgaatgagctataaaattggcataaagttactttttagttgggttacagtagttcatgttaactaatgctaaaaatgccttggtgatagaattctagttacatatagaattggatatagattgtaaaagcatgtttaatcagtatgtttctacgtgaaaagtaaataaaaggttctttttttggtaatacatctgtacacaacacatgggaaatgcactcatgtgtcacttaacaacatgaatatgttttgagaaatgcatcgtcagatgatttcatcattatgtgaacacggtagagtgatttacacaaacctagatggtagagcctcctacacacctaggctatgtggtgtagcctcttgctcataggctacagacctgtacagcagcttactgtattgaatactgaaggcgaatcataacacagtggcaggtgtttgtgtatctaaacagaaaaaggtacagtgaaaatacagtattataatcttataggatcacatcacatgtgtggtctttgaccaaatcattatgtagcaggtgattatatatttcattctttagaatttcctaaaattatctttccggtagtgtcagcctgtaatttccttaagacacaagaggaacttctcatgcacttagttgacttctaatctctctgtaatttcttgctatgcattagtggcatgctcagcagtaaagacagttaaggcaaaaataagtgaagacagtctaaatttagttgccagcttttatattgtttttgatgagaaagcattgtgtttttccctttttttaaacaaacttggaaaggccttcttattgtcaagatttccttataaataaacatttattgggcatttactatgtggcacccattgtaccaggaactkgggagacaagatagatggcctgcctcctcttgaaaattctgttgttttgaggaggcagattaaacgcctgcacacagacagacagacacacacacacacacacmcacacacacgaggaacaggttgggatgagtgttatgatgaggaaacaggaagctaacatacagaatgcagccagcatatcctacccaaaaagtcctctttgaggaaggagagaatgtggaaaagtacattcaaggtaggggcataagtgtcacagacctcttgggagtctgccgacaacatgtccctgcctgcttacctgccagacagggcctcctcataagacttggatgcagaggctcttgagtggaattttaataacctatttacaatatcaaarcatggcaatgtatttcagaaacacaaaataagtttcaagttccttgtaaacatcccgctctgtcctttggaaggtgcttctgggaacgagcctgcgcaagtttctctcctctacttggkagacatagagatctcagaagatgccacgctggcggagctgaagtctcaggtcagactymttcctgcaccataacttagtggtaatgtggcttcttccagtgagatattaatatattcttctatctccttttccctcaattacagtctgttctgatatggcatttgtcatatrccatgttcagtggtaagtacccgcaggcaatacacgcccatggtgcagacggctcctcgtggcctcactggtccctcctctgacaggcatgctgtgcttttgtttcaatctatcctcagtgacttgcggcttttgttcatttttatttttttagggaaacatggtttcttggaacatttgtaaagcattcactttatccctttatttacattgtttgtgtaccattgtgacccatatgttaaatgttgttatgaaaagctgtgttaccagttttccaggaggttagaactccagcttttatgttaggatgctaaactagatattctaggtattgtgttgtttcttatgcattaacgttcacagagaaggagggttttatccaaatggaagggctggattaagcacaatgcagtgttgaagcagcatccgcctactgttggactgaaatgagcattcctttcttctcttagaggagaaaatgtggggcctatatatgactagtggttgttgatgtttggcttttgtgcgccctcagtatatgaaatacccttcctcaagaaaaagcataygttggctgggtgtggtggctcatgcctataatcccagcactttaggagtctgaggcaggcggatcacttgaggtcaggagtttgggaccaacctggccaacatggtaaaaccctgtctctgctaaaagtacaaaaaaaaaaaaaattcacctggcacggtggcaggcacctgtaatcccagctactcggaggctgaggcaggagaatcacttgaacccaggacagggaggttgcaatgagctgagattgcgccactgcacttcaggctgggtgacagagtgagactccgtctcaaaaaaaaaaaaaaaaaaaaaggagaaaagaaaaagcagacagccttattctcatgagaacaaatgggaaaatactttttttttctcatattaagttgaaagrtataaaattgctgtttttaggtcaaaaaatggatgaatattggtaattttagaggctccaacctaagtatatcagtaggggcttaaagtgatcccttcagaattagaacaagcagtttgggcctactgattgcagccaaarattttgaaatacttcagaatcaaaagctgattcatcggcagagcagacactggtggaggattgcgcgggcacggaagaaggctgctgttgtgtcccttgttgtactgttagagcgggctctgccctggtgaattctactcccatggaagttaattccaaagtttcaytttttaaacatgatgattaaaaagaagcttttgactcagatttagagagagggaactcacttctttctcaaggtgatttcagtgcagaggaatatgaagaccgctcagggttagtgttatttaagagagagagagattcctgtgacttttaaaatgatgttatcattacttgagatactctttccttgagatgccactgtgtagtgcttcattttttttttctaaaacagtatgttttgaagagtgctttttaaaaccgttggagaaatgtctgtttctttttctaggccatgaccttgcctcctttcctggagttcggtgtcccgtccccagcccacctcagagcctggayggtggagaggaagcgcccaggcaggcttttacgaactgaccggcagccactcaggtaggttccttgctggacgcaacactgtccctctctgctgctgacgcactggctggtgtgagggatggaggaggaatcagtcttctgagctgagtgacaacaaagcccattcctggtcatgccacgcttgtgacttgggtgacacttttcatcataaactccagcaggccttcagttttccatgttaagtataaatgtagtgttgtatattttttctgtgctccagtgactgtgacattatataacttaaaagcatttggagtgagatggaaagtaggagtggctgtttctcactcagaaatgttggattcagctgatcctcctcctgaaactttgaacttaaagagcaggtttgggtcatttcctttgcaaaaagcagccttgaggcyttttgtytctttctytctcgtttctttcttttctytctttcctttctttccttttctttcttttyttaatagacagggtctggctctgtcgcccaggctggagtgcagtggcgtgatcatggctcaactacagcctcaacctcctgggctcaagtgatcctcccacctcagcctcctgtgtagctgggacctcaggcatgtgccacgacaccaggctaattttttgttttgacgaggtctccctatgttgcccagtctggtcgcgaactcctagcctcaagcaatccttccaccttggcctcccaaagtgctgggttactggcgtgagccactgtgcctggccaaggctgcttttaatcggttctgattaccaccccaaagtgactggcatgagaatcttaaccccggctgaacagagggaaatttctttggcagtttggccatcttcccagagccagacctacatgtttagtaagaaatgactcaagtatctaaataatcaccgcagcaaggattctcattttttccccttttccaaaagtttgggtgttcttataagtactcagaaaacaattctttgcttaagaaaaaagcttaaaattgggggaaaaaaaattcaagaaaattaaatgttatgtcactcaatattatcttgtttcacttattatcagggaatataaactaggacggagaattgagatctgcttagagccccttcagaaaggcgaaaacttggggtaagaaattctcctgtgcatctgaagtgacacacacgtatcttaacctcgtttgccttttgaagctttaacaacttcatagtgtagcatttttttcactgcttctaagtagcctagcaacttgaaacagagtgtgtgctagaaatatgtttgtatgtctgggcatctaaaacttgggacttattctcccataaaaacagtaagggagaattaatttttcagtaatcaccaggtgcatattgaccccatgatggccctgaagtgtcagcaagaggcccacccgcagctgttgtcagtgtgttcggacagtctgccatccaacggattcatcattgctcccgtygctctgcccccttattctactttcttcatcctagtatcacctgacatatctgtacttactgatttatttgttagtatctgtctcccactactagaatataagtacttggtttattcattgctatatccttaatacctagaatagtaattgtgcccatgtcatagtcaataattatttattaaataaagatacacccaaaattgtctacaatcaaaccatcttgttcttttttcgctgtaggaaaatattttacaagtccttttgtaaatatcatgaactattaagatttgctctacctattatgatatgagtatccttcttgtggtctgcttgttatatgagaaagttatctttcaaccatgtctaacatgtatttaattttagtgtttttataaaaacacattcttaatacaagttgtacaaccagaaatagtttcctggaggggaattccaggatcaaatggtgtggacattttaaacctcttaaaatagttaaatatttcttcaggcaagttgttccagaatatgagtatttattttacctcacccacaaaccagcattgactatttcatcgtctaggtatttcctaaattgataaatgaaagatgattatcttgttctcatattctccagtgctttgatgactaataagttcaggcatttttgcaaactgtattttgtgagtgcatgattgagttatttcgtgtattttgactgcttctgtaatgaagtctaaaggaaaagctctcttggaatttgtgtgagctctttatgattttgaccctttgtcacaatggttgtaagctgtgtcaggttttgataggcacagtgccttttgcccttttgaagagcagctgtgtgcctcctcaggccccttccatgggctyttctgtccttgaccaacttccagggcactcctgctctcaaggaggcctctagtccctcctgtttctctccagcagcctctgtcccctccttggcaacttcagcatctgtgccgatgccctttctgtcctctggccgcactgtgctgggctccaggccttggcctcactccctggccagcagccccctcccccatggggacatggggctgtgcagcctctgctcttgcactctgcactcccctgattccatgggcccacatcttcccgtgaactctctttcttccagtcatttcatttctcattgcgtgacctcttttgatggtaaaaacacttaatagaagtacatctaaaaatcattcattgtctcagcatcctaagaaccagtcttcatttccccttgctgccttccagttcttatctatagcttttcctccatggcctgtgctgacctctgcacgtccctgttcctcctgccttgctgagtgttgttctttstgctcctcctgctaaggtttcccatctcccacagctgcagccttgtgtctcacccgccctgtgtctctcttcccaattccaaccctcaggttcttctccctggctacctcatggcagctcacatttacagcccccagagtcaagggcataactgcctacctcgagcccgctctcctcctgccagctgccgggctatcaagccaggcctctctcaccctgtccctctctgccacatcgtacctgctcaggccgccacctctttccttttctcccgcactgaggaagttccctaccacgtctggsggggctctgctgtgtaccragaatgggatcttcacttccgctcttcattccaagattaaaggaaattgaaatgcggaataagagtttgccactagcatccagcatttagggaaaaatctctccttataaaaaccagaaaagctggaggagaagctttgcccattatgcctcaagttaccacgtggttttgtttgtttgtttggatctggcgcttgacggttttctggtacagcccccaggacgtgctgctgaggacacaggtgcgcatccctggtgagaggacctayrcccctgccctggacctggtgtggaacgcggcccagggtgggactgccggctccctgaggcagagagttgccgatttctatygtcttcccgtggagaagattgaaattgccaaatactttcccgaaaagttcgagtggcttccgatatctagctgggtaaagttgtggggctgtctcagagaaattggggcttaccggcatagcaatgaggttatgcaatttttcacagtgatagagaakttagtgagaacttgaggttgagttttgcttatttaagatgtttgattttcccatagaaccaacaaataaccaagaggaaaaagaaaaaaaaacaagattatttgcaaggggcaccgtattacttgaaagacggagatactattggtgttaaggtaagttgtttaacagcaaatttaccactttgagaagacacgagggtcacatgattttatagagacgttttattgaatcttcaagacacagattatcccattttatacaaattgtttcagagaatggataaaaaagagggaaaactggacaactgactttacaaggccactgaaacctcagtatccaaactgccaaggacactaaaataaaatacagaccagtttcacttctgaccatacatggaaaattctaagtaaaatactagcaagttcagcccagcaagtatgtttttaaaaacactactgtgtgacatgacgtcacagtaggttatccaaggaatgtgaggagggcagcgtgaagaatagattatgtaagaaataatcctgccagactcaagagatgcagaaaaagcataaaataaaacttattattaaaaacccagtgttcatgactttaaaaaagaacttagagcaaactaggaatagaaggaaacgccttaacctgatgcacatatacccaaaacctctagcagcaacactgtgccagcttcaaaagcttccattttcattaaagtgggacccaaagtaaggattcccctaaccgccccttctgtttaacactgtactaaacaacacgggcaatgaattccctccctcactgccaaaagaaaagtaaataaaaattgaaagagcagtaaaagaaatttgaaaaggaaaatataaaaccgttcttacaaaggagattcaaggctgggcacggtggctcatgcctgtaatgccaacactttgggaggctgagatgggtggatcacttgagcccaggagttcgagaccagcctggacaacatagtgaaacctggtctctacaaaaaaatacaaaaattagccgggtgtggtagcacacacctgtagtcccagctactcaggaggctgaggtaggaggatcgctagggatgagctagggaggtggatgttgcagtgagccaagatcgtgccactgcactgcagcccaggcaacagagatcctgtctccaaaaaaaaagaaaaaaaaaaaaaggagattcaaaagactacacagataaatgattagatctgatagaggagttcgaaagggtccaagatcagtataaaaccttctggagaatatacaaaaacatacttagcagtgttaaagaaagcttctgttagagccacgtcatgttcttggaaggcaaacctcacaatagtaaaggtatcagttcttcccaagtctgtaaattcagtgaaattccaatgaaaatccatatagattagattaaataaaattaatagcataaattcgtacactagagcaaagggccaaagagctaagattttcttttgttgttgttgttgagacagtatctcgctctgttgcccaggctggagtgcagtggtacgatcttggctcactgcgagaagaaaaaggacagggtccttgcctcaccaagtgttgactgatcacagctgtggcgacagtgcagcatggaggcacgggtagacaaacaggctcatggacagggtggaaagcccagaaacagaatcacacacgtgaggaaatgtgacagatacttgaggcaacattaaaaaatgggttattcaatgaatggtgctggaaaattagttatctatgtaggaaaatcatattcattaattttcataaccctaaaattaattttatacaagttgagtatctatgattcaagatgcttgggaccagaactgtctcagatttcaggttttttcgggttttggaatatttgcattatacttaacggtcgagcctccctaatccaaaaatttgaaatctgaaatgctccattgagtttcggatttctggattaggtatgcttgacttgagtcagcgtcaggccccataaaacctgtacttacctctgctcacaccatagtcaacaggcaatccagttgaagacttaaatgtgaaaaccactcattttcaatctttagaagacataagaaaatctttgacttcaagttaaggatttcttttttttattttttgagatggggtctcactcygtcacccaggttggagtgcagcagcatgatttccactcactgtaacctctgcctcacgggctcaagcgatcctcccacgttagcctcccaagtagctgggaccacaggcacgtgccattatgcccggctaattttttgtatttttggtagagacggggttatgccgtgttgcccaggctggtcttgaacaggagagttcaggcagttcacctgcctcagcctcccaaagagctgggattacaggcgtgagccaccatgcctggcaagaaggatttcttaaacagaaagtgcaaaccatgaaagaatcagtaaatttcattacattagaagtgagaacttttgttcgtcaaaggaaatcataaaaaacagtgaaaagggaagtcacaaacaggggagcgacatacgcagtaacacagcagagggttattctccagcatagacagcagatcttctgcaaatctgttatcaaaaaataacccaatagagaagtgggccaaggttatcactggcagttcacagaggagaagagaatggccaggaaacacatgaaaagagaatcagcttgccaattgcagggagctgcagaatccagcaggaagctgcccttgctagtgagaccgtgggaactcccacacacatggccaggcgcagtggctcacgcctgtaatcccaacgctctgggaggccaaggcaggcagatcacttgcactcgggagtttgagaccagccagggcaacatggcaaaacccagcttcttgggtggctaaggcaggaggatcacttgaccccaggaggtggaggttgtagtgagctgagatcatgccactgcactccagccagggtggcagagtcagaccgtgtgtcaaaaaaaaaaaaacaaaaaaaaaaaactccagtgggaacacaagttggtacagctactctggagagcagtttggtgttagtttagtacacagatgcccgtcgatacaaccaaggagtcccactcctagctgtattccctagaataactcgcccataggtgtgtggagacacatggatatgctcactgaagcattacaggtaatagaatgaagtggaaagaaattgacagatttttttttttttttgagacagagtctcactctgtcacccaggctggagtacagtggcgcaatcttgactcactggaacctccacctcccgagttcaagtgactcttctgcctcagtctcccattccccagcctcagcctccccacaatttttaaaacttgtgtcatgtgcaatttactggaacagaaattataatattggcttatcatatgagtgtattagaatagagattataatacttgacacgacatgttcctagcagaggcggggcactgagaagtagccagaccctcctgcagagcctggttaatctctcagtcattgaagagtttaactgtgatgtctagccagagccagctccccacctccacacctgagaatgcagccagcgacctgggcaacccccagcaygaaccccgcagrccctgcgctgtgtctttcctgacacgcrcttcccttcctgggtgcgcccctgaggcgtcctccctgtggacagcatttacggaaataacatgcgtgtggaaaacaacctgcgagtcctgggaaagggaggagkcttgcccagtcacgggaatgcagggagcagcctgtgtttgtgaaaccctgcagttaaggcttgcaggagatgccaaggaagtaaagccaagttcatgcctctcagaagctggggctggctatagaaatacagaggcgagaacagactgacggtgtctataaagtaaacagctgtgcttctggcgcrgcgatgagagatccgtgtgctgatgtggatgatctctgtcttcatgttgcctggtagccctttaaagtccccctgtttggccactcgcagtggaagcttctggagctgaagggaaaggtcagatggctggaaattaatttcccttgtggagctcttcttgccacccccgagtttgttttcatcgagcaagaggattttttttaatcagttattcacctagtttatgtaaatttgaatctgttcttttgtcaatataggtagttttttagacatgcctcttttaaatgtaggctaaaaagatgtcagaaaacactgctcattacttcttttgaaatgtagaatctcctgattgacgacgatgatgatttcagtacaatcagagatgacactggaaaagaaaagcagaaacaacgggccctggggagaaggaaaaggtaattgctggggtctgcacagatgtgcagctgacagagccctctctgactctctcttattcctgcttggaaactgagagggaccggaaactcttgttgattcagagtgcacacaaagcacaccagtgtggcgggtccttctccgccccctgcgttctttcctctccttgagtgcctcctcctggagctttctgtggaacaggtgaagtccacgtgaactgcagaggcacgatgaggagcccgcagatccatggccccccggtccccctccttcctcctcacccgcagcctcaccctctgcctggctcttggctttcccttcaggttcccacaccctcaggtctccagaaccaccccgtcttgctgccacctcagccctgctgcgggctccctgtccttctcccgctctctccaaggttcccgagagcctggccactccaggggacgctgctgtggcttcagggctgctaccccacttcctccaggacactgcctgacccctggccgccaggactccgctgccacaggccatcttctacctctgctcaggactccttgcctctctccctcctcccagctctggcgccgcctgccgttgtctggctctgcacttactgccactggaggaagcaggtgctgcttgcagtcaggccaagccacaggctctgtgcccagccggctgtcttcaggcctccaggccacacacccggaactggggcgtgaggctcagttcgcactgctcagctcaccaccaccacaagtcccaggacctgcccgtggcatcagctccatgcaggcctcaccagaggcccccaggcgtcctcatcctcccccactccccgactcacggactctgggtctctcctaaatctgccttttgtcctattctgactgcttctgccctggtggatttcatctttccctgcccaaatgactgtaggagcctgatctggccccgctcaccctaatccccttcttctgcccctcagtatcttggctgcccgtgtgccagggactgcatgccctctgccactgggggcgtctggggaagagaggtcccaggtggaggtggcagggcaggtgagcgtgacctcgtgaccatggcagaagtgggggttcgagcgtggttagaggctgctggagggtgtgaagggggacgygttgacatgatcactggctgctttgtggtgagtggattctaggaggtagaagtagaatcagggagccgagcgaggagactccctgagtgaagatggaggtgggtagggactgtgtgagctccgcaagcagcacggcccctgggccagggccccttcctctctgctctccggggtctgggctgctttccggacagcactgtcccgtggcctttgctgactccctaagggccccgggagccccaggatagcaaaggacctgtgcctggcctcacccccattcgcagctctgcagccctcaggtcctggtgccctcagagacctgggatatgggagaggggctgcagcgctggctgcttcgggggttttcctgtttaaaggtcagacacacacacacacacacacacacacacacacgtaaaattctatacgtgtctaatacatagacactaaaatactgttttccaaatttttttttttttttgcgacggagtcccaccttgtcgccaggctggagtgcagtggcacgatctcaacccacttcaacctccgcctcccgggttcaagcgattctcctgcctcagtctcccaagtagctggtactacaggcgtgcaccactatgcccagctaatttttgtatttttagtagagacgaggtttcaccatgttggccaggatggtctcaatctcttgaccttgtgatcagcccgccttggcctcccaaagtactgggattacaggcgtgagccaccgcgcctggctctgtttccacatttaaatgtgatgccactgacttcatcagacttctccaagcatcctctctgtcaaagccttagttgtcaccagggctgttatttggagacatccaayagttccccaggccctgggagctccattgtcatctgtgctgtttgagatagcacattttaaaaattcatggtgctgtcactgaaaacctcatcttaagcctcacacgtgctgtttgcacaacagtagaccactggtgtcttctgaacaccgtgatgtaaccacttactatattgtttttcatttttttttggagttaatagtgtcacgtgctttcaaaagccaccaaagaggttcactgagaaatctctgcacctccctccccaggtacacagcctctcctagatgggccagcgtgaccgtcacctgcatgtcctttcagagacctgtgtataggggcagagaagctttcctttctcttttgaccagaactttcttggtaaccttgctgttttcatgtaccagtgtgtactcagctgccccgtctcatggtgggagcgtggtgtcctgatgcatgggtagaccacagcttaggtgacttatgcccacctcacacacttccaggctgtcgccaatctgtcaccatcacagtgaataaccttgtatattcaccattttgcagtacagatgtggatatatctgtaggacagatttctgcaatggaattgctaggtcagagggtatggctgtaaacattatctgcaaataagaaaaagacaaccaatccaataaaaatgtaggtaaagggtatgaacagttcatagaaaaggaactgcaaatcgcttgccagcatataaaaatatgctcagccattcactcatgataaaagaggtgtaaattcaagctactccgagacagtgccacatgcctattggcaacactaaagtgggaaagactcgtgtgttgaggacgcagagtcactggggctctcatcccctgtgtgtgggtgtggaattggcacagacactttggaactcaggacagtacctcctgctgcatctgctgggcacttcccggtacccagccttctactcctcaaaaacatggacgcgtgcctaccaggatatccccaaaattacamggcagcttcattcaccatggccagattctggccgtattgaaggaaaggctgctcagcagtgggatggcgggtgggccgcggaggctttctgtcggggactgtgcagcgtgggtgggccacacacatcaggctgggccaaagcacccggccgcagagcacctgccgcacggtgccatgggccgggggggtcacagcgaaagccagtctcttgagtgggatgccaagtggcctgtctctccgggcaagactgaaggggcagaggcagcctctgcatcatgtcacacaggtgtgygtgattgtgacgagtcgtgcagcggtgtgtgtgcactccggatgttattcttccgtttaaaaagtacrgaaaggaaggtttctcagctgtgaggcattttcactgagcagattgagaaagccccagagcctgaaccatgccgtgcygccagtgcaaagcaggggaaggcagctggcctggcacagggctggtggcagggcaaaatggggccctctggcaggtggctgagatctgtctgtgcaattgcaaatgcacgtccttgtggcctataaaattggagtgtattttggggtcttcgtgaacccctcaccctgacacccactgcatccatgagtcaatgacagtgtctgtgtctctgcagccaagaagccctccaygagcagagcagctacatcctctccagtgcagagacgcctgcccggccccgagccccggaaacttctctctccatccacgtggggagcttcagataaccgcgccgctgcacggctcyactcccgatgaactctccggctgatgccacaaacgtgggtttcctgggcatggggactggctgcctggcgcctccaatcccaaatcctctgcttcctttgagcacagggacggctcctctgaggcctggccagtgcatgtagtcacttagctctgcaacacgtggcagccacgggggctggtgcagctctggatgtcgcccacccagctgccagtaggtgctgggctctctcacacagcacccggccccagctgcctttttttttyttttaaccagaaaatgcacaacgtgtgcgtgaaccgcaggtayggaggcagcggcatgccgttgctccgctgtgggaggtgtgtggggtcagsccagccactttcctccgtgttcagatgactctcgttcgccctgaccggcttctcacagtgtctcaggccactgcgccaccgcgctggtgctgagcagaagcgggcagaagtggggtctgctttcaggacttcatttcccccactcgttccggccccgcatgctccacgtctgccctttggtctgagttaaaactgcgatgctgaaaagtgcgagctctttccacgaggaggagccacacagggtggcctccgagggtgagtcgctctgctaagcaagggcagccgctgcacgtcagcccgcaggccaagggtccagcttatcctgggtgctctgtgatcagaaggtccttggatcccgaggactgcagctgctgccgtccacrgcgcctcagcctctcttcctgtgtggaagcggggcaggcagggctgtggcagacaggcctggcatagcccaggttccaggtgtcctgggcagcctgaccggtttcctgagtagcctcaatgaaaacacctgagaaaaagaaaatgtaaactaaggaagggttttcccacttaatccaacccagatttctattcaacttaaaggatttaattggcatttgtgagaaataatagtacctgtgtcactgagttgattgatttgggacatagacggttgactttcccagacagcagcttagcggaaagcagcatcccgaagacggtgtcgcatgtcctgagcctgcttgtcacctgggcctcacggtttctcgtcagccccgtcactgatgggaagcagcactgaagtgtgagggcagaaaggacaccgctggagtcaggcgctcccctgcctgtgacccttttccaacaagctgatgctgagccagcggcctgctttgtccctcatactcctcccaacagtccaaacccctaccagacagaagccacgtcgcttctgcacacgtgtctgagagcgtctgccatagacgtctgtgcgtttccgtgaagcactgcgccctaaggacccaactctgactagcagctgcctcccactcccaaacactaaccccgctcaggagactcrcactgggtgtagactgcgtctttgcagagggagatgatagaggcttctgatgacgccagagctgtaagtgtcgtgacgagctgggcgcccagcccttcttaagctgttctgtttctgtggctttaactgacatatttctgtagcatctgccttcatctcatctcagcgtaatgaaatattaatgaaatcgctgaaaagctttgccttcgagaggccagaagcctcgcggaatgtctgcaagtccaaagacgcgtgtgggttgtgccctgaagtgccgtccagcaggcgcgtgcggccgggccggcctgtgcgtgtggcctttgccttcttccctttcttcctgttttctgtttttttaatttggggattgagaaagctgtacgattttgttaaagaaaaaaataaaccattttttaaagttgtagcccttagctgcttttggttgccggctacttcgtgcccagcttgcttaagagaggaacttttggccgggcgcggtggctcacgcctgtaatcccagcactttgggaggccaaggcgggtggatcatttgaggtcaggagtgtaaaaccagcctggctgacatggtgaaaccctgtctctcctaaaagtacaaaaaattatctgggcatggtggcgggcgcctgtagtcccagccactcgggaggctgaggcaggagaatcgtctgaacccaggaagcagaggttgcagtgcgccaagatcgtgccactgcactccagcctgggtgacagagcgagactccgtctcaaaaaaaatacataaataaaataaggaacgtttgtggccctttttcccaagcctgcttcagatgctaaataaacagtttatatttagaaatactgcagcagtgctgctttagaaataacaagtttgctttggttttaaaaagttcagactcatgggaaaaatgcactggaagaaactggatgtaatcaatctggttttattttccttctatggaaatacgtaatggtggtgtcgtcacagaaaacatacttattcaacagtgactttttctagccaaaaaagggaggggcaagaattcccttgcaaatcattttggcgccatcgatgtgagtttaacctgcagaacagacttaacagtgagggaccaacttacaacagccccttcaccctacaggtccatcattctgttctgttctggataacgcacccacccaaagcatggccataccagggttcaataaaatccataacaaacgcattctgggtgaagcggtgacctcagtatccaagtaaagagagactgcttccagctccctctggccgctgccctcccccactcccaccacacacgcccacgtgctgccatgcgtccaggtccctgtggcaatggctgcagagtgtggcagacagggcccttcatctgcaggtccttgccccgacttggggtggcaggagcagacacggcaatctcccggctcaggaaacaagagaccaccaatgagctcacaccaggctggggcggggccagacgagtgctcaggggacagtggtgcctctgccacgccccagtgtgctgctctgaggtggttctgtctccgcaggcacctccccaggtgccgagacgccaccagcagctccatcacacgaggcagccaccaagtgcctctttctacaaaccagtgaaagccctgggccctaagtgggtgatgtccgtgggctccatggaatgacagtcgggggagaggggaaggtgcattgcccagagcttccaggtgcccatgtccttcacacgcatgtgcttcaaagatggcagcaccctcgtgttggtgtggctgttgcacctccctcccagccacaccgcccccaccccagaggggcgactccgagttgcacccactcctagcccaggtctaagagctctgggtggggtccagtaacctacagccaaggaacgcgcgtgagcccacctggagccagggcacaaaggggtggggggaccacagcaaaactcttctggcaaacaacagaggccacaaatccagggttcagttaacattactggaccaagcacccagtttgtttttctaagtggttggggaattctgaagaggatcagtttaaaaacagtatagaccctgctgcattttctccactcaactctactgtcccgtctcgcgatcatgctacacttgcagccccgtccactctagatcgctgcccggcctccccacgctgtcagatgctgtctctgtgagaagccccctcctcactgctttcccacacaatggagccatgccccgtgtgagatgagccacgcgggcacaggagtgaggctggcaaagcgcacaccagcctccccccaggtctgcccctgcccgggcatctggtgcccccagcacgtgaggcgccccggctgctgtgctggaaagcatgcctgtcacttgggcccaatttcctcacctgtcttgtgggctgggcttgctatgaggcttgggacacgggagagcacggctgtcgaaaagatatgccctctgcctcccatgtcagccacgcgctggctgtgcctcatggggcaagttgtgtcgcctctctgagcctgtccctcgcctgtaaaatgcagataacccaccatgtaaggctgtgaggggaattagaggagttcgtacattcaaggtacttagaccaacacctggcacaaattataaagtgtcagccgtcagcatcccgatcaccgtaatagctcgtacccttcgcactgattggtttagtcatgagtgcgtgaggcagttctagccaagacattagaggaggtcggctgaagccagagcttcggaaagggctccctttatcttaaaaagagacacacataggatcgcttaacgccaggagttcaaaaccagcctaggaagcaagcgagacccagtctctacaaaaaattttacaaactagctgggtatgttgtcatgcacctgtactctccgctacaagggaggctgaggtgggaggatcacttgagtccaggatttggaggctgcagtgatctacgattatgccacagtactccagaccagaagacagagcaagacctcatcttcaacaacaacaacaaaaagagcaggtgacacataaaagaggcagccatttgtccccaaacaccttacactggtgtgatgcctggagctgtggtggccatcttgcaaccatgaggcctgaagtcctgaatggccagagaggagaatatacaccagaaaaaaaaaaacgggggggtttgttaccatggaaggagtgaggaagagctgctagggaggcagccaacactcccggagcacatgcagcccttctgtacccgaccagcctgatggtgtcttccatgaatgcagtccccatccctcactccaggaaactggggaagacaattcaagtggccttgatcgtagacagttcccttggaaataaaagtaccaagacaaagcagagaagtcggagagcttcaggtttgcagttttatagaaaagatttaagagggttaaaatattcgttaaaatggccctcattctcccgggccaaggctgtgtggtcacacctgagagcctcagcactgcccagtaccctctctctccttgcggaatttttagtccaactgatcacagaacccacaccctaaaaaatacaacagcattctaatggcattctaacggcattctgatggcatgctaatggcattctgttttgctttttagccaccaacaactcaacctattttcagagcaggtgaaaaacaattctgaatccagtttggaaagattccggcaaccaacactttatgtcaaagcacaaggaatgatgacaaagactctggcgatggaagatcaaaaacaggcttgttttatttatacacagaacaacttatgtacagcactcaggtatggactatgtacatgacaatacaagaggcgtttgtttccacggtggtcactatataaattaagattataaatacgagggggtaagccccacctgagggcacagaaccttttctccaagactcttcagggatccttcctgcctctctctgcacagcagaccatgaggcccgtctggcaacaccacaaggggacctgggccggggcagcagagcagcccccagacagcgaggacaccccagtgcgggacgccagcccagcaccaaagggcaggttcctaaacactcatgttcattccttcctcacattctaacttgttagaattagaaaaatggtttttatgtaaacagtgttgttctaatcactgacaacatattaattttaaacacttttgatccaaacccaactccttgccaggagtaggacactgaggacttggggtggccctgatgtccttgaagccacagtcagctgtttatcctcctcatgtcccctccccacccaagttccagcttgcctggggcttgttctgggaccctaagaaccccaggatgcccacatcgccaggccagcagggccaatggtcatgcagggactgcgggacaggttcccatcatctcctgtgttagcccattccacctgggaaaccaagcgactgccgtggctggcttatttctccctctgccaacccccatctacaatgttctggggaaaacaatgagaggtggaaaaggtaacatacaaccaccttccacccacatcacttccagtgaggcagctaagtccaccaacagagcgtgggagagtctttcatccaaaaatcccaacacgtcgcatgcagcgacaggaggctgtgctggggaaacccaaggcctggctcagcctccatactctaagggcctcgggccagaacgaccacgagaggggagcacccaaaggcacgcagaggggcccacctgggtgcactgcagaggggacagaggggctgtgagtgggaggtgggccagtgctgttcactgccgcctgctcaggaccaggggctgctgcagacccagcccggtctatgcccacccccgcaggtgcagcccagcttctgcacatcagatggagtgacgctgactaaaggacctggacagcgccggcagatactcccaacactgtccttctctttgggagccaaagagaagccacggcagatactcccaacactgtccttctctttgggagccaaagagaagccacggccaggcagccaggccagagccatttcctcctcacaccagggcaggggttacagaaacctcttcccaagacatttacaagcacctctgagccatgactatcaacgggaaaaaagggcaaagtcagtgccctggaggaccaggggcatccttcacctgggcactgtccctacggggcacagccctctccccaggcgagctccctgccctctggcaccatcatctactagttcagagccaggacagaggcagggcaggggcagcgcggaccaccaaatcagagtccctgccagcacctccagcgacatcacgcccagcagcaggcgacaagaagccactgcaggggcagacactcaggagagcctccggcctccaggccaccggacgggctgaagaggtcaaaccacccctggcccaccagggccacgctccctgggaaccacagaatgggcagaaaaagtttcccagagccaggaagcatttcccacacagaaacactcatgtggacacacatcctctgtctgcagggatgcagctggcaagctgtctcactcacaccccaagctgaactcgcctagagcgtccggagacagaagggcaggcgtccccagcccacagtggggggagggaggagcgggaggagagaggatggaggagggaggagcacaggccctgtgacacccagggaggggctccccgcctgggaaacagcacccgctgccttggctcacgcaggaggaatttttttttctcttcacgtcaaattacaatcaacaagactggaaacatccatgctactttcaaaccaggaaagagcacgatttttgttcaacaaaagctgcatcaacaaacaggggcccttgcaggctgctgtgctgggccccagccacgtttctgagaactggctgggggccaggaggcggagccacacggtgcggccacagaaggacacacggagaggagcccccgggacaatccaagcacgaggccaggcaagcagtgcccaggaggccagacgccgctggattccctggcccacagcacaggcgggcgagagctgagtggccgtgacacatgtgccccaggtgactctgagctggagaaagtgttgtttcaaaggtagctgtgttgttatgttcgagaccccagagctctggtggacggtgtcacggaggctttctgtagctgacagaggaagtagcaccatgagaagggggcgggctgcagcatctgcccagggcctcagtggcaggaggcgcagaggccacaggctgagag

SEQ ID NO: 97732 - DNA, 34618 bp, Homo sapiens
tgggagcctttgggagtgggtatggagggagatgtctgaaatgaggactactgctgttattagcactgggcaggaaagaactagggttgttctggaaactattaaaactgggaggtgggaagttgtggtgagaatagcccggagggtactgataattaacctgctgcggcatgactggagggggcgggggatgaggcatggagggagggggcatcatgaaggggaaagtgccttgtccaggaggtgccccagggactggggggttattaggacaaggcattggtggtggcatgggaggaaaacaaggaggaactgggaaggggtgcctcatctggtggttggggaaaggcggcctgattgggcaggggggaagagggccttgcgctgacggaggcatgggtggggggaagggtacaaagtctggtcgtggagggagaaaattgggggctggagagtttgagaaagtggtggaaggggcacttggaggttcatattgatattgcacaggaggctgctgagggtgaagcagcctcagattttggggcctaaaggatggtgctgagggtctggctccatgtcctcctcgtcctcggggacaccctcgtcccgggtggaacgacattctgtgacttcatggcagaaaagaaaaagggaaaagtttttttaaaaaataattcttactatgtaaacagggtttcataaatgcctgaccatcttgatgagcaactcaaagaccccctagtcaagccactggaataggccacccatttaatactgggttcctgctaacatctgaaaccctcatgctcaataaactcctcttcccctttcttggccacccagcccactgccatgtttagtccctggaccgaccattccttaaagctgctccacttccaaaatgaccaattcaacatcccattgttcaccatttgctgtcatgcctttgctcaagttcccctctgatcttgacctcacaagatcaagggggcttgcctccccagcccccactcccatctccaaatgcagatttgggattaccaccccccctctgcaatcctccacctctccctgataccagacccttcacatcagcatttgaaagtgctcaggtctattccaacataaagtactttccttggcctccaggtctcccttgactttgccccttctttgtcctcccctttacagtcaaatgacctgaaaacgttgctacagaccgaatgtttgtgtccatcccaaaattcctgctgatgaaatcataacgctgatgtgatgctatatggaagtggggactctgagaggtaattatgatgggagtagtacccttatgaagagagaaagagaaaagaaatccctgccacccaccccttaccaggtgagactacaacaagaaggcagccacctgcaaggcaggaggagggcatgcatcagaaacctggctgtgctggtaccctgatctcagactgccagcctccagaactgtgagaaataaatgtttactgtttaagttacccagtctatagcatttagtcatggcagcccaagctaagacaaaagtgtatatacttctaactcactctaatccgacttcagcttccaccacctctccaataagtgacatgatcagtgcccaccttgtcttgaaaaccaaaggtcattttcaatcaccttgcttgatctctgtgcagcaatcagtccagttgcctccccagcccccacccccatggatgcgtttcttggcttcctgacatgatgccttcactgtggccttcctacttctctggctgttcctcctggcagtctcccataccagcttcttctctgctagggggcctttaaccgtctggtattcctcaggggtctagcccaggcactctgctcactctctcttccaaagtgatgctactcacctgcactgcttcaattgacatcaatctgtcagaaactcccaagttacacctttagcccacaacttctgagctccagacccacactgccaattaccaaccccatctctctccttgagtgtctcactgacctggaccaacaaattcaacataacatatgctaaaaggaattaatgaccttgccctccaagacaaacatttgctcttttcctagtatttcctatctcaataaatgacaccattaatagtccttaagacatgtaacagggaatcatctgacttgtcctccctcaccccccatccttagctaaaaatttactttaaaattgctgtcacttatatggcaactatcccttaataaaaaataaacaaaaaatccaattgtttctgcttcataaatatttcctgaattcatctacttcacatcatcacctcttacatggctattataataatatccttgctggcctttctacaaccactgtcactgaccctagggctttgttaggttccttgctctcacaacactctgtgctgcttcttagcaggtcctacaataattacaatccaccttctaaggacctaattccacctttaatgtctgcctgcacctcggaactgcaagcgctgtcagggcagcgctctgggatttctattaactgttctggtctggcttcccagccctgggcatggccctctattgtattgtgcccactgttgaaagaatgagcacattatcccctctccccatgtatctaaatcctttccaccctctatagcccagcaccaatgtctgctcctctctcggttctcccaaactattgccattcccatcacggcactcaccatgtgtttccctgcatcatgatgttccgcctggatatgtcacatcttccacagagaatataagctctaaaaaacagaaagaataaaacagacataaacatgtttcccaaactgccaatgctacaaaatatttctgcaattaccataacactgattttgcagtttccaatacacttagcctacaaacaaaattaaaagcatgttgaactgtgttaaagtttccaactaaatttttaatgtccttaaattttaaaatgtcattattactagttttgccaactcaaaactatcagcagctaaaaagacttataggcatagatcatctctaatttgttaaaagacttgggaaaaatatcatttcccctctcccccttcatactctcgtttccttcatggtaaaaacaggtaggcataggccgggcatggtagttcacgcctgtaatcccagcactttgggaggtcgaggcaggtggatcacgagggcaggaggtggagaccatcctggctaacacagtgaaatcctgtctctactaaaaatacaaaaacttagccgggcgtggtggtgggcgcctgtagtcccagctactcgggaggctgaggcaggagaatgacatgaacctgggaggcagagcttgcagtgagccgagatggcgccactgcattccagcctgggcgacagtctcaaaaaaacaaacaaaaaaaaaaaaacaaaaaaaaaaacaaaccatgtaggcatagaccaaacacaaaaatcacagtgagaccagcattcaaattcaaacataaccagaatcttgttaacacaccagttaatgattcttaattttcattctcagttcctcccacataaaaacactgtaaacatgaatgattttccaaatacttgaacttcagcaaaacattttttaaaaactcacataaatattgagtacaaaaagctgtaacatagaaacattttctgaaagtctttctaaaagtctcatcaatagaactttactatgtagactttcaaatggctcatgaaaataatttcagattatgctagcagtcagtgtgcttaataaataataggcaccaaataatatctgattttttttttaagacacaaagtctactctgtccctaagctggagtgcagtggtgcaatcatagctcactgctgtctcttactcctgggctcaagcaatcctctcacctcagcctccaaaatagctggaactacaggcgtgagtcactgcgcctgactccttattactattatccagtccagtaccctcatgataaacctggggcccggacaggtgctcctgccaccataggctactcactgccaacagaatcaagttcaacctctgtgcttggcatttaaggctctattgactctggacccaggcttgttctccagtaccttccccagaaagaccctactaccccatgttttcccaacagattaccattcgagtacaaagaaccagctagttctttgctcccgttctcctctctaaaatctcccaccctaggcagaggttgcagtgagttcagatcgcgccattgcactccagcctgggcaacaagagcgaaactctagctcaaaaaaaaaaaaaaaaaaaaaatctcccaacgtatgaatctgcccagtgattttctatccatctatcaatcttaaatgccacctcctctatgaagcccttcctgattcccttaggtaatcccattccctctagacttagtctatacttaatccttttacagcacttaccagagactgcctcatatcatagtgaagtatgcacacgtctaactcttccactagattatcagctccttgatgatatgggttgattcacagtcatttctgtatccttcacatccccgggaaaagcaacctacacacagtaggtggtcaataaatgtttactctctcaccaatagtatgtttccatgttgctactgtacatttcccttccatgtacctccgcaacagaaagcaggccttttcactgagtcatgcaatatttaatgagcccataaatgggaagcactgtcccaggccctgtagactcagagataataagacacacagcctgtaggattcaaggaactcagaacccacgtacaagtaagtgttttaaaaatacaaaataatgcaataaacacacaaaaaagaggtatgtgcagggcttaggggaacacaaaggtgtgtgccgcacctagaggtgggcaaaagtcagggtcacgaacactcttgtacagtgtgtaacaagagctgaacattcactgccagatcctcatggatgtttcagtagttagaaaatctaaaaatactaatcatgaaattgacctattgaaggcatagtccggctgtgttgtggatgcagactttaattcaaaagtcaaggaattcactgcacctggaaaagtaactctcttttctccgtctgtctcttctcggttgcggtttggaaacagagacactgaaggagctgtcttgaatagttaacacggccagaacgtcagtgcatgtaaaaagaattttaaagtgtgactacatttttattgagaactccctctttccccaggtggatctgcagggcagtcaccttcatcctgatccataactgcacatttactgtttgcatctcccgccagacggtacgccccacgaggcaggcgctgagctcaggatctcactcccctccgagagccgggcggccccaggcctggaccatagtgtgtgctccacaaatgaatgaaaggtctcctttttcacttccacttatttgcgggatccaggcctagcgtcgctcttttgcccttagctgcagatctgaagtggggctgcccgaccccaattcccggacgcttttcaccccagccccggagactccagccccgtttaaatcctgacactcggaaactctcttctaacacttgcaaggtaccccttttacctataaaaggctctcgggccgcgagatcgccgtcagagcaaagccaggctactaccgcaggtaccaagacagtggcaccgcccgcgcctccggaacaggaaaccgagggaattaaaaagcaaacctgagaaagctgggccaagggagggaaaactcttcagcccaccgcagggccttgtgcgcggtgattggcgcgtcaacgaaagcgatggacgtctagaccaatcgtcagcaaaagaccctttggagcccgcgccccctccccctacgtcctccaatccgaaaacgcaaccgggtgagggagcgcttccgcccggagagagctggccgggwtgaggcgccggctttcccgggtcttctccagctgccaccgctttactgcaaaactgacgggcscaaaarcatgagtgactccgcgggagggcgcgctggtctccggcgttaccccaagctcccagtgtgggtggtggaggatcatcaggaggtgagcggacggcaacagggctctggggcagaatcagcggaagccctgacgctcagasggccaagcagagggcgcaaccttagcatcggaggccagagagttaamcagagttaaactgccctattccgttgctgtggagaggaccccaaaacagctaactaggaagaatgagaactgacatttatgggcgcttcctacgagtcggggcracttatttacctcggtttgcccccaaatcccagaaccaaacaaaaggtggcatcgrgattcgaaaccggacagtctggctgcagagccmtgtgttcttaacctgcagttaactctggcttccaagtatctcctggaatcgccaccacagccctgctgtttagatgggaggctttatgcttggaacgtgggctctgatctgaaatggggacagtaatcgtaggactcacagggctcttaggagtattattgtgtgcatactgtgtttaaaaatcttttttttttcttttttgagacggagtctctctctgttacccagactggagtgcagtggcgcgatctcggctcactgcaacctccgcctcctgggttcgagcgattcttctgtctcagcctcctgagtagctgggatcacaggcacgcatcaccgtacccagctaatttttgtatttttagtagagacggggcttcgccacgttagccaggatggtctgaaagtctgacctcacgtgatcggcccccgccggcctcccaaagtgctgggattgcaggcgtgagctactgcgcacggcccatattgcgtaaaaaaaaaaaaaaatttaacacggtgccctgcatagataaacactaaaaggggtttccatgtttatggccgtgctgatttacagtagccaaattggtgtcttaatctagacttttccaagtcaacaaaggaggcccatggatctaataaatatgttttaaagtagcatcagtaggcttgggatgggaggcagttctctggacgttaaaaaagaagagggatttactgttggtgacagctaataggagaggaagataggtttctcaggacctggatatagtgtctatgaccttgagagaatgagaaagcctaggttagacrgtgctttcaaattaggtattaaacctagaattagagaagatgtaagaggagaaatggcctttatagaccacctagcccaaccccaccattctaagggtaccaaaaagaccctaaccagcctggacagcagagcgaaatcccatctctacaaaaatagaagtgaaaaaattagctgggcgtagtggtgcgtgcctgtaatcccagctactcaggagactgaggtgggaggatcgtgtgaacccaggagtccaaggctgcagtgagccatgatcacaccactgctttccaggctgggcaactgacaagcccctatccctttttaaaggaaaaaaaagaatactttgagacctagggtaccttgaacacctagttaatgttagaacaggcattaagcggtagtttgttcctgagccccagtcctggtctgtttccccacatgacctgttgagttcaagggggcagcaggaaggccgctggagatgcaggttggaagttctgaggacaaagtaatgcttgagattatcatctgcaccatctacagtaaacaaattttatgtttttccactttacagcaacatagtatgctttcaattatgtgyattatttagcattgtttttcagtctgcagttgagtgtgtgctcatggtttcagtgttaattcttattgtgtgcctgtgtmttttacaggttctaccctttatataccgggccataggctcaaagcatcttcctgccagtaatgtaagttttttacatttcgactcacatccagacctccttattcctgtgaatatgccagcagacaccgtgtttgataaggaaacactctttgggtaatatgtgattttatttatggtcttttgtgtttgaagtacaatttgcagtagataataagcaattataggaaatagactttgctaaactcatgggtttgggggttttttgtttgtctttttgtctttttcattttatttagaacaagtgttgacaactttcttaaagagccagattagcaaatattttaggtttgctggctatatggtctctgttgcaactattaatctttgcctttgtagtgtgaaagcaatcacaagcactgtgtaaacaaatgacagtagctgtgttccaataaagctttatttacaagctgggcatggtggatgagcctgtagtcccagctactcaggaagctaaggtgggaagatcacttgaggccagcagttccaggctgtgatcaaagcctgtggatagctgctgcactccagactgggcaacataaccagaccccatctcttaaaagaaacaaaccaaaaaaactttgtttacaaaaacagcctagccaatgtttaatccttttaatatttgcctttatagagaccattggattctcacgtctatttctgcatttagtccattgccatakgctgttttggttgaaatatatgatgaagattcaggctttcacaggcatgtaattggaaaaggaaagaatattttgatagcctttttagataattgtgaatattctttgatagtgcgccaaaacttgaaaagtagtagtttattaaagcttatttgaaatgtagaattcagcaattcagtatcaagtgtgaataaccatagtttcttgaccactcctttcaagataaatggtgttcacctcaaagttcaatcacaagtgcttttccttgagacaactgttatgcttcaaactatgtagcaggagagctttctgtgcatttctcattttgccacacataatatttaaaaatgtatactcaggatggaaatttaataaaatcaagatgttctcgaatgacacttttatatttatttatttatttattttggcagtggttggtaatgaagaatatagtaactactaacagtttggtgctgctgccttaattaatgttggaacatcaacccaccagtgcctttgcaccatctttgcaaatgtcagtaaatgaaaacaggaaataatgccttagtattttcatgaaaatagttttgtaatagtgatgtccctgaaaaagtctcaggaaccactctagggaccacactttgagacctgtggtcttaaaatgttgtggataaaattacacttgggaaaaaataaaaataaaagttttaatgttgtctcyatgtttcttttccagagaattaagtattgaaaattggattatgcctgcagtttatgctggccatttttcacatgtaatatggtttcatcccacatgggctcagcagatcagagagggcagacaccactttttagtaggcaaagacacttctaccacaacaatcaggtaatttcctcatatttgtgaatatggaagtgattgaatgtttctatcttattttggattcctataataacttcataagtctctgcacacaaatagggtcagattaagcctcgacttctccaaagagttctcaaaacacgaagaacaaacttttaagtctcttgatattcttcatgtaccatttatatttagttgctggtcaaattagattttgaatgtgatcattatcctccggaatttgggcttcattggtgattaactccttaagccattgaagtatcttatagatttatacattcagtagtacattttactgtttcctgtcartataactgttgtctgctgaatttgccgcagtggctcacgcctgtaatcccagcactttgggaggccgaggtgggcagaagacgaggtcaagagatcgagatcatcctggctaacatggtgaaacaccgtctctactaaaaatacaaaaacaaattagccgggcgtggtggcaggcgcctgtagtcccagctactcaggaggctgaggcaggagaatggcgtgaacccaggagacagagcttgcagtgagctgagatcgtgccactgtactccagcctgggcaacagagtgagactctgtctcaaaaacaaaacaaaaaacaaacaaacaaaaaaacagtaattagcagtgaaagggcaaaattatctcactttgatttttttataaatccaactgctgaataagtagatttggggctttaattttctttataatataattagtttcagataagtacttaatctaaagtaaattacagtatcctctgacttgagataaatatgcaactgtttttattgtataagctatttaacaatgttttgtgtatcttgtgatactataatactttcagaaatatcaatatgttcttgactttaaaattctcttgtgatgggataaatattttaaacagtatagccataactttctagaaccttaaggataatggagtgaaatggtaatacgttgaaaatcagatagtcttcctcattgaaaatgatactttatttctaatttattcttaatgatacaattaacttttgtagtatataatcttgtcgtttgcacaaatagctttgttgtgatatatgaaaattgtatttatttcagatataattcaaaagaaataattaagactcagcatataaatattgtacatactactggtatatgtgaaatagtagtagggtttttattgagtacttcagtgagtaggcctgatttaacctacaaaatcaaataattttcagcaatctgacacagacatttgaaactccacgtgtgattaacaattttggaagattttgattcatgactttggttaatcctgcaagtaaaaatgtatggaagagacacatatacatgttggtgtgcagtttgacaaatacttgcatgtttgtatgataggaacatgggagaactgctgttattaaaaagaatattaatttaggttgggggatacagcttcatcttagggttgtacagttttaataagcttggacattagttttactatgtcattaatctatttttggaaaatagcttttacagtttatagctgtgtatgctgggagaggtcaagtgggaaataaatattaaccatgattttaggtgggtaaggcatgcctctagaagaagtatttggcttcactgtttgaagtatttaccaagtcacctttcatactgagaatattatggttatatagaaattaacaaagctctaaaatatgtcagggggagtttctattaagagaaattatttccagatgaaatttttctcttcaatgattttttggataaagattcagctggtatgagagagaacaaaggaacactggcttaaacaagagagtttattcttatattagaattcactgtacacagtccaggcctatgtggcagctctagagtttggggaaccctagttccttctacctttttgcaccaccgtctctagaatattgcccctgtccttatagtccagggtggcttgccacctctgtgttcatatgccagtcagcagggaacaggagaacaaagctctgcatgcttttcttccattcacaaccaccggccttaatttaatcacatggccacaccaggctgcaaggcagactgaaatgtagtctttatatggggcagctgtgtgtccagctaagaatttgaggaatgctatttctacagaagaacaggaagtataaatactagagactgctctcagtttttgtcaaataggtccgttcttatatttctgccataccatagtgaaatgtcaactgatttgcccattcttcttaaaaatcgttttttcctctgattcagggytacaagtacagatcattatttcctaagtgatggtctgtatgtacctgaagaccagctagagaaccaaaaacctttacaattggatgtaattatggtaaaaccttataaactctgtaacaatcaagaagaaaacgatgcagtgtcttctgctaagaaaccaaagctagccctggaagattcggaaaacactgcctctactaactgtgactcttcttcagaaggactggaaaaggacacagcaacacagagaagtgaccagacttgcctagaaccatcatgttcatgttcttctgaaaatcaggaatgccagactgctgccagcmctggggaaattctggaaattttgaagaaagggaaggcatttgttttagatattgacttggattttttttcagtcaagaatcccttcaaagaaatgttcactcaggtaaataattgtgtttttaacacatagatcttgagaattgtatggcttttctctagatgaggaaccagcaaactctttaaacagccagctagcaattattttaggctttggggttcacattctctactaatacccttttctgttgttttctaaaccttttaaagttgtatataccattcttaacttgagggccatacacaaacaggctataggctgtggattgccaactcctgctctagatagtattcattattttgcatttattaattggggtaatgtatacatgggtgatggataaaaattaagtcatacagtacaggtatatacagtcagccctcygtatccgtgggttctgtattcctggatttaaccagccacagataggaaatattcagaaaaaataaaaaacaactagaaataacaatacaagagtaaaaaataatacaaataaaaaacaatacagtataacaactatttacataggatttacactgtattagataccacaagtaatttagagatgacttaaagtatatgagagggtatgcatatgttatatgcaaatactacactattttatgtcagggacttgagcatccacagattttggtatccacaggaggwcccagaaccaatcccccacggataccaagggacaagtgtacaytgaaaaacagcactctcttatccccattccctcagttctttgcttcagaaacaaatactgtgatcagtttcttgtgtatctttccagcgatattctatatataaatcctgtgtaacagattattccttaaacagtgatgtgcctgattactcacctaaatatttgtaataaatatttgtaatgaaagtttctagaaggttacataaggaattcagtggcagttattccttttagagtgctattaggaaacctgggaacacaaggatttgtatagcctaaataccctttggtacaatggactttttaaaaagcatatattamactttattatttagtagcaattttttaaatatcattaggaaagacagatgttcatctttttttttttcttaagagcatgttcaggctgggcatggtggctcatgcgtataatcccagcactttgggaggccaaagcaggaggaccacttgagccaaggagtttgagaacagcgtaggcaacgtagcaagaccccatctctattaaaaaaaaattttttttttaatttagccaggcatagtggcacgtgcctgtggtccagctactcaggaggctgagatgggaggatcacttgagcctgggaggtcaaggctgcagtgagtcgtgatcgcacccctgcactccagcctgggtgacagcgagaccccatctcataaaaaagaagcatgttcaaaagttaggggagttaagttctgttgttaactctactgcttattagctatatgatcttaggaaaattacttaacctttccgacccatagtttcttcaagtatcaaatcagaataataatcatacccaactcaggattgttataatgaataaagcactgaagatatgccacaacattgtgcttaatgaattttagcccttgggtataaccttttcctgagaatactcctaaataggattactggggccaggtgtacccacctatataatggatccatgtagctgtgctaaacaaggggaaacattatcctacaaagtttgtatagcaagcctctttctccccttgtgtggtgcctcctgaccgaggttctatgtctttgacattctacctccagtattgcctttgtacttcagagatctcttctgttgttagagaaatggctgcaaagtgaacatagggagttctttgttgttgttattaaagatatgtatatttcctgtaaacagctaagtctgtttagatcctaggacatggcatttatatagcagaatattatttaaaatattttcatctcgtgacccattagccaccaagtatgcttccttaggtaatttttacatagtagtaccatgcccagctggatagagttgccttgaagaagtgatatttacaataaaacaaaattttacaatatttacaataaaattattacaataaaaatctaaagtatacattttgcctgattctcccatacatacctttaaataattatctaagattttcttgtatcacaaggaaggttgtctcttccttaaagcatatcattaaaaaattttaacttttttttttctggtatgtggattttttgttttgttttccaggaagagtacaaaatcttacaagagctgtaccaatttaagaaacctggcaccaacctaacagaggtatcctccatttgtttctttggggttttattcatttatcatataactaataatatcttgcaaattaccacagtgatctcaaagactgctcaaagtgtgtgtgtgtgtgtgtgtgtgtgtgtgtgtgtgtgtgtgtgtattggcgaagcccatggttagtacttgaaaattatgttttaactaatagagccaagttttttttgtaatgggatgttgcttgttttttgaaagaataactatataatctcagcttttcaatgtatttaaaggaagatttggtagatattgttgatactcgaattcatcaattagaggatttagaagccactttcgctgatttgtgtgatggtgatgatgaagaaacggtacagagatgggcttcaaaccctgggtaagactctcaaacatttttttcccccaactctactaactttcagtcctagatatgttcctaaatttgcaagatacattgcttttaaaaaagtagtattcagctacttgggacactgaggcaggagaggaccacttgaggccaggagttccagaccagcctgggtaatgtaacaagaccctgtctctaaaaaaaggttttttaattagccagatatggtggcacctacctgtagccactacagccactgctcccagctacttgggaggctgaagtgggaggattgcttgggccaaggagtttgaggctgtagtgggctgtgatcatgccactgcactctaccctgggtgacagagacttgtctcaaaaaagagagaaaaaaaagaattagtattaaatttcaacacatttactaacaatagtagacattattgagtgttttctgtgtaccctttatctaagatttttccttgccttatctcatgtactccttacaacagtcttatggttttattattattatgtcaattttatagatgaggaaaccaaggttaagtaaattgccccaagtcacatagtaagtgggcatgtttttagtctttgtatggtagctgcccctaaatatgagatactatacaaggtcttaaagagaattaaagatgagtagtacataggcattccctgttctaagtagaataagaaagaaatactaacctaacaacagaaaagtaaattacttgacaagtaaattacaatgcaaaaatttggctgggcgtggtggctcacgcctgtaatcccagcactttgggaggctgaggcgggcggatcatgaggttaggagatcgagaccatcctggccaacacggagaaacccagtctctactaaaaataccaaaaaaaaaaaaaaattagccgggcatagtggtgggcgcctgtagtcccagctactcgggagactgaggcaggaaaatggcgtgaatccgggaggcggagcttgcagtgagccgagattgcatcactgcactccagcctgtggagactggactttttttgagactccgtctcaaaaaaaaaaaaaaaaaaaaagcgaaaacttagcttcttttaaggaaaacccaaacacaagtggaagggtattttcaatctcttgacgtgaaggagcagtayttgaaggctagattctccatcaggtaatttatttgactggctgttcatatcaccttgaaagaatggagagagaagttctttttgagtgaaagcctttggtattgaagctggagtgaaagaatattgacataaatattacagtgatttttctctaaaataattcttaaatcatgtaatctcaaacagccagaaaactaaaataaaaccatcagacaaactttttgtccccatgagcataggaaaaccagaactagcttattttaaaactaatctcccacgaactgtcatattattctctctggtgtaaacaaaagaaaatcagttgtaaggtagcaagataaaacgggaaattagaatcaatagtactttaggccagaacatgaacagccactaagatttgtcatgttttggttattaaaaataattcagcagatctctagaagaatatggaaaaagctgaaacagtggttgcctctggggagaggaattctatggctaaatgatgaagtatatgagtgagaaattacttcttttgctatgtgcacgtattatctattcaaaatactcattgtaatttttacttaaaatattcagaaacatccctaaaatgtaaacatcataaagctttaattattgacactaacaaagcagtgatgtggaagaataattcacagtaatattaatcacatcagtaagtattgattaggcactttaacatcagttaatggccgggcrtggtggctcacctctgtaatctgagcactttgggaggccaaggtgggcagatcgcctgagctcaggagttcgagaccagcctgggtgacatggtgaaatcctgtctctacaaaaaaatacaaaaaattagccaggcatggtggcatgcacctgcggccccagctacttgggaggctgaggtgggaggatcacttgagcctgggaggtcaaggctgcagtgagctgagatcgcaccactgctctccagcctgggtgacagagggagaccctgtctcaaaaaaagaaagaaaaaaaaatcagttaatgctttttcctcttcagtatagggttctaaaatgattccctgttttttgaaatgatagaagagggagatagaaaaataagtcacaggacaggagtcttcctagaaatactgaaaaatacctattattttgttatttcatgaagtctcaagctaagtttaaaacttcaacaacaacaaaataggcctggaaaccttggaatcctaagtccagcccacagacttccactgaaacccactctgcctactgagcatgcccagttagctcctcatcaccagcagagagttctatcacagacttgaaaatatgatgagactgcaacagtagtgagtttagactgtgcttggtattgaagggagaaaaaaaatagcataaaggaaaagtagatgacactgaaagaaaagtctccccaaaccaaccatgaccctaaagagccagaccctcggcatggaggcttcgctatgtctagggaagtgaggtgggtgtttagggtccagaagcctagaaaatgtcattaattaaaaggaaaaagtaacaggacaagtgggcaagcaggcaggcctccatgcctccttttttctttstttttttactcccagcaaattcgtgaatatttgtggaggaggaattaaaacactagaagcattagccaatcagagcttccaaaaggtccacctaaacttaataccttaaaagcatcaatgtggccgggcgcgatggctcacgcctgtaatcccagcactttgggaggccaaggcgggcggatcatgaggtcaggagatcgaaaccatcctggctaacacggtgaaaccccgtctctactaaaaaataaaaaaaattagccgggcgtggtggcgggcacctgtagtcccagctacttgggaggctgaggcaggagaatggcgtgaacctggaaggcggagcttgcagtgagccgagatcgtgccactgcactccagcctgggcaacagagtgagactcttgtctcaaaaaaaaaaaaaatgcatcaatgttatatcagatgatgtaggatttttccgattataattgtatttactggctaggcctgggttcacacctgtaaaatcccaacacttgggaggctaaggtggaaggcttacttgaggccaagagttaagaccagtctgggcaacatagcaagaccctatctctacaaaaagattttaaaattagttgggtgtggtggtgttcacttatagtcccagctactcgggaggctgaagtgggagattccttaagcccaggagttcgaggctgcagtgagccatgatcacaccactgccctgtagcctgggtggtagtgagatcctgtctcaatagtaataataattgtatatacaaataaacgtgtccttaatttttttttttttttttagctttcaggaaacagccttttttcatcacagtgtgctaaaaacacttagttttcttgctaatcaaaataattttttttttttttgagacagtttcactcttgtcaccctggctggagtgcaatggtgcggcctcagctcactgcaaactccgcctcctgggttcaagcaattctcctgcctcagcctcccgaatagctgggattacaggcatgcaccaccacacctggctaattttgtatttttagtcgagacagggtttcaccacgttggccaggctggtctcgaactcctgacttcaagtgatccgcccgcctcggcctcccaaagtgctgggattataggcatgagccaccgcacctggcctcaaaataatttttaaagtcagtagaacttcccatttttgaagaagaaatctcattttcttgaatgctcacttttagtctttaacacaatgtgtaatcttttgggtaagaaaacaggaaacatttatttcttaatattttaagatatttgaacagctttatcttttatttcccaagtgccatatgaagcatgttattatggtaaatgttagtataatgtataatttgctattatcattttagttgtggtggttgtgatgtttaattgagtgggatggcttttttccagaatggaatcactagttccccttgtacagagtttgaaaaaacggatggaagtaccagactatgaaatggtaaatattttatattaatgtgtaaaattgaccctttgtaaagacaattttctgggtagaagaatttcctttttgttaaagtggttcgtttttgtttgtgttcctgtgaagtctgaaacaattawtaagaaaagaaatgagtgaaaaaaatacatacgttgaaacagaatactgttttcctggaaaagtcttccaggaaaaacttttttttctcaattttatgtatgaagcaaaagtcctgtgtgttttttgtaattttgtctgtggtcggatctctcttcaccagacaaaagaaaagtacacaatttctaaaatggtccattttttattgatgagtatttatactgccttctgccttccttcttttcctccctatttaaaaacttttccgtttgtaaaaaccacaagacaaagaaaaaagagagagctgtgactagcacattttaaatgtgttagctgtttgtcaacaggkatctgaatgctatggccaaagatacttttagtcataatttatttgtatatcattttgcagtctttgaagcatatattttcccatttgacctggtacttgagatgagaaagctatagcttaaaatgttcaagtgacttttctcagatttgatgccagggctaagacttccaagtctccttcctcttagtgtggtctttctcttacttcagtaagctgggtttgcatattttatttacttatggaatacagtcagaccactgtgtttgactaaagttgaagtattgatttaagtattgattgaatttataagaatttgctggtactctttaaaataagagatgtctattttcacactgctgataaagacatacctgagactgggcaatttacaaaagagatttaatggacttacagttccatatgattggggagacctcatagtcatggcggaaggtgaaaggcaggtctcacatggtggcagacaagagagagagcttgtgcagggagacttttgtttttaaaactgtgagatctcgtgagactcattcactatcatgagaacagcacaggaaagacccacccctacaattcaatcacctcccatcggcttcctcccactacatgtgggaattgtgggggttacaattcaagatgagatttggatggggacacagccacaccatatcattccayccttagcccctcccaaatctcctgttctcgaatttcaaaaccaatcctgccttcccaacagtccctcaaagtcttaacttatttcagcattaactcaaaagtccacagtccaacatctcatctgagacaaggcaagtcccttccacctatgagcctgtaaaatcaaaagcaagttagttacttcctagatacaatggatgtacaagaattgggtaaatacaaccgttctaaatgggaggaattggcccaaaggggcagtgcaagtctgaagtccatcagggcagtcaaatcttaaagctccaaaacgatcgtctttgactccatgtctcacatccaggtcacgctgatgcaagaggtgggttcgcattgtcttgggcagttctgcccctgtggctttgcgggatacaacctccctcctggctgttttcatgagctggtgttgagtgtctgcagcttttccaggcacacagtacaagctgtcagtggatctaccattctgggatctggaggacggacagtggccctcttctcacagctccactaggcagtgcccctagggactctcagtggggatccgaccccacatttcccttccacactgccctagcaggggttctccatgagggccctgcccctgcagcaaacttctgcctgggcatccaggtgtttccatacatcttctgaaatctgggcagaggttcccaaacctcaattcttgacttctgtgcactcacaggcttgatcaacaccacaaggaagctgccaaggccatcctctgaaaccacagcccgagctctatgttggccccttttagccatggctggaatggctgagacacaggacaccaagtccctaggctgtacacagcactgggaccctgggccctgcccatggaacaattttttcctcctaaatcttcaggcctgtgatgggaggggctaccgcaaaggtctctgacatgccccagatacattttccctattgtcttggggattaacatttggctcctcgttacttatgcaaatttctgcagccagcttgaatttctcctcaaaaaatggaattttcttttctttaacattgtcaggctgcaaattttccaaacttttatgccctgtttctctcttaaaactgaatgccttggccaggcacagtggttcacgcctataatcccagcactttgggaggccaaggctggcggatcatttgagkccaggagttcaagaccaacctggccaacatgttgaaaccccgtctctactaaaaatacaaaacttagctgggtgtggcagtgcacacctgtaatcctagctactcaggaggttaaggcagagaatcgcttgaacctgagaggcaaaggctgcagtgagccgagatggtaccactgcactccagcttgggtgacagagcgagactccatttcaaaaaaaaaaaaaactggatgcctttaacagcacccatgtcacctcttgaatgctttgctgcttggcagtttcttccaccagatatgctaaatcatctctcaacttcaaagttccacacatctctagggcaggggcaaaatgccaccagtctctttgctaaaatataacaagagtcacctttgttccagttcccagcaagttcttcatctccatctgagaccacctcagcctggatttcattgtccatgtcattatcagcattttggtccaagccattcaacaagtctctaggaagttccaaactgtccaacatttccctgccttcttctgagccctccaaactgttccaacctctgccagttccaaagttgcttccacattttcaggtatcttttcaacagtgctccactctactggtaccaatttactgtattagtctgttttcacgctgctgataaagacatacccaagactgggcaatttacaaaagaaagagatttaatggacttagtgttccacatgaytggagaggcctcacaatcatggcagaaggtgaaaggcacatctcacatggcagcagacaagaagagagagcttgtgcagcgagacttgtgtttttaaaaccatcagatctccagccgggcatagtggctcacatctgtaatcccagcattttgggaggccgaagcgagcagatcacctgagatcgggagttcgagaccagcctgaccagcatggagaaaccccatctctatgaaaaacacaaaattagccgggcgtggtggcgcatccctgtaatcccagctactcgggaggctgaggcaagagaatcgcttgaacccaggaggtggagtttgcagtgagccaagatcatgccattgtactccagcctgggcaaaaagagtgaaactctgtctcaaaaaaagtaaataaataaaactgtcagatctcctgatactcattcgctatcatgagaacagtgcaggaaagacccacccccacagtcacctcccaccaggtttctcccatgacacatggaaattgtgggagttacaattcaaggtgagatttgggtggagatacagccaaaccatataatgagcaaagcaaaagaatattttggtgaaacctaagcaaatccaagacttaaacttttttgtttaacttttttttttttcccctgggagcatatattcaaattgccctgaataaacacttccaagacttacactttttaaaaatggtaattaagaagatcgttataagatacttaaggtttgaaaatgttttgaggccaggagcagtggctcatacctgtaatcccagcactttgggaggccaaggcaggtaaatcgcttgagcccaggaatttgagaccagcctgggcaacatggcaaaaccccatctctacaaaaaatacaaaaattagccaggtgtggtggtgcacacctgtagtcccagctacttgagaggctgaggcaggaggattgcttgagcctgggtggttacaatgagttgagatcctgccattggactccagcctgggcaacagagtgagactttgtgtcaaatttaaaaagagaaagaaaatgctttgaattcatacaatattatcaaatatgtctgcaggcaggtctgctttaatcattacattgcatctgggtttttttcgttgggtgggtttgatgttttttggggggcagggaatggctagggctcagtcacagattatgtaatccattatgatatgccctacagctgcagagatagaacgctaaatagttttatcattttggcaaaatgaacatccagaattcatccttttatcacactgactgatcattgccagttaaattgttgatgtgtatccaaagcctccaataaaatatttgattagtgtgttttttcatactttgcacttgygtactctaggcaaaactatgacatagttaagttccagttttcaaaacrttaaagttaaggttgcagaatggtagcatgtgagccacttctaactttcaggcaagtttagtgtagtgctaagactagaacatattccattcaaatttaaaacacataggtagatagcagtagcttatggttatacataaaggatacacaagaaaacagtttggttaaataaggtaggataaatattttctcttgtatcctctcaaagctttgaatgtagtactaggtgcacatattaatatttaaaaagtaagtaaaataatgtgttaaaaatgagataagaatatgtacaatttttttttttctttttgagacggagtttcgctcttgttgcccaggctggagtgcaatggcacgatcttggctyactgtaacctctgcctcccgtgttcaagtgattctcctgccttagcaggagaagctgggattataggcatgtgccaccacgcccggctaattttgtatttttagtagagacggggtttctccatgttggtcaggctggtctccaactcccgacctcaggtgatccgcctgtctcagcctcccaaagtgctgggattacaggcatgagctaccacgcctggcctcaactttttagaatctagatgaaatggataatttgatagaaaatgtgaattaccaaaattgacccaagcccaatgaagtagttaaagaattattctaaaaagaggcatctggcccagacaggcatataggcgagttctaccaacacttcagagagcagataacttttatgacatagaaactgttaaggaaaaaataatcccaatgcataaaaatattaaaaattaaaagtttttcatatttaaggtgttggatatcccagttaccctgatttgatctttatatgctattatgaatcacatgtaccctgaaaatatgcacatcttttatgtatcaataaaagtaaagatttgtcaataaggccattaatgattaaagaagcttataaaaacaactgtcatacagtgtaatttttaattgtcttattttcaggttcaccaggctggtttaacctgcgattattcagaacttcctcaccatatcagcacagaacaagaaatagagtgtcttattcaatctgtgcattatttgctgaaaaatttaccaaatcctactcttgtgacaattgcaaggtaagtgtgttcagcagaataatggcaaatcagagatgtgcacatcctaatctctggaacctgtgaatatgttacattatatggcaaaaggaaattcgcagtgtgattaactcaaggattttgagatgagattatcctggatttatcaggtgggcccagtgtaatcacaagggtcattagaagagaaaggcaggagggtcagaatcagagagagtgattcgaaaattctacacttcgggctttgaaggtggaggccacaagctaaggaacacaggcagcctttagaagctagaaaaggccaggggacagattatccctgggatcttacaaaaagaatgcagccctgtcagcacctttattttaggacttctgacctccaaaactatataataaattagtgttgctttaagctactaagtttgtggtgattttttatagcagcagtaggaaactaatacaatctctgtaggtaaataacctggtcactagagcgtaaaatgagtttatcagtggtcttacagattatctctttaggtttgaaatacttgtactaaggagtaggccagataactaattccagttcttctataaagatttctgtgctgctcttctcactctgtcctctagaaggctttattcacccttatccggaaccaggagacactggttaatccagttgtaactggcagcagcattgtaactgcccagtgcaactcaggttgcagttggtaagttctggaaagactcccaaaatacagatatctgccccaacctactttgctcttttctgcttcctactgcctaggaaagtaaatccaacaccagcacatcgccacatttcattttggaccaagccatggatcctttataattttgtagttaacaaatcatttttagaaataggatccttttatcagttggaaaacctcgaccctcatcatttctagccctagcacacacataataaaagatgttccatcgctaagataataagcccctgtattcccaagcaacatctcactttcaggcaaacaatggtctagcaatcaagcattaaggcacacacygcatgtcaccttrcacaggttaatctctttcagatttctttaaagggatagtaattgtgcctatttcatagagttgctgtgaaaattaaagaacataatttatgtaaggtgactaacatggggtaaaccttyactagctttcaattgatattaatccaaagttcagcacaccttaatttctgttttacattgaaatgaacacatgcagcttttcctcacagtatrattttatcctatgtgtatttttcttctttctctttctgttggttctaggtcaagtctggatgattactgtccttctgaccaagttgacactattcaagaaaaggtcctcaatatgstacgtgccctctatggaaatctagacctccaagtgtatgcagcagagtctcctccatcttgaaacaaacaaaacattaggctcctgttgtatcttggtttagtaacaggcccttaattaacttatttgtacatgagtcttccagagaacactgttttatattaactttcagttgaaatctttcagatattttgaatctctgaacaaccattgtcagttgtgaatgatggtaaattttttggcatcaagtctcataaccccaactgatagaactgttgcttatctgtcttccttaagtattttttagggttttgtttttttttttgtttgtttgtttgtttgtcttcacttttcccccaggtctgttgagctgtatgagattcattcatacttcatttattcattcaactaatatttgttgaacacttacatgtaccagacattattaagtgctgggtatatggtaatgaacagaatagacaaggcccctgcccttttaggggagacagatgagaagtaaattacgggttatgagaaatgttatgaaggaaaggacaacaacagacatgtcttagtacttagggtatcatggctttataggaaagtaacattctctatctttttttttttttttaattttataaaaatagagatggggtctcaccatgttacccaggctggtctcaaactcctgggcacaagcaatccacctgccttcgcctcccgaagtgctgggattacagatgtaagtcactaccccagccagaaactaacattctcaaaagctactaccaaaaaaaccccacaaatttgccaatccatgaaagtatcataggaagtctacctttccaaggaatttggcattgtggccctgctcttgccaaatgctctccagcattgttggtatcaaggtggtctggttgagtaaacttgaccaaacaaaaattaactgttttttgcttttctgtttttgttttgctgatcaaaaaagcccttcagggtcttttgtgcatccaggaggycattgtagatatcaataatatagtgcctaagtgccactttattgccaagtctagattgatacttttttcagataaaccagctttttatgtaaagagtaagggaaaaagttaaatctttaattctgacctgccataaatacccaaagatataaactgtcttccaccacccccctcataactaagacatccttcctgagtcactcttaatcatgaaacttgattttctcaattggccagtcttctgatctttagtatctctttagttcagtaatttttacctacctacttgatttattttcctttaaaaggtgaaatgacatttaaagaaaaacaaacacccatcattcctcagtcccaacacagcmgttcttttcactcttgcttgtaactttcaggccttacccacatgtgttcctatagagttgcatgtagctaaaattatagtgtgctgcctaactttgtgctaataacgaaggacacacattatcattgcctcwcagtggatggcacctgaccccatttttccaaggattctattttccagtgaatttttgtcaccgagttaatttcccaagtctgatagcatgaatgcttatttgtgctgtgaaaagcagagcagcctgastcagctttccattttcataggataatatgtgccaaaaaaggtttattttcttggtaaaatcagrattgtagaattgtgctatttttaatttttaaaatttttggttagagcttatagacattacttttatgattattttgcgtgctaaataagttaaagggtatgttttgaactatagcactaattaatgtgtgtgatcctagtatgttgatagctttgattttgtgagtggtttactagtcatttattatgattcccatgaactctgatatgattcattgtggttttaactcaggttgaataaaagcatccatttcttttataggaaggtttgtttaattctcatgttctgtgatcatctctttgagaataaaattcagtccctaatagttgaaaagaatcaacttagtaaattatgtcttgcacattccaaataggaaggtatttactttatcaagatgtgtttcatttgtgttctgagtaccagtgaggggataccgtggtacagtgttttgaattgtgtactaatatcattaaagcatgggattttagtggctttttaaaaaatgtgacttaagtgtaagcgtagactttaacttaataagttgtgtatttcctagtatctacggggaaaaaatttaagtccagcctttcataataaccttttgactgtcaattttagatctctttagaaacatttcctatagttggccatgcgcggtggctcacgcctgtaatcccagcactttgggagaccgaggtgggcggatcacgaggttaggagatcgagaccatactggttaacacggtgaaaccccgtctccaccaaaaatacaaaaaaaaaaaaaattctccaggcgtgtaggcaagcacccgtagtcccagctactccggaggctgaggcaggagaatggcggaagcccaggaggcggagcttgcagtgagccaagatcgcaccactgcactccagcctgggcgacggagacagactctgtctccaaaaaaaaaaaagaaagaaatatttcctataggcacgggtctttatgtgttctagcttctcaaggagctcttagtcaatgtccttcacactttttttttttttttttttttttgaggtagggtctcgctgtgttgcccaggctggaatgcggtagtgtgatcttggctcagtgcagcttcaacctcctgggctcaagcgatcctcctacctcagcctcccaagtagctgggactacaggtgtgtgccaccatgctaggctttttattattattattttgtagacatgaagtctcactatgttgctcaggctggtcccaaactcctgggctcaagcaatcctcctgcctcagcctcccgaagtgctgggataacaggcgtgagccaccatgcctggcctccttcactctttttatgataatctctcctagtcttgactttgttttcgcagcagtggccctggcttgctggtagtaaattcatcatactgccagtagtttatagtcagtggtgtgtttctcagtacaagattctctcattcaccatacatctcaagagagagcacttcagtgaaacttcaggagtttttgtttgacatctttcagaaatgcttgacatacagtcttgccttctcaaagtatagtgatactttgctgagaatcagcattttttattgtaattttttttttttttttttttttgagacggagtctcactctgtcgccaggttggagtgaagtggtgcaatctcggctcagtgcaagctccgcctcccgggttcatgcaattctgcctcagcctcccaagtagctgggactacaggtgcatgccaccacgcccggctaatttttggatttttagtagagacagggtttcaccatgttggccaggatggtctcgatctcttgacttcgtgatccacccgcctcagcctcccaaagtgctaggattacaggcgtcagccactgtgcccggcctattgtaaacatttaagatgtacgacatgatgttttgatatacatagtaaaaaggttactatagtaaatcaacatatccacttctcacatagttgccctttgtgtgtgtgtgtgtatatgtttatgtgtgataagagcacctaaaatctcttagtaaaatcctgagtgaactgcagcattattaactgtagtcctctaggcttgctcatcttgggtgtcagccactttgcattctttgacctacattacccattttctcctccccactgcctgttggaaccagtgttttattctgtagctctgtacgtttgactctttttttaggcttcacatgaaagtgagggtcagttttataaacactcattgtcctgctctgctgtgtcgacttcagtggtagcacttttgttgcagttgcagtgcttgtttctgcactaattggtcttaggctgcctcttgcttttgcagttctagctgcaccctgggattccagacatcagcaccatcctttccctttattctcatttgcattcacaaatgaagttataataactaaggagattcccacaaaccttggttcttagaatacagttctctgaacagtgaacattctggtcactcactaggagggtctatcttaacattgcaaattagtaaattggcattctatacattaatatcttgtcagtttgattcctgtaattcagaaacaggagttctgtgatggaggctaaaacaaggctgagatggcacatttttactttcttggagggccttcattgaatagtcagccagcctccaactacagcatctctaccattttgctaacttcaaacgttccttgacagcaagcagagctctgaagcctgtcagctattagcactatttagaagcccctgtggccgggcgcggtggctcacgcctgtaatcccagcactttggcagaccgaggcgggcggatcacgaggtcaggagatccagaccatccaggctaacatggtgaaaccccgtctctactaaaaatacaaaaaaattagccgggcgtggtggcgggtgcctgtagtcccagctactcaggaggctgaggcaggagaatggcgcgaacccgggaggcggagcttgcagtgagtcgagatcgcgccactgccctccagcctgggcgacagcgagactccatctcaaaaaaaaaaaaagcccctgcaccccatttgaggtgactcatgccaaaattgagctgagtgagaagttccatgactgaatgcaggagaacgtggtaagaatgtgggttccaggggccaaccacctgactccagtgttcccttccccatgtgtgagctctgtgacctctcttaagcctcagctccccttttacaagaagagaacttaactcagccaggcgcggtgtctcacgcctgtaatcccagcactttgggaggctgaggcaggcagatcacgaggtcaggagttcgagaacagcctggccaacatagtgaaaccccatctctactaaaaatacaaaaaaattggccgggcatggtagcgggcacctgtaatcctagctactcaggaggctgaggcaggagaatcgcttgaacccaggaggcagaggttgcagcgagccgagatcgcgccattgcactctggcctgggtgacagagcgagactccgtctcaaaaaaaaaaaaaaaaaagaacttaactcctcaggacattatgaagaaaaatacatataaagccctcagcactggaatcatttagtaaacattggctgttgtttccaaactcagcccaaatgagaatatcctgtggtggctgctccagtctcggctgctcttctcataattctccaaatactgattattttcaaccgcctatcagcccccatcatatatctgtgaataacagaatttcaaggttagaggtctattcaaaaaaggtgggttcttgcccataaggaaggaagagatcactttaggcagttactgataatttaaaacttttgtctttcagttggtgcaagcattcatttattcacaattttaaatcttatactctcgtgcaattacagagggtcaaagaagtcaaagcttgctccagcttctttatactttcccttctgcatgcttgcagataaaactcagatttgtgatgccaaatttttgatgtagacagtgtttggaagttgctacccctggacttacgaattgccttcatagaatctagggttatcctcaccatttttggtacagctgatttacaggcaacttgaaataacaacaacaaatccctcatgaatcagccgaagcgtgacagggaggtggggtaaagtgggtacctccacccagttcaccagtatttcccaaaccactcccaagcatttccttcacctgggcctcagcctgaccaaagatgaacctcagcttattgagtggtaaggaaaatgggatcattagagaaagggggaatgcctttgtcagcttggcttaataagatcacaacccatcagctgacgctgatgactcaaggagggaggctgaagtcagggttagcgctaggcccaaaggccagctttttgggcaaattactctgagaactgcacagccacaccatctgccctctgcagcattgccccatctggagcaggtataatgaggggcagcatcatcacaaagtggcacctgaagtattggtggctttggaatcagtctaagtccaagtatttcctctgcctgttacaagttgtataaagttggacaacttaaagtgtcagagtcccttgatttaggcacgattcaaggcccagcttgcgttcctacaggacaactatgctctgtcaatgcacttcagtgagctatttctgccctccccatctgtccatgagctccttgagtgcatccttatacatttttgttgctccagtctctggcatggtccctgtcacaccataaggcctctaaacatgtataatgaattaataaatactgaaaaattgtgatggtcactggaggctcggtggtgataagccttattatctgctctatattatacatcctattatgaacatgccgtctttgagagcacattaaacaaatgcattaatgcaaggatgaacacttaccaaggattaagtgtactgaatacaagaatccagaacagctaaaagaaaaatacttgtaatataatgattgtgtccatagaacaactgtgttataaacaaaagaagtccaaggcaaattgtgttattttcccagtagttttgtgatctgttttgtgttcttacggtaaggcctgataagaaccatgttccacaatgcatgtgtaagcatgacctaaaaatacatatagtttaaattcctgcctaacattcaaaatctaacatttgatatatccaaaaactgtatgaacttttgatccctaaatatatattgttttgccattaaaggagtgacagttattctcacttctgatacttacttccatttcgaggtaacttctgttacagtcctgccttgctctgcccttttactccttcctgagtgaggaaaaatgaaagaagagaattacaagatgccttcttatagaaatatatgttctgttttgcctttccatgcctttggtttgtaaggacgggctccatgggagaggcttacagttgtcccatgctgccagtggatgacaaagtctgtctcaatgcagtgttaagaagctagctgttgccacagacataagccatgttctctaatatcagtttcatcagtaatagtgatatatccatctgcctgaaggcctgcgcctatttctgagttagtagaaacaggagagaatggtgatgtttcttgtgcttcctcaaaccccagctcaacagtgcttgctcgttaaatagtatggacagtttataaaatagcagctctttggaattctaatcaaaaaggagggcaactctgaccattgtgaattaacctagaacaacatgccttctctgaatgcagtctgtttttctgctatacagtgtaaacatttttaaacttaagatttgttttgcttttagacgtttttcttggatgtccgactggtcatttcatttttatttgacatcatgctaaaacaggtaacacagcatccttgtaggcttcctgtataagcaacagccagttataaaatattatagaaaaaagatcctatttataataccataacttcaaaaaaaactattagtaaacaaaataaaaaattattaccacctatacaaataaaactttataatattactaaagaataaaaatgaagacatgaccatctatgaagagaataatagtgcttatataagacgattcaatattataaaggtgtcactgcttcttatatcaaattctaatgtttataatttccataaacataccaaaggaggttttattttaaccagtgaagctgattc

SEQ ID NO: 97733 - DNA, 128662 bp, Homo sapiens
  misc_feature (1)...(128662): n = A,T,C or G
tgtgatcctcctgcctcggccaccaaaagtgctgggatttcaggcctgagccacaatgcccagccccacctaattttttttaaaaagttttttgtagagatggggtcccattatgttgcctcggctagtctcaaactcctaggctcaagtgattctcccacctcagcctcccaaaatgttggaattataggcaagagctactgtgcctggtcaatttgctgttatttttgacaaaggaattttcttgggaagtaaaggcacttcagatttagctttcctcctgactaccctaaagtgaaagttaagcttgaactcaatttaaagtggtagttgtgcagtgtttgtttttagatgactcatgtatgatttggtaacacctgccttgatttgatctatttttattgtaggagaaattgacacaagattctctttttgtgcggtggcaactttggctttgttggtaagctttgaatatttgattgaaatgattaaagttcatgaatactctggaattttttttttttttgagtctgatctgctgaatactctggaatttaacaggcatctttttttttgtttgtaggggaagcttgatgctattaatgtggaaaaggcaatcgaatttgttttatcctgtatgaactttgacggtggatttggttgcagaccaggttctgaatcccatgctgggcaggtaatttatgaatacagatgaaaatgtattgtcattttggaagccagtgtagtaaaataagaaaattggttatttcagtgtttgtcaaatacacataaagttaattcgactgtaatagggcatcttacataagaattgcttaattgctatcattactttgctttatatactatatacctttctctgtcggtggattcgtctgacctaagcaaacataagtgggtttataagcaccaaaacacttttgttttccattaatttttcactaaccatacagataaaaaaaaaacaacacatttttctttctttcctaagataaattatgaacctcttttcttgtgccagagaacactgaatatgtgaatggatggctgtgaaatactagccatgaagaaattttgacaataatatttcagtgcagaattgcatactagtaatagtatgcttggattttttcagatatgtggtattaatacatgtttggaattttaagtgtcagatcaagaagaaaaacttaagatataaagtggtgttttaataatttgagttttatcacttttaatgtcaagaaattattatacacataaactttatgtctgtaattttagatctattgttgcacaggatttctggctattacaagtcagttgcatcaagtaaattctgatttacttggctggtggctttgtgaacgacaattaccctcaggcgggctcaatggaaggccggagaaggtattgtttgataagccatattctgctagctttagaaccttgagtgaatgctgctgctttgtcttgcctgtttctatattgtaaattggccatgagcttatttattacctttccctgttgtgaattttcagtaatatatcctactaaaagactccccttgacaaagtagacccccatgagttgaaatactcattgatcctaatgtccatttccagacagtcttgtacaggaatctccatgtttaaggacagttgattttggcaaattggattttttaaaaattagactacagaatttttgtttgcaatcttcttatttaaggaatacccagataatttggtttggagagaagattattaaattttcctccacataataggtctctcttatcaggtctgtaagggacaaatagtgaatactcatttgcaactatgtaattgtcctgtagagcaagtgcagccataagtggtaagaaatgaatgagtatggctgtgttccaattacaattattatggatggatatactcgtatttcctatgtcagatggaatcttgctctgttgcccaggctggagtgcagtgacgccatcttgattcactgcaacctccgcctcccaggttcaagcagttctgcctcagcctcccaagtagctgggactacaggcgcacggctaatttttgtatttttattagagacggggtttcaccatattggccaggctggtctcaaactcctgacctcgtgatctgcctgcatcaacctcccaaagtgctgggattgtaggcgtgagccaccgtgcctgacccaggactatatttaaatgatttataaatgtaaaaactattcctacactatagatttgactcaaggattgtagcttgctgtgcccctgccctctgaatgggacgtggtggtacagtagctgggattacagtcatacaccaccacgcccatccaattttgtatttttagtagagatggggtatcaccatgttcatcaggctgatcttgaactcctgacctcaggtgatctacccgcctcaacctcccaaagtgctgggattacaggcgtgagccactgtgctcggcctgtatttttatttttaaaccttagtatttctgaataacaacgggtagagaaacacccgcagtagctgtctacaatagagtgaaataaaaagcctgaggaactgtcaacagaaaaatgggtggccgtggggagcaccgggacctgcacttgcacacaatctagggcagcttctaatgagtctatgagttactcagggatctcattaaaatgagatcagccttgagtggggttttctttatagacttctgtcaccatattttgaagagcaagggtttagttgattttaagcaggtgtgtacccccctggacagtgcttgtagaaaaacagaactatacccatggatttcatgattatactgctagcttcttggttaaggggctgagttaggcattcattgcagatagaaacaaagcagatgcatgcttatcagtgagtactgagatatttagcatggttacctatgaattgaagtttggtctcttcttacccattaattgattatctttcattctaagcaagtatttcataccctgcatatcagtatatccctggatttcgtccttccacatggtttgacactttgaacatcagattacctaagagtgagacttaacccacttttaaattgttctcaaaattagggaaataaaagagaatgaaattgtggcaacttttttccctcctagttaccagatgtatgctactcatggtgggtcctggcttccctaaagataattggaagacttcattggattgatagagagaaactgcgtaatttcattttagcatgtcaagatgaagaaacggggggatttgcagacaggccaggagatatggcaagtaatatttctgacatatttctataaattatttcagcgtttgcattacttcatggttccatggatttccagggtggcattccgagtgttgctttgaaagcagtttttttttctatttattgtagagtgtatgaaggatatagaacaatcttacagaaatttcttgtcgcttgttgctaacaaaattagtatatggtaaaggtcaggtattcataatttgaagttaaagaagttttcattttgtgatctgtatataaattcttttttaaataggtggatccttttcataccttatttggaattgctggattgtcacttttgggagaagaacagattaaacctgttaatcctgtcttttgcatgcctgaagaagtgcttcagagagtgaatgttcagcctgagctagtgagctagattcattgaattgaaagttgcatagtatagttttgccattttaacatttctgtatttgaagtgcttatcgaatctaaaagtgactactgttaatattttgtatattgtgttaaattaattttaataaattatataattatacatattgtaaaataaagaccggtattttattttctgctttttattctgaagtcctgttattctgactacagttctttgtgtatacttctgtgtctgttatgttcaataactgagctaacataaaataactctaggtttctacttgatttttcccccatgtatacctttcatctgttctatagcaagttgatgtaaattggtttgtcaacaagaatgttaactgatgaaagtggatagaacccatacatgaattaaatgatgcacaaaataaatggctgttgaaatttggaaatgattgataggtttgaatatggttattctgaattggtcacagacttaggttaaatggcaatctaccatcttaaaatggggttgtgattcggactgtccttttttttttttttttttttttttttttagcattttatatatcagaattacccaaagaaggagttgtcttcaaataaggaaacactaacgggtaagttgatggtcaccacagtatttttttgcacctgtctttttcttaaaaagctaaaatgggtacaatcactcttttttatttttttgtgacagaatctctgttgcccaggctggagcccagcagcacgatctcagcttaactgcaacctccgtctgccgggtttaagcaattcagccgcagcctctcgagtagctgggactacagccgcacaccaccatgcccggctaatttttatgttactttagtacagacagggtttcaccatgctgaggagctggagaccagcctgaccttgtgatccacccacctcggcctcccaaagtgctgggattacaggcgtgagccaccacgcctggcctaaaatgagtacaatcactctaggggtttacagttttggtgaaagtgaggtattctctatttttaaattttattttttagagacagggtcttcctttcttccccaggctggggcgtagtagtgcaatcacagctcactgtaaccttaaactcctgggctcaagcagtccttccacctcagcctcctgagtaccagggtctacaggtacctgccaccatgcccactatgcccagctgatttcttaattttggggacaggcactgtcttccccaggctggtctccggaggtgaagtaatcctctggcctcagtctcccaaagtactgggattacagggaggagccatcgtgcccgatctgaaaataaggttttttgatggaaattgagatttttctcaagtatgtttggaatgccctgtgcaataatcattccaagaacagagatgttcttaaggactgttgtcactgcatgtgggtaaaccgctgtgcataactggtttattgagatactcaacagtggcaggatttcagtagtggtgtaaattaatgtcttctaatagcttctgtatggcagtatccagataatttcgtcatgtttaatccatggatctctggtaagttggtactattggccttatttaaggaattttctaaaggtcaccactgcaaagctggagtttgaacttctagtgtgccattaactgatttatatgttagaaaccacagtactagaaattggtagatggggaattgttaactgagagatcttacccagtcagtctttccctgtttcctactctactatgcacacagccatgtgcatactatcttttgataatataactatctttcctatatttggtcacaagatcaaccttaggtgggttatgctgtgtgagcattacacgttctcattgtgtcaaaggcactgggtgtactgtgttgggtggtttctacatttaaagataagctagtgtgcttggacgtgtgggaaatgcatgtaacatttgcaataagggagattgggtgctgtgagaataatggggctaacaaatcgggtggtcattgatgggccttgcagagttctggtcagtctgatacctgcaggctgaggatgttccagtgaggttcatgtggaaagtgatgggtttgggaatggctggaagcagggtcatagacctgaagtacgtgaatccatgtggaaagctgagcctgcctgcgcctgcgcagtgcagcttagtgcgtcggcgcgcagttctcccgcccgtttcagcggcgcagcttctgtagttgggctactggaggggtcgctcagaaacctcatacttctcgggtcagggaaggtttgggaggatgctgaggcctgagatctcatcaacctcgccttctgccccggcggtttccccgtcgtcgggagaaacccgctcacctcagggtccccgctacaatttcggactccaggagactccacagagccgcccttcggtccaggtggtctctgcatccacctgtcctggcacgtcaggagctgcgggcgaccggagcagcagcagcagcagccttccctgccccgcgccaaactcccggccagctcaaggcaaggagtgattgggtggaggagtctccttgaggctagaggccggcagttcatggaggctcgggggcacgtgggtggtggttaccacagtgaagttgtgatttggttggggcgtgagatctgagtgccctgggaatttggtgagtctgggtgattagaagccttgacttttcaaattggttctattgcaagaccttgactgtggatggctcagttctgagaaaggctgaagtatcccatataacgtccctcacagtgtctgacaaatgacagtttgtgcgtgagtttgctgatagaagttgtgagctgatctttggctgctgaatttaattctccaaatcctgctaaggtgggataaaatagattaaattgaacatttcatctaattcaggaaaataatatgtttagtattaaaagatgtgggctgggcggtggctgacgcctgtaatcccagcactttgggaaaccagggtgggcggatcacttgaggccgggagttccacaccagcctggccaacatggtgaacctcccacccccatcccctatctctactaaaagtacaaaaattatctgggtgtggtggcacgtgactgtggtcccagctactcaggaggttgaggtgggaggatggcgagtccgggargtcgaggctgccgtgagctgagattgcgccactgcatttcagcctgggtgacacagtgagaccctgactcaaaacaaacaaacaaaaaagatgcatgtccttcaaatcatttattattttgttagtctctattcatgacaaagcatcaccatttttcacacacgattgcaacacaatggtaaagtaacaaataccaaatccaatggtcatttttcagttcatctcatgtgacctttctgctgtatttaatgttcttaatttctttatttttagaaacagagtctcgctatgctgcccatgctggtctcaaactcctggtctcaagtgctcctgcctcggtctgcccaagcattgggattacaggcatgagccactgctgcctggcctatgtttaatgttcttgactggtcttctcttaaactcttttaatttggcttccttgattccacttgcccctgtttttctgctacctcccagagaattgctgtgcccacctttgttcccaaattatgggcatgtcattaaagctttttttcctaggccacttctacctagatgtgactatctccacagctcagatctcatctacactccagacttacttcagactgtcttctgaagtttttattgatggactaatggatacctcaggctgactatatgattaattaaattcctctctgcacttttttttttttttttgagacagagtcttgctctgttgcccaggctggagtgcagtggcatggtcatgactcactgcagcctcaaattcctgggctcaagcgatcctcccacctcagcctcccgagtagctgggaccaaggcatgtgcccctacagatggctaatttaaaaaatttttttgtagagacagtgttttcctacgttgmccagcctggtctcgaacttctaggctcaagcgatcctcctacctcagcctcccaaaatgctgggattacaggtgtgagccactgcacctagccctcaaactcttaagtgttcttccatccttgtagcttacttactgtaccaccagagttatgtggaaaatgatcttatcatgtcccttgccacttaaatcagtagacctgtatctgcaggtaaaagatcaaactctctagaaggatagccaaagcaattgggatcggtttctaatctttacagatttatccctcatcatttaatatttaccctgctttctaacaaaactgagctacttgcaattcctytaaagcaacatgaatgttcacattgtcagtctaatccctctcttcatcagatgcttggtcacccacttatttatcagtaatgataacattcactaatttatatgcacctactttgttctggcttcttactaggcagacggtatctttgatcctcacaataattttgcagagtagattttttttttgttcctgttttacagatagaaccaaggcccaaataggcgaacaaaggttcaaattatgttagcagctggggataataatctgygctctcaatgaacttaaggttcagtagagaagacagacttaaaaatcaacaaatacacatttaagaaataactgtatttgaggtatttataatttttgaggtaggtataattaaagtatggggacaaaagtgggaaaagacatttcacagagtaagtgcaccttgaactggtcttcaagaataagtaggaagaagaatgccagccaaagggaaacagctggagcgcattcttgagaaaaacacgtgcaaaggcacagaagaatcatgtaaaactgctaataattttgcttggctagagcaggagagtgatctaggtagataaacttgaatgtagatatagttgtgagaattagatctgggagacaaatttaacccagagaccccccatattcaacaccaggtctctggttttggtgactggatagatggtagtagtattttctrattctgggaattttgtaggcaaagcaaattttagagggaagatgatgagctctgttatggacatgctgagtgtgaaaagcctgtgggatatccatatatttatattaagataattgaatataggaaactagagctaagaagagagaaacttgagggaaatatggatttgaaagttaccagtatgttgggaccacagcagagaatatgaagaytatatagcaaaayagaggtcaaggaagtaggaggagaattaagacaagtgaatgagtttcaagaaagggtatatagtctaaaagtagtctgagaacaagaaacagccctctccatctccagtttccgcatctccagtttctggcaaccactctcttccttagctccctaaagcctagraatgctaatggagcacattttatgctggttctacacacgtctttatgatagcacccctacaccctgtccacacctttgtaaatattctctttatcaaattatcccagtttgagtatatcattgattcctgctggaacccatataatgaagttatattttaccctatggtgagtatggggagacacataggaattgtaagaaagagagatactgatcagatttgcttttcagaaagattattggtgatgattcgaagaatagattagagaggtgtaatactggaagcaaggagaagaagaagtaggaaacttgcacaaggaccaaagaagatacaggcttaaaatgggctgggaggagtagagagggatttaaattttagtgatgttaaaaaaaaagaattctagcactcagtcactgagtgttagggttgatgaaggaagaattgagaatgtctcctaagcttatgacttgagtgacaagggacaagctggtacaattaaccatactggtaataaagaattaattttgagggaaagatagagttcacttttggacatttagaatgctgggaagatacctaaaggtttatgcccaagakatagatatagtgacctggagctacattgtctgatagaatattctgtgataatagaaacgtttcatacttatgctgtccgatgtggtaactagtagccgtatgtggcttttgarcatttgaaaatgttgctagtgtgactgaggaacagaatttaaattgtatttaattttgatwtagttaaatactcacatatgctgctttattgaacaatgcaggtatagagctgagaacggtttttgcacttttgaaggattaaagaatcaagaatattttgtgatattaaaattatatgaaatttagaattcaatatgtagaaataaagccatttttaattgaaacatagccattctcatttatttatgtattatctatgactgcttttctatgatagtgtcagagctgagtaattgtgacagtgattatatggcccacaaaagcctaaaatatttgccatctggtcctttatttaaaagtttatgggctgggcatgatggctcatgcctataatcccagcactttgggaggctgaggtgggcagatcacctgaggccaggagttcatgaccagtctggccaacatgacaaaaccctgtctctattaaaaatacaaaaaaaaaaatagccaggtgtggtgggcatgcctataatgccagctgcttgggaggctgaggcaggaggattgcttgaacctgggaggcagaggctgcagtgagctgagattgygccattgcactctagcctgggcaacaagagtgaaactccatctcaaaaaaaaaaaaaaaaagtttatgctgaggcatggtggcttatgcttgtaatctcagtgctttgggaggctgaagtgggaggattgcttgaggccaggtgtttgagatcagcctgggcaatgtagcaagaccctgtctctataaaaaaaaaattagctgtgtgtggtgaggtgcacctatagtccatagttactcaagaggctgaagcaggaggttacttgagcccatgagcttgaggctgcagtgagctgtgatcacactactgcactccagtctgggcgacaaagagagaccttgtctttataagacagtaaaatagactgggcatggtggctcccgattataatcccagcattttgggaggctgagatgggaagawcacttgagcccaggagtttgagaccagcctgggcaacatggcaaaaccccatctctacaaaaatacaaaaaattagcctggcatggtggcatgagcctatagtcccagctactcgggagggtgaggtaggaggattgcttgagcccaggagttcaaggctgcatttagccaagatcacaccactgaattccagcctaagctacagaacgagagtctcacatacagacaaaaaggaaaaattaaaagtttagcaacccctggtttacagtttaaggagtcgttacagctatatacgaaggcttgagagttgtcagaaaatagatgttaatagaaacaaagaggagagatgagatgcctggagatgcataatgttgatttgtgagggaaagcttaaaagtatgaagccctggaggccaacagttaagaagcagaggaaaaaggagatggcaaaggaaactaaaagtggtttaaagagaattcaagatagagagttgtggaaatcaaagagaataggtgaacagagcccaaacattttaaaatttttttagaacttctatgtgccaagaggctatgctaggttgtttatgtacwttatttaaaaattttatgacaatcctgtaaaataggtaatagcttacatcagtagataagtacctaaataaggaactgaagccaattgagtctaaaatgccatttgcataggggagagaaattcaatgaagaaattaacagaagaaggttaaaagaggtctaataattattatacaaatgaaacatatgtcttagtctgtattctgttgcttttaaaagaatacttgaaactgggtgattatcaagaaagaaaacatatttcttggaagtctggaggctgggaagtccaaggtcaaaggaggcacatttagtgagggtctttgtgctggtggagtctctgtagagtcctgtagtggtacagggcatcacatggagagggagctgagcatggtagctcaggtctctcatcctcttcttataaaaccaccagtcctactctcgtgataacccattaacctattaaatcatgaatggattaattcattcatgaaggcagagccctcatgccccatcacctcttaaaggccccacctctgtcctgccacacttcactggggattaaatttcaatgtaagtttcrgaggggacagatattcataccttagcaacacatctggtatatttgaagattaaagggtaatttatgattttagccagagtagttgcagtgaacttgtagaggcaaaagctatattagcatatttttgtatatttatcaataatgtcattaattttgttataatctgtttattttcaaaaatcattttcacatgaaattttatagaaagtgaacatagtggttgggtgcggtgactcaggcctctaatcccagcactttgggaggccgaggcaggcagatcatgaggtcaggaattcgagaccagcccagccaacatggtgaaaccccatctctactaaaaatacaaaaattcaccaggcgtggtggcgggtgcctgtaatcccagctactcgggaggctgaggcaggaggatcacttgaacttgggaggtggacgttgcagtgagccgagatcatgccactacgctccagcctgggcgacaagagcaagactctgtctcaaaaaagaaaaaaagaaaaaaaaggaaagtgaacatggtataaattataatgactaatacatcattgcayaattcaaatctttaagaattgactgttaatttttcaaatttaggttcatactttggaaacaaaagagcttatgcagaaaacacagttncatcaaattttacttttggtgcaagctcatcttctgcacgagatactaattatcctcaaacacttaaaactccattgtctactggaaatcctcagagatcaggttataagagctggacaccacaagtgggatattcaggtaaaataagtggaagattaacctagatgatgttttgaaacttaaaagttttataaattataaattagggttattaagttcatttgaatttatctataactgatatgaatgaaaaataaatacattagtttacctctatccataatttgagtctagattaataaggcaacatagtttctgaaattgtttgttaataaatgtaagtctacattattttaaccattctgacaaaaaaacacacaagaaagagaaacctctcccttttatacatgatggcatttaaatctaaaagttgaccctgatattactagtgagtggtttttttatacttaaattttaatttttatctaaatctatgagattttcttgaagagtagatagataaaataggttttcatgtataacagttttctaaggtatatacaacagaatttcttggttacagggtaagttatgtaaatgcatatatttataagataatgacaaattattttttaaagtagttctaccaaagtataaatggtagttaagtttatattagatctacagaagtcagttttagctctgtagtagaatatgaccttcctttttttttttttttttttttaattttttgagacagaatctcactgtgtcgcccaggctggaatgcagtggtgtgatctcgactcactgcaatgtctgctttccgggttcaagtgattcttctgcctcagcctcctgagtagctgggactacaggtgcttgctaccacgcccggctaatttttgtatttttagtagagatggggtttcaccatactggccaggctggtctcgaactcctgacctcatgatccacccaccttggctcccaaagtgctgggattacaggcatgagccactgtgcctggctgacctttttatttacttttatttttatttttatttgtttgagatggagccttgctctgtcgcccaggctggaatgcagtggcacaacttggctcactgtaacctctgcctcctggattcaagcaattttcctgcctcagcctcccgagtagctgagattacaggcatgcaccaccacgcctggctaattttgtatttttagtagagacagggttttaccatattggccaggctggtcttgaactcctaacctcatgatccgcccaccttggcctcctaaagtgctgggattacaggtgtgagccaccgcacccagccctgacctgtttatttttaagtagaaaataaataccaagttccagtggaaattcaatagacatataaaagacatctctaaggttctaaaaatacatttatgctgttatctctctgttgtaaataacataataatgagcatcctaatacataaagcttttttctgagtctcttattatttccttaaaacacacccttagaagtcaaattactgaaacatagggaaattaccttttttattttttttaattaccattttttgtttttttttttttttggtttttgagacgaagccttgttctattgcccaggctggagtgcagtggcaccatctcggctcattgcaacatccacttcctgggttcaagtgattctcctgcctcggcctcccgagtagctgggattacaggcatgcatcaccatgctcagccaatttttttttttttagtagagatggggtttcgccatgttggccaggctggtctcgaactcctggccacaagtgatcctcccaccttagcctcacaaagtgctaggattacagttatgagccactgcgcctggccaaaattaccagtttttaagaatctcagatatattgccaagtttcttttgagaactggactaatttttaattccatcaatagtgtataaggtaagccaatcttactctatcctcatcattactaacttctaaaatttattatgattattggctaatttagtaatcatcatcatcatcataagattattattaaattagccaataatcattatcataataaattgtattggttaatttattggttattatggtatgctcttattaacaatgtgtaagagtccacttcaacatttgatattgttagactcaatattttccaacctaacagttgtaaaatactacctgagttttttattttctgagtttgcattttcctgattactagtgagattatctttttctgtacttttgggctatatatctttaataatggtctgtgaaattaatgttcatgtctttactcatttttctttaggcttatttttctggatttgtagcaatactttatatattctgagtaataaatattttgatgacttttctgtttggtttttttttttttttttttttttttgagaaggagtctcgctctgtagcccaggctagagtgcagtggcgcgatcccggctcactgcaagctccgcctcccgggttcacgccattctcctgcctcagcctctcgagtagctgggaccacaggcacctgccaccacgcctggctaattttttgtatttttagtagacatggggtttcaccgtgttagccaggatggtctcgatttcctggccttgtgatccgcccacctcggcctcccaaagtgctgggattacaggcatgagccaccgcgcccggccttttctgttagtttctatgtttctagttcttttttaactctgatgggtcattatgtctagctgtgtrccaatatcacaccatctttagctttataataagtcttgatattttgtaggacagccttrccacctgtaccctccacaagccaccttactcttctttagaggagtcttgattcttcttggccctttgctcttccatgtaaattttgggccaatttttcaagctccaccaaaaaacatattgaggttttgattgaaattatagttgtactgaaccaatagatcctttagggagaattgaaataagaggctaactgatatctacagattgcattattttgtcctcttgattaagaatttcctagttttttttaaaaaaagaaatgattattatcaatgtttatatcttttctttatttwaaaatttacagcttcatcctcatctgcgatttctgcacactccccatcagttattgtagctgttgtagaagggagaggacttgccagaggtgaaataggaatggcaagtattgatttaaaaaacccccaaattatactatcccagtttgcagacaacacaacatatgcaaaggtaagtattartaattctagaaaatggttgctctgttaggcagtatctagagtttaaagtcagtgccttcccaatttgtttactttttggtagaataaaggttattcattattatgtcaatgtaaatactctgaattaaaataaaactgtgttatatctgatttttattttttaaatatattttgtccaaaaagagtgtgttttactgttatttaaataagctattgttagtattagtttctaaaattaacatcttcaaattaataatttctggatttattccaaaggtaatatatgtgataatgtggtactgatcataatccttaaagacacaatcccaaatgccataatcccgatgttcaaatcttsaaagatcaaaatccttaatgttgaaatcctgaaagcttaattctagggaagggattaatgcgtttttggttgtacacaagatagttgcatcatgttagatgcatcatattaggcaatrctactaccttattattttatttggaaattaggtatggtttaaggagatgcataggggtgccaaattggcaagggatagacttgtggatttaagtataggtgacaacttgactgtattaaaaaaatacstagtaaagcattatttgggctgtgtctgtgaggttgcttccagaggagatgagtgggtgagtctgagtggactaggcggtgaaaatctgcccttagtgttggtgggcaccttgcagttgaccagggcccagagagagcaaatacagaaattgmatttgtctctctctaagagctgggacagactcttctgctgctgccttggacatcagaaatttgactccacagaagttcgttatcacaacattgactgtgtgtaagcattgtgcrtatacattaaaatgttgaaatttttttgataaatgaagacatgtcctttttgtacatcatttatttgtgaaagataaaatttatttcttgaaatcttagctcttcaggcaactgtgtatgtggtgacccatagaagtttttgatctatctcatcaaaagacttaggttgtccctggtggtatttcagatgaccatatttatgaagcttggtgcagacaattaccaaccatagtgatatgcatttatacattttgctttttgactaatttctaatttttgactaatttttttgtgaatacaatttgtctgctcataactgttattatacctgtgtgactgtcattagtacacttaagtgttcatgcttgcaaaaaagttattattgcctattttattgtgtaaagtggcctatgaagtgtactgttctgtttttatatgtttctcaaataaatccccttttaaaaatgcaaatcaatgtcttaaaattgtttttgaagttatttcttccagaactgtgtttttgggattttggtcttttggtattggggttctggggatttttagactttaaggattttgctcttttgggattttgacattcaggattatggcatttgagattgtgtctttcaggattatggcccaaacccatgataatgctaactccagagagttatttctactgaactgtatttgaattttattttttcagaggtaaagaaaactagtatcttagatcagtcagaatttagcctcttaatttcttgccttcacttcttattttgccttcattttatatcactcatcattcrtttgggccactcgcctattgtcatgggaatttgcatgatctatcaggtagagatagtttactcctaatttctatgttatttaactcaattattattttattttatttttaaaaggtcttgctcttttgcctaggctgaagtgcagtagcatgatcgtgactcactgcagcctcccacctcagcctcttgagtagcagggaccacaggcatgcaccaccacatagagctgatttttaaattttttttgtatagatggggtcttgctctgttacccaagctagtctcaaattccttagactcgagtgatcctgccccctcagaagttgaattgcccctcgggttcccaaagtgctagaattataggcatgagccatcgagcctagttaattattattttgaagatgtgatctagtgttttatttcaagtgtttcattattttttaattctcttcctttagtccctctttatggtcctccagtgtgtagacttccctttcctaataattaattttttattatacytaacaaccttaatgatactagtattgcatactaacttcatctgtaggtattttatacrtttttacaatttcaaaagagtaggaaaaaagtttttaaaaaaaaggaatgttagacaaattgagaatttctgtgtttggaatagttctaagaaatacaccttattttatgaaaagctaagccataaggcagatgtttctcatctgtgtttatgtacttttcaacagttaatctgtaccagtgtggccatactgattgtattgccatagttacccttttttttttttttttttttgagacartgtctcactttgttgcccaggttgccaggttggagtgcagtggcacaatcttgactcactgcgacctctgccttccgggttcaagcaattctcctgcctcagcctgcctcagcctcccaagtagctgggattacatgtgcacaccaccaagcctggctaatttttgtatttttagtagagacagggtttcaccatgttggccaagctggttgtgaactcctgacctcaagtgatgcagtcgccttggcctcccaaagtgctgagattacaggcgtgagccacctcccctggcccatagttacccttattggatgtatttacatttttcacagagtatttggataaaatactaagtataagaatttatttaaaaacaattttattttgggaatatatatttgataagttcaaattaatttttgaacttaaggctgttagaaactattgtgagtaaaatatagcctattttatgacagtattttatgttagtagttatataggagatatatgttcaatatactaccattagaaatatatatacatatatattttattgttattggtggtggtggtgtttgtttgtctgtttttgagacagattttccctctgccacctagactggcgtgcaaaggtgcctggtgtgatctcagctcactgcaacctttgccccctgggctcaaactattctcatgcctcagcctcctgagtagctgggattacaggcatgcaccaccatgctcgggtaatttttgtattttttttttttttttttttttagtagagacagggtttcaccatgttggccaggtgggtctcgaactcctggcctcaagtgatctgcccacctcagcctcccaaagtgctgggattacaggtgtgaacccacctggctagaaacatattttaattgaaatatatcattaggacagttataattttgtgtatctatgaattaattttaaatacttatctcagaaaaatatgaaacttttatttcctaagctttatttaagaaattgtttattcaaatgatttcaggtgatcactaaacttaaaattttatcacctttggaaataataatgtcaaatactgcttgtgctgtggggaattccaccaagttgttcactctgatcacagaaaatttcaaggtaagtgatgtttactgtttgtaacattcaagatctaatcacttatttatttatttgttatttattatttatttatttttttgagacagagtttcactctgtcacccaggctggagtgaaagggcgtgatctcggcttactgcaacctscagctcccgagttcgagtgattctcctgcctcagcctcccaagtagctgggactacaggcgtgtgttaccacacccagctaatttttgtatttttagtagaaatggggtttcaccatgttggccaggctagtttcaaactcctgacctcaagtgatcgatctgccttggcctcccaaagtgctgggattacaggcatgagtgagtcactgtgcccggccctaatcactttatttaaaatttacttaataatatcattataaagaacaataattttagtaactttatatttagtgtcctaaagtagtcactaaatacaaatcctaatctaagggactgttaatacagataataaaaatgatagggaatttacttatttgatttggcaccctgatctactttaaacaaaagaaaacatgttttaggtaataaggaagtttctcagatatacaaggggcagacccatagagaaagcataagtttcccttacatgtattttcctggaaactacttattgtgctgtcagactggttgaaattgaagttcttaggggatagcagctatcagcaagtacctttttctatagggaatttaatttgtattacagaattgtttcagcttcccctgataacatgtactgccttccagttagcctgctactctagtgtctatctgtaggactgtagtgggtaagcactgtggaaccttatccaacaagaatgggggctgtggctccaaaccaagtagacagcattgcagttggaataattccttaggaatgmaaattattttcagaatatactatattttgttatgtttttagacttatcttttactttaacacatttggaaccaagctgaggtttggagtccaatgagttcctttcctgttcctaatatattcagcatctgcagtcatataagatttgtcatggtgctcttggatttcctgtatagatgagctgcctttgactcattgccagagatagtccctattctaaatctattgtctctattagacgaatcactttatctgttctttttcatttataactttatacttcttttcattatgcctatttatccatacctttccaactttcatgttttgttgttgttgttgttgtgattaggccttataattcttttggttataaataagagaaatctaatgtaaactaccttatgcaaaaaaggaaatgtattggcttatgtaactgggaagtcaatggttgaatagatcctgttcctactgtcaaaggtaaacaaagccaaacactagctaaatattttaatcagtaatatgctgttgcaacagagaaaagagtccagtgtggactgaattgaacttcggtttatactgggcattttaatgggagactaagggaataaggaggagtaagcacaagctcagtagagtcagggaagtgaaaaattattataacaaaaagtaagaccaggtgcggtggctcatgcctgtaatcccagcactttcagaggccgaggagggtggatcacaaggtcaggagatcgagaccatcctggctaacatggtgaaaccccatctctactaaaaatacaaaaaaattagccaggcctggtggcacgcgcctgtagtcccagctactcgggaagctgaggcaggagaatcgcttgaacctgggaggcagaggttgcagcgagccgagattgtgccattgcactgcagcctgggcaacagagcaagactccatctcaaaagaacaacaacaaaaaatctgggtttgctaactggcacttaccaaagttaggctcctattctcccacagaggataggagacagggaccctatttttaggtgttaagtggaataaacagtaaattttttttggcagcctgagttttcttaggctggcactttatgagaggctaaggtcatcctagggatgtggctttgagcagttagaaacaatgttagtgtttcgttcaagtctttataggccagttggaggcttagttgagaagaaggcttatagtagcccaggtagagtttggtcaaagagagcatctttatcactactctcattccccatatcatcctttttctactgcagatagtttacttctatgagatttaagaagatgattgctaatggctcaaggctgatgtcatctcagcttagctaacccagagggaaaataatttctttattccagtgtccatgtatgaattccagggaaggatgctgactgatyccgctttgttcagtttctcacacgttagagtaatcactrtttctggggrtagatacactataattgactaatccttttgctgtgagacacagaatactatgatagctaggccttccagaatcacatggaatgggggataagtcctccaaaggcaaaaacaacataatttcagtgcatttgaatagtaaggcagtatagcatagtgcttaagaatagagaagtcagattgtcccggtttcagatcttgactctacgtgacctactgcaagacacttaacttcttggagcttcagtttttttcatcagtaaattagggacaataggagataccaacctcctagaaaattgatattttatatagggtaatcagagatggcctcattgataaggttacatttgggcaaagttctgaatggagtgagggagcaagccatggaggtatttgaggtaaaagtattctaagcagagggaaaattcgatatttttattatcattattactattatgactacacttaccataagaagaccttcattagccaggtgtagtgacatgtgcctgtagtcccaggtacttgggaggccagggtgggaggatcacttgagcccagtagttcaaatctagcttgggcaacatagtgagacccctctcttaagaaaaaaaaacagacctgcattaaatcaaaagcaatatgaagtataaggaaaatggacttcaaagaaatctaaatttgagtctcagctttggcacagatcaactgtataatatcagaaaagttacttgacttttcagaattttatttatatgaaaaccggagttaataagatatgtccctacttggtcatgatattttttcattcttaacagcgcttacatagtctattgatataatattaccttttcttaaccatcagttttattcaaaggaggtaaaccttttacttaacaacttgatgctttttaaaagttccattatcaaccgggtgctgatgtctcacactggtaattccagcactttgggaggccaatgygggagaatcacttgagcccaggagtttgacaccagcctgggcagcatagtgagaacttatctctgctcaaaaaaaaaaaaaaaaaaaattagccagatgtaatggtgtgtgcctgtagtcccagctactcagraggatgaagcaagcagattgcttgtaccctggagttcaaatttgtagtgagctatgatcatgccgctgtattccagcctgggsaactagagtgagaccctgtctcaaaaagattataattttctctttgttctaaataaattcaattcactttatgtaaatagtatatcatagataggtagaattggtgttttcatcttttcacctggggcattataagaatctaccctttctcaattatgatagactatggaaagatgaatataaaactgtgaaaggttatttctatacaaaagattactaaaaggcatagattttagtacaatctatacaaaagattactaaaaggcaaaagattactaaaaggcaaagattactaaaggcaataaaaaatraactgtcatgtttattttttattattgtatctaacatattccattaaatctcataagagtaaggtctaataagagatacaaactactataattcacttagcaagrataatcattctttttatagaaataactaagaaaagttcttatttaaatgttgaaatttttatacaatatttaagccacttacctagcatgtgtttaagaaagcagttttgggcaagcgcatggcacttcaaactttattttgaaattaaaacttcttttcagaatgttaatttcactactatccaaaggaaatacttcaatgaaacaaaaggattagagtacattgaacagttatgcatagcagaattcagcactgtcctaatggaggttcagtccaagtaagttatatatttatttatttttttactagcccacagctaccaatatcatatcaagtaagttataacttaaggaaagtaaataaatctccagtgtgagttccacaagggcagggacttttgtctgttttgttctctgctgcattcctaccacctggaaaattacctggttcataatacatagtaattattgaaatagtgaaatagttgactaaaatttatacacaaggcatatattgctaacttaatttatatagaatttctccaaattagtcataagctattgacctaatggttgctactcactttactttggagtgaaaagctcaagtagctacagtaaactggaaatgtgagggcataggagtaaaacacaggtaaagctgtgttcctgtttctttctgtctttactcctaacagattcagcatgagacagagaatggtatttttggaacacatatttcctagaacatacgaaatagatactttctttgagtcaggttggattacctgtttactcagttaataacaatcattattctcactgagatcataacatacttctctgtacattgagatctgattctaccgttaaagtaccggatttttccaggctgggcacagtgactcatgcctgaaatcccagcacttcgggaggccaaggagtttgagaccagcctcagcaacatggcaaaaccccatctctaccaaaaatacaaaaattacctgggtgtggtggtgcatgactgtcatcctagctacttgggargctgaggcaggagtattgcttgagcctgggaggtggaggttgcagtgagccgagatcacaccactgtaccccagcctggttgacagagctagaccctgtctcaaaataaataaataaataaagtatcagactttcctaacattatttgaatacttagaatggtacatcaaaaattgatgcaaattacctttgattgaatgttacctcctaacacaggatttatcggaatttaaagtcccttaagtgtcagacttgaacttgaaattaatacttgaaattatttattttcattcrtttttatgatttagaggttatttacctagttttcaaaaatatgaaatacctggtgtaccttttccttttgagtttaagcaatgctatgcaaatatttataatttttcttaaggggaaatagataattttttatattaaagacttatagtgatgtattattggtcatcttttaggtattactgccttgcagctgttgcagctttgttaaaatatgttgaatttattcaaaattcagtttatgcaccaaaatcactgaagatttgtttccagggtagtgaacagacagccatgatagattcatcatcagcccaaaaccttgaattgttaattaataatcaagactataggtaagatcatccattttatttgtataaaatatatcggtatatatatatttttctattaatggtaactttaaagttctttttttcttttttaaattttgagatggagttttgctcttgttgcccaggctggagtgcagtggtgcgatctcagctcactgcaacctctgccttccaggttcaagcaattcttctgtctcagcctcccaagtagttgggactacaggcatgtgccaccatgcctagctaatttttctatttttaatagagacagggtttcaccatattggccaggctggtctcaaattctggatctcaaattatccacctgcctcagcctcccaaagtgctgggattacagccgtgagctactgctctcagcctaaacttctttgaattatttgatggagaattttatttaagaggtaggktcttgctattttgtccaggctggtctcaaactcctgggctcaaatgattgtcctgcctcagcctccaagtagctgaaactatgggcacaaactgccatgcccagctaatggtggagaaatattaagtaagcatgttttaaatcattgtactgtttttgctgaactggtcagatgtttcaccaaaatcaagttttaaaaagatatttgtactaaataacaaaaaacaacccagttcagaactgggtaaaggaacttaatagacattttcacaaagaaggtaaacaaatggccagtaagtaccagaaaagatgctcaactttactagtcattagggaactacaaatcaaaaccgcagttagataccacttcacatccattaggttataggttaaaattactgtctttgactttctatgatatcctatgttatcatggcatagaaagtcaatgaccaagcctggtagttattacaaagtgttttatattcagttttaccttgtcatgtttcacactttatcattgtcaaacattgtttgacttcctgctatatattagggatacagatacttaaatgatagaatatctgatctccaggagttagtattatagttgaaaggaacaattgaaaagtcttttcacagacttaaatgaaagaatcctcaggttaaaagatggatattctacgtactgaactatctgaatagctccaatgcttccataggcttgctgcctgttcagtgcagtattacatccattgatttctataacaaatgggaggtttatgtgtgccccttacctccttttagaaataagttctcaaaaaaaaaaatgtacatgtgatgggagacaccccccctccccctagccagttgatatgagtagttccctacaaattagtttaaatgggtatgacagaaatctggtagaatgatgactaaatcttaaaagtcattcttgtttcctctcctttcacacctcagatttgatccatcagaaaatcctcttgatctagccttcagagtatataccagttctggatcacttgtcaccatttccaaggctactaccctaacccaaacctctatcatctttagcatagactactataatagcctcctagcttttctttctgccctcttcttaccttcctatagtttattctcaacatattaatagtagtcatactgtgatatccttttaatccagaaatcagatcttgtaactcttctgctgaaaaccttccagtggctctccttacatttacaatagaatccagactctttggcctataaggacttctatgtcctggcctctatcaacttcttcattcatctctctctattcttacccccacttgcaaagctccactaaccttgatcttcttttttgttctggagccagacttcctgggcttaaattgctgctatgctacttacttggaaatcttggacaagttacctaatttccttgttcttaagttacttctgttgtaaaatgatgtggccaataatagtgcctatctcataacatggttattagaattaaacaagttaatacttttaaaatgcttagaacaattgtgggtacatactaagtatcattttatgttagctgtcctcattattgttgtcatgattcccatcccatcgtcatctttgcattgctgccttcttttttaatcattcagttctcaactctactrtcaaattcatagggaagtctttcttaatcarcctaactaaagcaaccaccctggtccttctctgtatattccgtttttttgtttgtttgttttttgttttgagatggagtctcactctgttgaccaggctggagtgcagtggtgcaatcttggctcactgcaagctctgcctccagggttcacgccattctcctgcctcagcctcccaagtagctgggactacaggcacccaccaccatgcccagctaattttttttttgtatttttagtagggacggggtctcactgtgttagccaggacggtctcgatctcctgacctcatgatccacccgcctcggcctcctaaagtgctgggattacgggtgtaagccaccgtgcccggcctgtttttgttttttttagctgtttctgtacctaaaattattttcttgatatgattatgtgtttattgtttttattgtttatttcccctcgctctttgtcttgtcttcagtcacggccagtaaactgacaaaagttattgtcaatggctaagtgcggtggctcatgcctgtaatcccagcaccctgggcaggccaacgtgggtggatcacttgaggccaggagtttgagaccagcctggtcgccatggtgaaaccctgtctttaccaaaaatacaaaatttagccagcatagtggcacacctgtaatcccagctactcaggaggctgaggcatgagaatcacttgaaccctggaggcagaggtagcagtgagcctagatagtgctgctgtactccagcctgcgcaacagagcaagactctgtctaaataaataaataaataaaaagttattggcaatcgccattaggctgtaaggtctgtgaagacaggaatcatgtccgtcttatatgcccagtgtttagcatagagttttgaataccataagggctcaaaaagtatttgttaaatattaaaatgaatcagattttttacatgtattatatgaagttgtctaataaatagtccaactaaatgaatttttttgtttctttgtttttgtttgttttagacagagtctcactttgtagcccaggctggagtgcagtggcgcaatctcggctcactgcaacctccgcctcccgggttcaagtgattcttatggctcagcctcctgagaagctgggattacaggtgcctgccactatacctggctaatttttgtatttttttttcagtagagatggggtttcaccatgttggccaggctggtcttgaactcctaacctcaagtgatccacctgcctctgcctcccaaagtgctgggaatacaggcatgcgccaccttgactgaccagcattctttagaatagctcatttctttataaatcacctaggaattatgaaattgtcttgtacttgtcatcagaacaagatcattatagtaaatatttattttaacaatataaaagcccctccacccttaaggatatattattaatatcttgctattatggatggaataaatagactagaaaactttatattagtgtgaatattgtaactgatctataaaagaagtcataaagtgcaaggagattctattcatccttgttaaagtgtagttcattgaccaatagcatatatgggagcttgttcaaaatatatcctcataaaatgagttagggaggattccctctttttctgttgattggaatagtttcagaaggaatggtaccagctcctccttgtatctctggtagaatttggctgtgaatccatctggtcctggacattttttggttggtaagctattaattattgcctcaatttcagagcctgttattggtctattcagagattcaacttcttcctggtttagtcttgggagggtgtatgtctccaggaatttatccatttcttctagattttctagtttatttgcatagaggtgtttatagtattctctgatggtagtttgtatttctgtgggatcagtggtgatatcccctttatcattttttattgcatctatttgattcttctctcttttcttctttattagtcttgctagtggtctatcaattttgtttatcttttcaaaaaaccagctcctggattcacaacaaagatcaaaagagacaaagaaggccattacataatggtaaagggatcaattcaacaagaagagctaactatcctaaatatatatgcacccaatacaggagcacccagattcataaagcaagtmcttagagacctacaaagagacttagactcccacacaataataatgggagactttaacaccccactgtcaacattagacagatcaacgagacagaaagttaacaaggatatccaggaactgaactcagctctgcaccaagcggacgtaatagacatctacagaactctccaccccaaatcaacagaatatacattcttttcagcaccacaccacacctattccaaaattgaccacatagytggaagtaaagcactcctcagcaaatgtaaaagaacagaaattataacaaactgtctctcagaccacagtgcaatcaaactggaactcaggattaagaaactcactcaaaaccgctcaactacatagaaactgaacaacctgctcctgaatgactactgggtacataacgaaatgaaggcagaaataaagatgttctttgaaaccaacgagaacaaagacacaacataccagaatctctgggacacattcaaagcagtgtgtagagggaaatttatagcactaaatgcccacaagagaaagcaggaaagatctaaaattgacaccctaacatcacaattaaaagaactagagaagcaagagcaaacacattcaaaagctagcggaatgcaaaaaataactaagatcagagcagaamtgaaggaaatagagacacaaaaatcccttcaaaaaatcaaaatatatctaaaaactttttttgmgacaagatctcactctgtctccacactggaatacagtggtgcaagtatggttcactgcagccttgacctcctgggctcaagcaatcctcycatctcagcctcctgactaactgggactaaaggcctgtgccaccctgtccagttaatttttagttttttgtagactcggggtctcactatgttgtccatgctggtcttgaactcccgagttcaagtattcctcctgccttggcctcccagagtgttgttgagattataggtgtgagcaaccgtgcgtggcccaaaatgtagaacctcatgctttttattagacctactgaattagaaatttatgtaattgtatgcacagtaaagtttaagaatcattgctggccaggcgcggtggctcacgcctgtaatcccagcactttgggaggccaaggcaggcggatcacaaggtcaggagatggagaccatcctggctaacaaggtgaaaccccgtctctactaaaaatacaaaaatacaaaaaattagctgggcgtggtggcgggcgcctgtagtcccagctactcaggaagctgaggcaggagaatggcgtgaaccttggaggcggagcttacagtgagccgagrtcrcgccactgtactccatactgggagagagagcgagactctgtttcaaaaaaaaaaaaaaaaaaagaatcattgctgtagattataggattatttaattacaaagtgaaatgaaattttcttgcgtttttctttgtattcttactgacatttcttgtgttttgaaaggaataatcacactctctttggtgttctaaattatactaagactcctggagggagtagacgacttcgttctaatatattagagcctctagttgatattgaaaccattaacatgagattagattgtgttcaagaactacttcaagatgaggaactattttttggacttcaatcaggtaaatcaatattatttaatattataaatacaaattattgaaaaatacagttggcttagttatttttccatgtttctgaaagacaagtagtgaaggtgttaattcttgtattcttttatggaaaatattttcctgaaattttctactgagtcctgtagtaaataatttcaggggtacattatgtaatgtattttgatttcctgtatgcttttcttttccayttttttctgtttttttttgttgttgtttttgttgttgttgttcatagatactttacattctttttctccatggtaatcctcaaagatgggaagatttgtycasactacgtaattatcaacggataggatrtattagtttcctaggctgctctaaaaactagtacctactccatggtttaaaacaacagaaagtttttgtcttacagttctggaagctagaaacttaaaataaggtgtcagaaaagccatgctccctctgaaacctataggggagaatcctttgcccctttctagcttttggtggtcgctgtcagtccatgatgggccttggctcacaggtttgtcattgcaatctctgcttctattgtcatatggttttcyccctgcgtgtcttcacattgtcgtcttataaagacactagtcgtattgtattaagacctaccttaataacctcacattagcttgattacatttgcaaagatgcaatttccaaataaggtcacactaacagataccyggagttaagacttcacagtatcatttgggggtcacaattcaacccataacatgggataagaaaattgcccttgcctcagggtctgtttctggagaactcaccctaacacagtcaccaacaggcatattgctaattttttttttctttactttaaattctggaatacatgtgctgaaatgtgctgaacatgcaggtttgtcacataggtatacatgtgccatggtagtttgctgcacctatcaacccatcatctaggttttaagccttgcatgcattggggatttgtcctaatgctctccctcccctttccctccacccactgacaggccccagtgtgtgatgttcccctccctgtgcccatgtgttctcattgttcaactcccacttatgagtgaaaacatgcagtgtttggttttctgttcctgcattagtttgctgaggatgacggttcccagcttcatccatgtccctgcagaggtcatgaactcattctttttaatggctgcatagtattccatggtgtatatgtgccacattttctttatccagtctatcattgatgggcatttgggttggttccaagcctttgctattgtaaatagtgctgcagtaaacatacatgtgcatgtgtctttatagtagaaagatttataatttttttggtatatactcagtaatgggattgctgggtcaaatgatatttctggttctagatccttgaggaatcgccacactgtcttccacaatggttgaactaatttagactcccaccgacagtgtaaagtgttcctatttctccacatcctctccagcatctgttgtttccttactttttaatgatcgacattctaactggcttgagctggtatctcattgtggttttgatttgcatttctctaatgaccagtgatgatgagctttttttcatatgtttgatggccgcacaaatgtcttcttttgagaagtgtctgttcatatcctctgyccactttttgatggggttgtttttttcttgtaaatgtytttaagttccttgtggattctggattttagagctttgtcagatgggtagattgtaaaaattttctcccattctgtaggttgccttttcactctgatgatagtttcttttgctgagcagaagcgctttagtttaattgatcccacttgtcaattttggcttttgttgccattgcttttggtgttgtagtcatgaagtctttgcctatgcctatatcctgaatggtattgcctaggttttcttctagggtttgtatggttttaggtcttacatttaagtctttaatccatcttgagttaatttttgtataaggtgtaaggaagggatccagtttcagctttctgcatatgtctagccagttttcctagcaccgtttattaaacagggaatcctttccccattgcttgcttttgttaggtttgtcaaacatatgtggtgttatttctcaggtctctgttctgttccattggtctatatatctgttttggtaccagtaccataccgttttagttactgtagccttgtagtagtttgaagtcaggtagcataataccttcagctttgtttttttttttttttgcttaggattgttttggctatatgatctcttttttcattccatatgaaatttaaagtatttttttttctagttctgtgaagaaagtcaatggtagctaaatgggaataacattgaatctataaattactttgggcagtatggccattttcacaatattgattcctcctatctgtgagcatggaatgtttttccatttgtttgtgtcctctcttatttccttgagttctttttgtagttctcattgaagaggtccttcacttcccttgtaagttgtattcctaggtgttttattttcttcgtagcggttgtgaatgggagttcactcatgatttggctctctgcttgtctattattggtgtataggaatgcttgtgatttttgcacattaattttgtgtcctgagattttgctgaagttgtttatcagtttaaggagtttttgggctgagacgatggggttttctaaatatataatcatgtcatctgcaaacagagacaatttgactttctctcttcctatatgaataccctttatttctttctcttgcctgattgccctggccagaacttccaatactatgttgaataggagtggtgagaaaggacatccttgtcttgtgccggttttcaaagggaatgcttccagtttttgcccattcaatatgatattggctgtgggtttgtcataaatagctcttactattttgagatatgttccatcaatacctagtttattgacagttttttagtatgaagggtgttgaattttatcgaaggccttttctgcatgtattgagataatcatgtggtttttgtcattggttctgtttatgtgacagattacatttagtgatttgcatatgttgaactagccttccatcccagggataaagccaacttgattgtggtggataagctttttgatgtgctgctggattcggtttgccagtattttactgaggattttcacatcaatgttcatcagggatattggcctgaaattttctttttttgttgtgtctgtaccaggttttggaatcaggatgatactgccctcataaaatgagttagagaggagtccctcttattctattgtttgaaatagtttcaaaaggaatggtaccagctcctccttgtacctctggtagaattcggctgtgaatccatctggtcctgagctttttttggttggtgggctattaattactccctcaatttcagaacttgttattggtctagtcacagattcaacttcttcctggtttagtcttgggagggtgtatgtgtccaggaatttatccatttcttctagattttctagtttatttgtgtagaggtgtttatagtattctctgatgttagtttgtatttctgtgggatcrgtggtgatatcccctttatcatttcttattgtgtctatttgattcttctcccttttcttctttattagtctgcatagtggtctattttgttaatcttttcaaaaaaccagctccccggttcatggagttttcgaagggtttttcatgtctctgtctccttcagttctgctctgatcttagttatttcttgtcttcttctagcttttgaatttgtttgctcttgcttctctaattcttttaattgtgatgttagggtgtcgatttgagatcttttccactctctgatgtgggcatttagtgctataaatttccctcttaaccctggtttagctgtgtcccagagattctggtacattgtctctttgttttcattggtttcaaagtacttctttstttctgacttaattttgttatttacccagtagtcattcaggaggaggttgtttactttccatgcagttgtgcagttttgagtgagtttcttaatcctgagttctaatttgattgcactgtggtctgagagactgttatgaattccattctgttccatttgctgaagagtgttttacttacaattatgtggtcgattttagaataagtgctatgtggtgctgagaagaatgtatattctgttgatttggggtagagagttctatagatgtctattaggtccacttggttcagrgctgggttcaagtcttgaatatccttgttaattttctgtctcattattgtcagattygccaaggttgaaacaaaaggaaaaaatgttaagggaagccagagagaaaggtcaggttatttacaaagggaagcccatgagactaacagcggatctctgtgcagaaaccctacaagcaagaagagagtgggggccaatattcaatattcttaaagaaaagaatttttaacccagaatttcatccagccaaacttaatttcataagtgaaggagaaataaaatcctttacagacaagcaaatgctgagggattttgtcaccatcaggcctgccttgcaagaactcctgaaggaagcattaaatawggaaaggaaaaaccagtaccagccactgtaaaaatacaccataatataaacaccaacaacacagtgaagaaactgcatcaactaatgtgcaaaataaccagctagcatcatgatgataggatcaaattcacacataacaatattaaccttaaatgtaaatgggctaaatgccccarttaaaagacacagactgacaaattggataatgagtcaagacccatcagtgtgctgtattcaggagacccatctcacatgcaaagacacacataggctcaaaataaagggatggaggaatatttaccaagaaaatggaaagcaaaaaaaaaaaaaaagtaaagtaraaagcagagattgcaatcctagtctctgataaaatggactttaaaccaacaaagatcaaaagagacaaagaagggcattatataatggtaaagggatcaatacaacaagaagagctaactatcctaaatatacatgcacccaatacaggagcacccagattcataaaagaagttcttagagacctacaaggagacttagacccccacacaataatagtgggagactttaatacccactgtccatattgttaaatttaatgggcacattagttcccttatttgaataagaaaattgccctgggcaaagtacatcaacagatgcttctcaaaagaaagacatacaagtgaccaataaacatatgaaaaaatgctcaatgtcactaatcctcagaaaagtacaaatcaaaaccacaatgagatgccatctcacaccagttggaatagctattattaaaaagtcaaaaaataacagatgttggcaagtctgcagagagaagraaatgctcatacattgttcttaggattgtaaattagttcagcctctgtggaaagcagtttggagatttctcagagaactaaaaatagaattaccattcaacccagcaatcccattactggatatatacccaaacataaataaattgttctcccaaaaagacacctgcactcacatgtttattgcaacattattcacggcagcaaagacatggaatgaacccaggtgcccatcaacagtggactgggtgaagaaaatttggtacatatacaccttggaatactatgctgttataaaaagaatgaaatcatgttctttttggcagcatggatgtagctggaggccattattctaagtgaatgaacgcagaaacagaaaaccaaatactgcatgttcttacttatatgtggragctaaacattgggtacacatggggatataaagatgggaacaatagctattggggactccaaaaggggagaggaatggggcaagggttcaaaactattgggtactatgtttactatctgagtgctggattcaatcaaagcccaaacttcagcatcaaacaatgtatctatgcaacaaacctgcacatgtaccctgtaaatccaaaataattttttttaaaaaggaaaagagaggaggttccaagatggccaaataggaacagctccagtctgcagctcccagcatgagcaacacagaagacgggtgatttctgcatttccaactgaggtgctgggttcatctcactggggcttgtcagacagtgggtacagcccatggagcagggcaggacattgcctcacctgggaagcacaagggttcagagaattccctttcccagcaaagggaagccatgacagacagtacctggaaaattgggacactcccaccctaatactgcgcttttccaatggccttagcaaacagcacaccaggagattatatcccgcacctggcttggagggtcccacgtccatggarcctcgctcactgctagcacagcagtctgagatcgaactgcaaggtggcagcgaggctgggggatgggcwtctggctttgctgaggcttgagtaggtaaacaaagcggccaggaagctcaaactgggtggagcccaccgcagctcaaggaggcctgccttgcctctgtagactccacctctaggggcagggcatagctgaacaaaaggcagcagaaacttctgcagacttaaacatccctgtctgacagctttgaagagactggtggttctcccagcayggagtttgagatctgagaatggacagactgcctccccaagtggggccatgacccccaagtagcctaactgggaggcatctcccagtaggggccgactgacacctcatacagctggatgcccctctgagacaaagcttccagaggaagaatcaggcagcaacatctgccgttctgcaatatttgctgttccgcagcctctgctggtgatacccaggcaaacagggtctggataggacctccagcaaacaccaacagacctgcagctgagggtcctgactgatagaaggaaaactaacaaacagaaaggacatccacaccaaaacaccatctgtacaccaccatcatcaaagaccaaaggtagacaaagccacaaagatggggagaaaccagagcagaaaagctgaaaattctaaaaatcagagcaccttttctcctccaaaggaacgcagctccttgccagcaacggaacaaagctggaaggagaatgacattgatgagagaataaggcttcagacgatcggtaatagcagacttctccaagctaaaggaggatggtcgaacccataacaaagaagctaaaaactttgaaaaaagatgagacatatggctaactagaacaaacattgtagagaagtccttaagtgacctgatggagctgaaaaccgtggcacgagaacttcttgatgcgtgcacaagcttcagtagctgatttgatcaagtggaagaaaggctatcagtgattgaagatcaaatgaatgaaatgaagcaaaaagacaagtttagagaaaaaagggtaaaaaaaacygaacaaagcctacaagaaatgtggcactatgtgaaaaaaccaaatctacatctcattggtgtacctaaaagtgacggggagaatggaaccaagttggaaaacactcttcaggatattatccagkagaacttccccagcctagcaaggcaggccaacaattcaaattcaggaaatacagagaacgccrcaaagatactcctcaagaagagcaattccaagacacataattgtcagattcaccaaagttgaaatgaaggaaaaaatgttaagggcaaccagagagaaaggtcaggttacccacaaagggaagcccatcagactaacagcggatctcccagcagaaactctacaagccagaagagagtggaggccaatattcaacattcttaaagaaaagaattttcaacccagaatttcatatccagccaaactaagcttcataagtgaaggagaaataaaatcctttaagacaarcaaatgctgagagattctgtcaccaccaggcctgccttacaagagctcctgaagaaagcactaaacatggaaaggaacaachagtaccagccactgcaaaaacatgccaaattgcaaagaccatcaatgctagaaagaaacttcaccaactgacgagcaaaatcaccagctaacatcataatgacaggatcaaattcacacgtaaccatattaaccttaaatgtaaatgggctaaatgctccaattaaaagacacagactggcaagttggataaagagtcaagacscatcaatgtgctgtattcaggagacccatctcacttgcagagacacacataggctcacaataaagggatggaggaaggtgtaccaagcaaatggaaaacaaaaaaagcaggggttgcaatcctagtctctgataaaacagattttaaaccaacaaagatcaaaagagacaaagaaggccattacataatggtaaaggggtcaattcaacaaggagagctaactctcctaaatatatatgcacccaaaacaggagcacccagattcataaagcaagtgcttagagacctacaaagagacttagactcccacacaataatagtcggagactttaataccccactgtcaacattagacagatcgagacacaaacttaacaaggatatccaggaattgaactcagctctgcaccaagtggacctaayagayatctacagaactctccaccccaaagcagcagaatatacattttctcagcaccacatcacacttattccaaaattggccacatagttggaagtacagcactcctcagcaaatgtaaaagaacacaaattataacaaactgtctctcagaccacagtgcaatcaaactagaactgaggattaagaaacacactcaaaaccgttaaactacatggaaactgaacaacctgctcctgaatgactactgggtacataatgaaatgaaggcagaaataaagatgttctttgaaaccaatgagaacaaagacaaaacataccagaatctctggcacacatttaaagcagtgtgtagagggaagtttatagcactaaatgcccacaagagaaagcaggaaagatctaaaattgacaccctaacatcacaattaaaagaactagagaagcaggagcaaacccattcaaaagctagcagaagataagaaataactaagatcagagcagaactgaaggacatagagacacaaaaaacccttcaaaaaatcaatgaatcaaggagctggttttttgaaaagatcaacaaaattgatagaccrctagcaagattaataaagaagaaaagagagaagaatcaaatagatgcaataaaaaakgataaagtggatattaccaccaattccacaggaatgcaaactaccagcagagaatactataaacacctctatgcaaataarctagaaaatctagaagaaatggataaattcccggagacatacaccctcccaagactaaaccaggaagaagttgaatctctgaatagaccaataacaggctctgaaattaaggcaataaataatagcctaccaaccaaaaaagtccaggaccatatggattcacagccgaattctaccagagttacaaggaggagctggtacyattccctctgaaattattctgatsaatagaaaaagagggaatcctccctaactcattttatgaggctggcaacatcctgataccaaagcctggcagagacacaataaaaaaagagaattttagaccaatatccctgatgaacatcgatgcaaaaatcctcaataaagtactggcaaaccgaatccagcagctcatcaaaaagcttatccaccacgatcaaggcggctttctccctgggatgcaagggtggttcaacatactttgaagcaatatacgtaatccatcacataaacagaaccaaaggcaaaaactcatgattatctcaatagatgcagaaaaggccttcagcaaaattccacagcccttcatgctaaaaactctcaataaactagatattgatggaacgtatctcaaaataataatagctatttatgacacacccacagccaatatcatactgaatgggcaaaaactggaagcattcccttgaaacctggcacaagacagggatgccctctctcaccactcctattcaacatagtgttggcagttctggtcagggcaagcaggcaaaagaaagaaataaagggtattcaattaggaaaagaggaagtcaaattgtccctgtttgcagatgtcatgattgtttacttagaaaaacccatcgtctcagcccaaaatctccttaagctgataagcaacttcagcaaagtctctggacacaaaatcaatgtgcaaaaatcacaagcactcctaaacaccaataacagacatacagagagccaactcatgagtgaactcccattcacagttgcttcaaagagaataaaatacctaggaatccaacttataagggatgtgaaggatgtcttccagtagaactacaaaccactgctcaacgaaataaaagaggacacaaacaaatggaagcacattccatgctcatggataggaagaatcaatattgtgaaaattgccatactgcccaaggtattttatatattcagtgccatccccttcaagctacgaatgactttcttcacagaattggaaaaaactactttaaagttcacatggaaccaaaaaagagctcgcattaactggacaatcctaaaccaaaagaacaaagatggaggcatcacgctacatgacttcaaactacactacaagcctacagtaaccaaaacagcatggcactggtaccaaaacatatatagaccaatggaacagagtagagccctcagaaataataccacacatctacaaccatctaatctttgacaaacctgacaaaaacaagaaatgaggaaaggattccctatttaataaatggtgctgggaaaactggctagccatacgtagaaacctgaaactggatcccttccttacaccttatacaaaaattaattcaacatggattaaagacgcaaatgttagacctaaaaccttaagaaccctagaagaaaacctaagcaataccattcaggtcataggcatgggcaaggacttcatgactaaaacaccaaaagcaatggcaacaaaagccaaaactgacaaataggatctaattaaactaaagagattctgcacagcaaaagaaactatcatcagagtgaacaggcaacctacagaatgggagaaaattttacaatctacccatctgacaaagcgctaatatccagaatctacaaagaacttaaacaaatgtacaagaaaaaatcaaccccatcaaaaagtgggcaaaggatatgaacagacacttcgcaaaagaagacatttatgcatccaacagacacatgaaaaagtactccttatcactggccatcagagaaatgcaaatcaaaaccacaatgagataccatctcacatcagttagaatggcaatcattaaaaagtcaggaaataacaagtgctggagaggatgtggagaaataagaatgcttttacactgttggtgggactgtaaactagttcaaccattgtggaagacagtgtggtgattcctcaaggatctagaactagaaataccatttgaccgagccatcccattactgggcatatacccaaaggattgtaaatcatgctgctataaagacacatgcacacatatgtttattgtggcactattcacagtagcaaagacttggaactaacccaggtgtccaacaatgatagactggattaagaaaatgtagcgcatatacaccatggactactatgcagccataacaaaggatgagttcatgtcctttgtaggtacatggatgaagctggaaaccatcattcagagcaaactatcacaaggacagaaaaccaaacaccgcatgttctcactcataggtgggaagtgaacaatgagaacacttggacacgggataaggaaccacacaccagggtctgtcgtggggtcaggggatgggggagggatagcattaggagatatttgtaaatgaggagttaacgggtgcagcacaccaacatggcacatgtatacatatgtaacaaacctgcacgttgtgcacatgtaccctagaacttaaagtataataataataacaaatgaagtgaaaaataaaaaggaaaagaaagttgcctttgcaacctggctgtttgtccactggcatggtggtgcagttttattcttaaatctgtagttggaaggatagtttatatgtactactctttgtccagtatttggttgctttcagcttggtctgtcttccatacctccacttgcctgactaccctagcttgtgttctggtagtctaratgaaagtggtgcattcaaatctagaaggcatttactacctgagtaggttttcttcagtccaattccaaatacctttaattagcgtaattccttcaaaattctggtattatattgactgtgactctgcctgtccaatgttgtccagtatattcttttttaaatatgtatattcctgtgtatttagtattgggaaaggcagaaagaggccatttttaactatccttttcttgttaatagcaacatcttgttggtctacctatacctgccatttagtgtaatacgtaagtgccaagaatatgaaaagtcatttaatcatgttacattggtcaagctccaaccattgatacctttttaaactttctgctacsaaatatgcatttatacttatctacttttcactccctttgtttaagccagaagtggtattctctagctaattcctccatctgttccctggatcccatccttgcacttatctcctgtatcttcattatttttctctccatggccttcttctaagaggatttaaacttcctcatgtctctcctatctttgtaaaaactctccctggacttcatcttttctagctaccactatatcacttctctattcacagccaaacctgttgaaaaacaaatttcctatgctcactatcttctcttcatcactatgtctcaatgtgctgcaatcttatttctgtgcccagtactgtgctgagactgctcttgtcaaggtcactggagcagatcttgttggttctctgtacagattgtcttggatcccttttacctttcggagttcaccttttgctggtctgcgtgcctartggcccacacctggactctttttctatgcctaccttcaggctgttagagcgctttgttcttaaacacagagtacccaaaatgcctggtagcccttaaatgactgtatggtgtgaagatatgaaagcctagctctttcacattgatttggcaaaaacctgaatataacttaaactccagaatttctttgcaagattagttgaagttaccttccacacaactttgcctgaaatcacactgttggttggcttggtttcccttctctgtccttttctcactgctctactggtttcttctggaagcagattctttttctctttttctttctttttcttttttttttttttgagacaaggtctcattctgttgcctaggctggagtgtggtggtgcgatttcagctcactgcaacctctacctcctgggttcaagcaatcctcgcacctcagcctcccaagtagctgatactataggcctctgccaccatacttagctaatttttatgtttttggtagacacgggatttcactatgttgcccaggcttggaagcacattcttaataaattactggcacataartccttgcctcagtgtctgtttctggagaacccaacctaacacagtcaacaacaggcatattgttaaatgtaatggacacgttagttctcttatttgaataagagaaatgtccacaatttatttgatactgctgaatatctgtcattattgaattactgcctttctttgtttctgtgattacacaacctcctgatcttcttcctctgtctttgtggtttccttctgagtcttttaaatatacttctcttcctttgcttatttcctaaatgctatggctcttcaaagatatgttctgggttgtccttttatcctgaatttccttattgtatgacttacccagtttcatggttttatgactattattcacatattcatgacttccaaatttacatctcatgcctaaatatctctccagaactttggactcaaatatcttattgccttctgagcatttgctgtgatctacatgttgtgcttctccaaaattcatatgttgaagtcctcaccttcaaggtgatagtattaggacgtggggcctttagggggtggttacacaagggtagccagagacctcatgaatgggatcagtgcccttataagagaagctcaagggagactccttgccccttctaccatgtgaagatacagcgagaaggtaccatctatgagtcagaaagtgggctcttaccggacactgaatctgcccagcagaaaataaatttctcttgtttataagccactcagcttgtggtaattttttatagcagcttgaatggaataagagcatttgttaggtgttcctcaatcacctgaaasttaatgtacccaaattgtgcccttttttttttttttttttttgagacggagtcttgctgtcacctaccctggagtgcaatggtgcaatctcagctcactacaacctctgcctcccaggttcaagtgattctcttgcctcagcctcccgagtagctgagaatataggcacccaccaccacacccgactaatttttgtatttttagtagagatgggattttctccatgttggccaggctggtctcaaactcctgacctcaggtgatccaccagcctcggcctcccaatgtgctgggattacaggcgtgaaccactgtgcccggccgccatcttcttttctaaatcagttcttcctggtttcagtgaatagctccacatccaccctctttatgcaagctagatacatgaaagtcattcttaactcttaccttccttccaatcagtcatcaaatctgccatgtctccttgctatatacctcttggatgtatctgcttcttctatccccatggctgccactccagcccaggataccttaattctctcatctcatttcttataagagcctcctatttggtcacccttctccaaccttgctgtttctagccttttctctacattgttgcctgagtgatcttttgaaaacataaatctgagactatcactctgtattcatttcttaatgttgatataaaacatcaccacaaatttaggggcttaaaacaacacgaatgtattatctcacagttctggaggtctgaaatcagtttcactgggctaaaatcagtatgtcagcaggtctacatttttccaaaggctctggagggggagtccatttccttgctctttctactttctagaggccgcctacatttcttggctcttagcccttcctctatctttaaagccagaagtagatcattttcccttcctctgacttctgcttttgtacttatatcttctctctctgacactgatcctcctgccaccctcttgtaaggactcttaagattacactggggccaagagacaatccaggataatctctccatctcaagacccttaatttaatcccaactagaaacttccttttatcagttaacatattcacaaattccagaaattaggaagcagatctctttgggggtctgggggagggtggtggttacyatactcatctgcataaaatccttcaatcttttctctttagattctcttctcacaacttttagattaaaatgcaaacttttctatatagctgttttcctgtaatctcccacagcatctcttgatactcttcactctccattttctcttctagtctaaatgaacttctttaagttacttaaacatatctgctgtcattttctggctttggaacgctgtaatttttgcctagaatacctcttcctccttccctgcaaccccttctcccaggcttctctagctaactgcagttcatcttttatcattccagtttagatgtgacttttgctacaggcctttctaattccgcaagtcagtgttaggcatctttaatacatgtttcctgtagtatcttgttatgatgacacttatttttctttttgtaaatgcatgttttgtttgataattcttatataaggctaggacataacagtttaacatatttgttaaactattgatttgttgttgaatctgttgaaattgtattctgttattcccaagacaatactgtttgtatgataaaattttgatgataaacttggatttttttaaactttaattttgatatattttaagtttttaaattccttatgactgaaaatttcaaagtgatatctataaataaacatttctctgttttctatatctttttcttttcttttttttgagacagagtttcactctgtcacccaggctggagtgcagtggcacaatcttggctcactgcaacctctgcctcctgggttcaagcaattctccagcctcagcctcccaagtagctgggattacaggcgcccaccaccatgcctggctaatttttgtatttttaatagagatggcgtttcaccatgttggccaggctggtctcaaactcctgacctcaagtgatccacctgccttgacctcccaaagtgttgggattacaggtatatgccatgttttctatgtcttaatggtttgtaatttatcttaacacacaataaagtagagcagcagggcatagggcagagtgggagggtaatttttacagtttattaaaatataagaatctcatgtctaaaacaccaaaagcaatggcaacaaaagccaaaattgacaaatgggatctaattaaactaaagagcttctgcacagcaaaagaaactaccatcagagtgaacaggcaacctacaaaatgggagaaaatttttgcaacctactcatctgacaaagggctaatatccagaatctacaatgaactccaacaaatttacaagaaaaaaacaaacaaccccatcaaaaagtgggtgaaggacatgaacagacacttctcaaaagaagacatttatgcagccaaaaaacacatgaaaaaatgctcaccatcactggccatcagagaaatgcaaatcaaaaccacaatgagataccatctcacaccagttagaatggcaatcattaaaaagtcaggaaacaacaggtgctggagaggatgtggagaaacaggaacacttttacactgttggtgggactgtaaactagttcaacccttgcagaagtcaatgtggcgattcctcagggatctagaactagaaataccatttgacccagccatcccattactgggtatatacccaaaggactataaatcatgctgctataaagacacatgcacacgtatgtttattgcggcactattcacaatagcaaagacttggaaccaacccaaatgtccaacaatgatagactggattaagaaaatgtggcacatatacaccacggaatactgtgcagccataaaaaatgatgagttcatgtcctttgtagggacatggatgaaattggaaatcatcattctcagtaaactatcacaagaacaaaaaaccaaacactgcatattctcactcataggtgggaattgaacaatgagaacacatggacacaggaaggggaacatcacactctggggattgttgtggggtgggggaggggggagggatagctttaggagatatacctaatgctaaatgatgagttaatgggtgcagcacaccagcatggtacatgtatacatatgtaactaacctgcacattgtgcacatgtaccctaaaacttaaagtataataataataaaataaaaaataaaataaaataaaatataagaatctaaaccttttaaaaaaaacccattacctcctttattataggcattctataagtgttagggataaaaagatgaggaacattaagctatatctgtcctcaaggacctcacatccatgttcgggcaacagaactctaattaaataattttgatgcaatgtgatacatgcaataacaattgagtagttcatgggaacacagagaagggagttgggataaagacagaatccagatgggatttgcaggaataatatttcagctttgtcttaaaagaaggagtaggattttagcaacaggagaatcctagcagtgatattcgagatgaagggaacatgcctgtgcaaggtatgttgatgtccatagcagtaatgcagatgttttttggatatagtggttaggataaggatctggtatgcacgccattggctatgatcttgaccagtcatttccttccctccctccctccctccctcccgctttctcttctttttttttgttctctctctctttctttcacagggtctcactctgtcacccagactatagtgcagtggcactatcatatcttactataacaaacctctgggttcaagtgatccttttgctgcagcctcttgagaagctatgtctacaggcctgcaccaccatgcctggctaatttttacattttttgtagagccagggtcttgctctgttgcccaggctgaacttgaactcctgacttcaagcaatcctctcatctcaacctcccaaagtgctgggattgcaggcacaagtcactgtgcctggctgtacttaggttgatataaaagagcttgctgtatttaaggattggccagtagttatttatgacttaaagccttggggaatggcaggaaatgaggattgagactagactatgaagggcctttttataatgctaaggagtttaatttttttccttcaggcaatatggagctgacattctgaacctagagagtactgatcaaatcctattttagaaacattctggttgtagtgatagatttggggaaaggaagaaggaggagtctggaaagagaaagagcaatataaatgagggctaaagggagtctgactaatagaatcacatgtaaaatgtcataatagtattgtgccatattgcacataatgaagaatataaccgcaatatattcagcctattctaattttttaaactattggcgaaaagagccaaactctgtaaaatatttgaagagatttattttgagccaaatatgagtgaccatggcccatgaacacagccctcaggaggtcctgagaacatgtgcccaagatagtcggagtacagcttggttttgtatattttagggaggcatgagacatcaatcaaatacatttaagaagtacaatggtttggttcagaaaggcaggacaactcaaagcaggcggtgggacttccagactgtaggtaaatttaaacattttctagttgacaattggttgagtttatctgaagacctgggaatgttcaggttaagataaaggattatggggaccaagttttattgtgtagaggaatctctcagatagcagacttcagagagatagcaggttgtaaaatgtttctcactggacctgaaaggatgcctggctcttagttgattatcttctggatctggaaagaaaggaaggaaaactgtgggcagcaagccacccaggccccaaggaaagagaccgaggacaggagctgttccagtatagtaaaatataaaacaagaatagttataccagatatagatcttagatatgattatatatgaatatmattaatcattagtttgtagcaattactctttattccaatattataataatcctcactcyataatcataccctaggaaaaaccaggccatacagagataggagctgaggagacacagtgagaagtgaccagaagacaagagtgcgagccttctgttatgcccggacagggccaccagagggctccttggtctagtggtaatgccagcgtctgggaggacgcckgttgccaggcggaccttggtctagcggtagcataagtgtcaagggaaaacacccgctacttagcagaccgggaaagggagtctccctttccccagggragtttagagaagactctactcctccacctcttgtggagggcctgacattagtcaggctygtccacagttatccggaggcctaacagtctcactgtgatgctgtgcttcagtggtcacactcctagtctgccttcgtgttccatcctgtacacctggctctgccttctagatagcagtaataaattagtgaaagtactaaaagtctctgatatgcagaaataatggcataagctgtccttctctttgtctcctctctctctctgcctcggctgccaggcagggaagggccacctgtccagtggacacgtgacccacgtgaccttacctatcattggagatgactcacactctttaccctgccccttttgctttgtatccaataaataacagcgcagccagacattcggggccactaccggtctcygtgcattggtcatagtggtcccctggcccagctgccttttcttttatctctttgtcttgtgtctttatttctacactctctcgtygctgcacacggggagaaactcacccaccctgtggggctggaccctacagaaaacgaaggggtaaggggattctctatagaatgtgaattattcccacaagagactttgcagggcaatttcaaggcatggcaaggacatatattttggggttaaatattgtattccttgtttcataatgttatgccagagtcagattgaaaagcaaatcacaatatgcagggtcaaataaaacccatctcatgagaatctatggtttgtagggcataactccctagaccccttaggtaggaatttgggccagatacaaaatcagagcttaggcctcaaaacagttttaacataatgaattaccatagaaacagaaaattagaaaggggacagttctagaggtaggcaaactgaaaactatcaaaagacacctgacagtttgaacaggtagcaggtaaaataaacattttcttattttgtgggtttctttttttttttgagatggagtttcacccttgctgcccaggctggaatgcaatggagtgatctcggctcactgtaacctccgcctcccgggttcaagcgattctcctgcctcagcctcccgagtagcggggattacaggcatgcaccaccatgcctggctaattttgtagttttagtagagatggggtttctccatgttggtctggctggtctcgaactcctgacctcaggtgatccacctgcctcggcctcccaaagtgctgggattacaggcgtaagccaccacgcccggctcttattttgtgttttaagggataacagcatgacaccactttgagagtgttaataagtctacacaaaaacttttaatgttatatattactatgataataaccatgagtcattaagaaatagttatcattgttcactgtatttcaagtatggggaaataagtacattttaaaacaatctctatgttaaatggttaaagtttattacttatttatatttatttttattaatttttttgagacagagtctgactctgttgcccaggctggagtgcagtggcacaatcttggctcactgcaacttctatctccctggctcaagccatcctcccacctcagcctcctgagtagctgggactacaggtgggcaccatcccacatggctgattgttgtattttttgtagagacagggtctcactgtgttgccaaggctggtctcaaactcctaagctcaagtgatctcctgccttggcctcccaaagtgctgggattataggtgtaagccaccacacctgggctgaaatggttaaaagttttttaaaaaaatacctggggatatttaaaagggatagtttacaattttctataaatttatttttgtagaacactgtaagctggaaaataaattgagaagaataaaataagtttttgagtggtggtacatgcaagacactttacacattgccatagtctatttgtgttgcagtaataaaatacctgagactaggtaatttataaagaacagtgatttatttcttacagttctgaaggctgggatctgcaaggttaagggacctgtatctggtgagggccttcttgatgcatcatcccacgccaaaaggcagaaggacaagagagcacacatacaagagagagaggaaggggagcaaactcatccttttatccagaatttacttccagaacaagtaacccacttctgtgataatggcattaatccattcatgagggcagagccctcttcacctaatcaccctttaaaggtcccacctctcaacaaggttgcactgagattaagtttctaatgcatgaactttggggacacattcaaaccatagcactctgctcctggctccctcaaattcatgtccttctcacatgcaaaatacattcatttcatcccaataggcctaaagtcttaacttgtttcaacacttactcaaaagtccagaatctcatctgaatcagatatgtgagactcaaggcatgattcctcctgaggcaaattccccaccagctatgagcctatgaaattaaaaaagttatctacatccaaaatgttgggacaggcataggataaacattcccattacaaaagggagaaataggcaataagaaaggagtaacaggcccaaggaaatcagttcaaacctcacaaggaaaacaacagtaagtcttaagaagaagaatcttctttgacyccatatcccacatcaggggcacagtggggaagaagtagggctctcaaggcctcaggcagygtcagggcttagtccactcagcagctctcatggtttgcagtctcatgcccatggctttctcagattggagttacatgcttgtgccccctatagttctgtggtctcagggtggggaggtagggggtgattacccactcccatggctttactaggcattgccctagtggggactctgtgaatgatggcctctatcctatggctccaccaggcatagtgggggctttctgtggtaggttctctgtggtggctctgccccatgataagtctctgcctgggccccaggctgtcctcaacatcctttgaaatttaggcagaagccaccatggcttcatacctattgyattctgtgtgcctgcagaattagcaccatgtggacactgccaagatacacagcttataccttctggagcagtgggttgagctgcagctgggctcacctgagctacagttgtggtggctgagaggtgctatgccagaattaaggaagcagagttccaaggtgctgcagggcagcaaatgctgaggtctcacaagcaccttgctggaaaccttgccctcaaggtcctagcttccctagatctctgaaatgtttttggggtcattctcattgttttcatgaatagaacctggcttctttctatactaatatttttagcaatcacttgaccacacccttagtattctcccccaaacatacattttatgtggccaggctaagagttttcataatttgtttattctgcttctttttaaattataaatgtcatctttaaagtatttctcccttctctcattttactgtaagtgactgaaagaagctatgcaacatcttgaatgctttactgcctaggtagctcttctgccagatatcctagttcattcctcttaagttctgccttccacaatatcctaggacatggatacagttctgccaagttcttttcaactgtaacaaggatggcctttactccagtttccaagattttgtttttcagttccacctgagtcctcatcagaatggcctttactttccatatttctaccaatgttctgatcatgaccacttaagtagtctttacaacattccagactttccttacatttctttcctttttctgagccttcactagaattgcccttaatgttcttctgttcatggcaatctgggctttttctaacctgctcctccaaattcttccaacctctacccattcctattacccaattcctaacctgcttccacattttcaggtatttgttatagcaacaaccccagtcttggtaccaattttctatcttagtttgttttgtgctgctataacagaatatctgagactgagtaatttataaaggacagagatttatttcttacagttctggaggtggggaagatcaaagtcaagtggctcacatctggtgagggccttcctgctgcatcataacatggtggaagggcaagagagcatgcatgcatatgagaggaagggagctgaactcatccttttatcaagaacccactctcatgataatagcactaattcactcacagaggcagagccctcatgacctaaccatctcttaaagatcctacctctcaagacagttgcattggggatcaagtttccaacacatgaacgttggggatcatattcaaacygtagcacaagtattacctcacttaattctcacaacacacctgggaggtagatgttatcagcatttaaaagatgagaacagctattgtttagagaagttaggtaactcttgggaagttatgtggttagtggttgaactatacttttaaactaaggatcttttaaatatcatgaagaaaagtagagatcaaaaagatgagaagaaaattatgatagacaatatcaaaaccagagaagtagagtttcaagaatgagggtaagtcgtgttgctataatagaatacctgaggctgggtaatttacgaagaaacgagtttatttgggtcacaattccagtgactggaaagtccaagagtatggcattggcatctactcagcctctggtcagggctttcatgatgcatcataacatggaggatggtcaaggaggaaatagacatatgctaagagcaaaatgaggggcatcctcactttctaacaacctgttcttgtgtgggaactagtccctttctgtgtaaactaatccagttttattaaggggttaactcactcatcacggtaggaatggcactaagctgcccatgagagtggagcctctgtgacccaaatgttttccactagactccacctattaaatgttttatctcccaacatcgccacactaggaattaaggtttcaacatgagttttggtggggacaggcaaatcatagcagaagggatggttagcagcattaaattttgaggtgagattgagtaatcaaaattaacaaaagagcattagaatttagttatattcattttacatgtaagatagttaaagaagacaaaaagtaatatttgtaggtagaactgttctattttattctttgaggataatattttacatagtcaatattttgaactgtaccataaagtttaaatactcayatttgtttgtttgtttcagttatatcaagatttcttgatacagagcagcttctttctgttttagtccaaattccaaagcaagacacggtatgtttttgtatacattttgtattatattattatacattatttgatggaacttgtcttaatgtaatgtaacaattggaaaatatcaaaatgttttgggaaagtccttcattattgatatctggagtattttatgccactgtagaggaaacttttttcctaatgtattatcctgtatgttatagtgaaatttaaaatttcagcccggcatggtggctcatgcctataatcccaacactttgggaggtcaaggcagttcaagacaagcctgggcaagaaagtgagaccccatctctacaaaggatcaaaaaattagctgggcatgctgttgcatgcttgtagtcccagctcctggggaggctgaggtgggaggataacttaagccttgggaggtcaaggctgcagtgagctgtgttcgcatcactgcactccagcctgggtaacatagtgaggccttgtcacaaaaaaaaattgctttttagatagttgaggaattggcctattttcactgatcaaatattaaggagttatatataattttcaaaagacttagactataataatatttgcctaataactaactaactaaaatatattagagctaaagattcttcttaaaagtgatcattatgtgaagtttgattagtcttcaaatattattattattatttttgagatggagtctcactctgtcaccaaggctggagtgcagtggtgcgattttggctcactgcaacctctgtctctcaggttcaagtrattctcttgcctcagcctcccaagtagctgggattacaggcatgcactaccatgcctggctaatttttgtatttttagtagagatggggtttcaccatgttggccaggctgatctcgaactcctgacctcaagtgatctgcccacctcggcctcccaaartactgggattgcaggtgtgagccaccrtgcttggccaagtctttaaatattcttaacctttaagaatgaaacaacacattttctggatatttttccaatttaaatagtgcttatgggtatattctgcaaagaaagtaataatagctttcattcttccatttaagatgaactgaagaatatttactataatgaaatacaggtatatttttgcccatatgcataaaaagaaaagtcttgcacatcaataaaatttaatttacaatttgatgacatttgtaaatccattgaaagctaatctatatttgggaagcctttttgtattataaagaaaatactcttaaggttcatttataataaaatcatcactagattgaaaagctttagctgttgggcaggcacagaactgagtttccttaaataattgaagctgcttatacttcaatgtatacaaatgggaagtaacctaaaacaactgatgtttggaattaaattagcagccctcataaaataagtttggaagtagcccttcctctttaattttctggtagagtttacatagaactggtattatttcttmcttacatatttggtagaatttacaaatgaagccattaaagcctggaatttttttggtaggaaggtttttaactataaattccacttattaaataggcatagtgctcttcaggttatctgtttcttcttgaacaagctttggtaccttgtgtcttttaaagaatttttcatttcacccaacttttcaatgtatcagcataaactatctcataatatcctccttatatctgtaaaattggcagtgatacactctctcattcctgatactgataattttaatatgttctctgtttttcttaatcagcctggctagatattatcaattttattggtattctcaaggagccaactttctatttcattggtttctcttttttgctcctgttctytatttcactgatttctggttttatcactcttctgcttactctgtgcctactgttcttttttgaggttgtaaaggaggaagctgaggtcattgatttgagaacttttttccttctaatataagcattttagtactataaatttctctctgagtaatgctttagctgtattccacaattttagatatgttgtgatttctttttctttcaaaaaggtcaaaacactttctaatttctttttaaacattctttgatgtatgggtttttagaggtatgttattttatttccagtatttggggactttccaaatatctttttgttattggtttctaatttaattcccaatgatcagagaccatgtattatataatatagatccttttagctttattgactttttttatggcccaaaatagagttaatcttggtaaatgttccatgtgaacttgaaaacaatgtgtattttgctgttgttggttggagcgttccataaatgtcactttgttcaagttgtgtggtagtgttcttcaaatctcctatatccttatggtgttttacgtttttttgttttgttttgttttgtttttctatttgttctatcagttattaagaaaggagtgtcaaaatctccaaatgtaattgtggatttgtctatttttcctttcagttttatcagtttttatctaatgtatttggaatctttgttattagattcataaacatttaagattgctatatcctctataaattgagcctgttgtcattatgaaatgatgcttttttatccctagtagtattttttgctatgaaatctactgcatctaatattaatatagccactccagctttcttttggttagtgttgccatggcatatctttaccatccttttgcttttaacttatttttgtctttatatttaaagaaggttttttgtaggtgacatatagttaagtcttaactttttgcatacaatcagagaatrccttacttttaattgaggtatttattacatttacacttaataagattattgatatgtttttatttaaatctgccatcgttttttttttcatttttctcatctgtttgctcccttgtttctttttttctgccttcttttgtatttttttatgattccatctcatttcctttgttggcttattagatataactcattgccttcattagcttaattattgacttagggtttatagactacatctttagctgaattcagtccatttttgtttattttttattttattttttgggacagagtcttgctctgtcacccaggctggagtgcagtggcgccatctcggctcactgccacctctgtctcccggcttcaagtgattcttgtgcctcagcctccctagtagctgggactacaggcatgccaccatgccatgctaactttggtatttttagtacagatggggwtttgccatgttggccaggctggtctcaaactcctaacctcaagcgatccacctgcctaggccttccaaaatgttgggattataggtgtgaaccatcggacacagcctcagaccactttaaataatattataatactttacatatgatataagagccttgcactagtatacyatcatttccctcttccctaccattatgctattattgtaacatgtttaacttctacatatatttcacaattcatttttaaaaataagacarctttattgagatgtaattacatagattacaattcacacattcaaagcctacaatttaattgtctttaatgcattcacagagttgtacaaccatcaccacagtcaattttagaacattttaatcattcccagaagcaatcctgcaaccactagcaataacttcccattccttctaacccccgtttccccagccttagacaaccagtaatctattgtctgtctctacagatttgcctatcctggacattttatataaatggaacattttagtatgtacaggtagtcttttgtgactggatttttaacttagcataacgtttwcaagtttcatgttgtagcatttatcaatactttattctttktattgacaaataatattccattgtatggatataacacatttggtttatcagtttatcagttgatggctatttaggttgttttcacttttgactattatgaataatgctatgaatatttgtgtgcaggtttttctagggacatacatttttcatttgtcttgatatatacctaggaatggaattgcygggtcatgtgataactctatgtttaataatttgaggaactgctggattgttttgcaaagtgactttatcattttaggtatccaccagcagtgtttgagggttctgatttctccacatccttgtcaagacttgttattatcttaatttttgattctggtgagcctgtcgggtgtctcatggttttggtatacatttccatgatgactgacaatgtcgagcatctttttayatgcttattggccatttgtatcttccttggagaaatatttattaatattatttgcccattttaaattgggttgtttgtatttttattactgagttgtgagagttctttatatattttggataccaatcccttattggatatatgatttgcagatattttctcccattctgtgggttgtcttttcactttcttgattatatgcatgttaatccccgatcaaaaaaatgaatacttaactctcttttcttccttatctcccataaacatggatacttacatccttgcttttcatcacccagtatgattataacagttttagttagatcaaaattattatgaaaattattacgttatacagagctgagcctgygtgactttttgtgggcttttccccagaaattagtaactatttttctttgtttgtttgtttgtttgtttgtttgagacagagtttcactctgtcacccaggctggaatgcagtggtgtaatctcggctcactgcaacctccacctcccaggttcaagtgattctcctacttcagcctcccaagtagctgggattacaggcacccgccaccatgcccagctaatttttgtatttttagtagaaacggggtttcaccatgttggtcaggatggcctcaaactcctgacctcaagtgatctgcctgcctcagcctcccaaagtgctggggttacaggcgtgaaccaccacacctggcctgattttttttattgttagattcaggttacataacattggcagaaataccacagaagtgatgatgcgttcttctcattgcatcttcttatatggcacacaattttgatttgtctcattatgatgataagtttgtatacttggttgagatggtgtaaaattgctgcacaattatgattcccccatttaattartaagtatttygtggggaggtagcttgaaaccatgtaaatattttgctcttctttcaatttatccaactttcaatttatgtatgtatgtatttaatccatatggactgatgattttatattcaattggttatagtctattactgtcaatatttattttgattctcacattgtctcagatttgacatgtgcaagcctcttctaatttgcttctatgctctttggaaatgcatccacaattctttgagaactttatcattttctgcctcaagaaaatgagccaggcttatcttgtactttccttggtagcctttgaatcaactatttctcccaggagtcctggttcattttagtaaggaatggtattagaaatcaagatttgagcaccaggtgtacttattgctattggggtatcaccattctaaaaccctctcatggctagggcataagtgtgtatatatatatatatatatatgcataaatatatagatattgacctctatatttatttctgtatttatctatacaatagaaaatcatacgttcataccaatacttccaatttcaatttacagtcacagggttcatactagttttctctctttccatattagtaactctcttctctgtcaatgaaaaacctgatgagaaatcctattatccaatgagaagtcttcattattcttaatatattaatatatttgatatattcaggaggaataccaatctcctactactgctgctccctcccccatgcagataccatcttcactctgcctatgctgtagtactccctgctgaactgtcttcctatgctgaaatccttctcacctctctcaggctcaagctgcccttctacgcagaggaggctttcttcagcctacttgggatccaaaacctgtgtcagggtttccctcttctcttgcatgaataacctcctgttgttcatattcaggctcatatacccttgctaggtrgaccttcagtttaaatggcttccttgtcctcctgtgctataccacccstccgtcctctccctgctctggctttgccacccccacaccaacgatgctctcttcttcctatttgggccctaacaactgatactacatcacattgttcatattaaaatgatttttcagtatatatggagggttcttcactttatttttgaatatgttgctagcctaacctttttttctytgcatttgtttaacagtgttgttggaatcagtaaatgttttaggattttcagagacttaaacatgaataatcaatataaataaaaacaaagtaccacagttaatgtttatgatattttgccagatgtcactgctttggatgatatttttgaatgaaaaatatcttaaatacttaacagtttttacttatgaatagcatattttacatagaaaaatgcaatgcagtttaatagaacaggaaatggccactttatatagataattagtatttgtattagtttttttttttctttcttttttgagacagagtctcactctgttatctaagctggagtgcagtggtgtgatcatagtttactttagccttgacctccctggcttgtgcaatcttcctacctcagccgcctgagtagccaagaccacaggcatgcgctaccacacccaactaatttttaagttttttgtagagatggggaattgtctttttgcccaggcttgtcttgaactcctgggctcaagcaatcctcctatcttggcctcctgaagtgctgagtttatgggtgtgagtcactgtgcctggcctgtattagttttctaaggctgtgtaacaaaacactatgaattgcacatcctaaaataatagaaatttattgtcttacagatttagaggctaataatctgaaatcaaggtgttttagggccatgctctctctgcgaaacctgtaggggaatcctttcttgcctcttcctagcttttggtgatttgtttacaattattgccatttcttggcttgaatcttcataacgccaatctgtgtttcctcgtcaaatggtggtgtccctgtgtttccacgtgttcacaacgccaatctgtgtttcctcttcaaatggtggtgtccctgtgtttccatgtgttcacatggctgtctttgtatgacatcaatattattggactaggggcctaccccactccagtattacatcattgtaacaattactaacctctggaatgaccctatttccaaataagatcacattttgaggtactgagggttagaacttcaacagaatttttttggagggaacacaattcaacctttaacagtgtataagtgaaggctatgtttctattttactataggaaagaattaatcatcagattatacctgacagcaatctctttattgtcaatttatgtaacatatagtattatgcaatcacacagtttcatacagtgtcactagttataggaattagtaatatacatctttttgcactagacaatttctggttaaattaggaaaaaaatatcactttgaccaactagttttctgagaaatatctgtgaatagcttgcctgcttctatactcagtttgactatcagattttagaaaagtcttctggtctaggtttaaggtaattcagtaagctaagaatctggaacctttttttctgttcagaaaaaaaaattataattagcgccataaggttttaaagggtcaatgttacttcccatccttttttctttctttctttctttttttatgtatattttaggttctgggttacatgtgcagaacgtgcagttttgttacataggtatacacgtgccgtggtggtttgctgcacctatcaacccatcacctacattaggtatttttcctaatgttatcgctcccctagccctccacccccgacaggccccggtgtgtggtgttcccctccctgtgtccgtgtgttctcgttgttcaactcccacttatgagtgagaacatgcggtgtttggttttctaawcttgtgatagtttgctgagaataatggtttccagcttcatccatgtccctgcaaagcacatgaactcatccttttttatggctgcacagtattccatggtgtatatgtgccacattttcttaatccagtctatcactgatggacatgtgagttggttccaagtctttgctattgtgaatagtgctgcaataaacatacatgtacatgtgtctttatcgtagaatgatttataatcttttgggtatatgcccagtaatgggattgctgggtcaaatggtatttccagttctagatccttgaggaatcatcacactgtcttccacaatggttgaactaatttacactcccaccaacagtgtaaaagggatcctatttctccacatcctctccagcatctgttgtttcctgactttttaatgatcgccattctaactggcatgtgatggtatctagttgtggttttgatttgcatttctctaatgaccagggatgataagcattttttcatatgtctgttggctgcataaatgtcttcttttgagaattgtctgttcatatcctttgcccattttttgatggggttgtttgcttttttcttgtaaatttctttaagttatttctagattctggatgttagccttttgtcggatggatagattgcaaaaattttctcccattctgtaggttgcctattcactctgatgatagtttctttcactgtgcagaagctctttagtttaattaggtcccacttgtcaattttggcttttgttgccattgcttttggtgttttagacatgaagtctttgcccatgcctatgtcctgatggtattgcccaggttttcttctagggtttttatggttttaggtctaacatttaagtatttgatccatcttgagtttatttttgtataaggtgtaacgaaggggtctagtttcagttttctgcatatggctaaccagttttcccagcaccatttattaaatagggaatcttttccccattgcttgtatgtctcaggtttgtcaaagatcagatggtcgtacatgtgtggtgttatttctgaggcctccgttctgttccgttggtctatatatctgttttggtaccagtaccatgctgttttggttactgtagccttgtagtacagcttgaagtcaggtaccgtgatgctttgtttaatcttggctatgcgggcccttttttggttccatatgaactttaaaataatttttccaattctgtgaagaaagtcagtggtagcttgatggggatggccttgaatctataaattactttgggcagtatggcttttttcacgatattgattcttcttatccatgagcatggaatatttttccatttgtttgtgtcctgtcttatttctttgagcagtggtttgtagctctccttgaagaggtccttcayatcccttgtaagttggattcctaggtattttattctcttagtagcaatagtgaatgggagttcactcatgatttggctctctgtttatctgttattggtgtataggcatgcttgtgattttgcacattgattttgtgtccagagaatttgctgaagttgcttatcagcttaagaagattttgagctgagacaatggggttttctaaatatacaatcatgtcatctgcaaacagagacaatttgacttcctctcttcctattcaaataccctttatttctttctcttgcctgattgccctggccagaacttccaatacyatgttgaataggagtggtgagaaagggcatccttgtcttgtgccagttttcaaagggaatgcttccagtttttgcccattcagtatgatattggctgtagatttgtcattaatagctcttattatgttgagatacattccattgatacccactttattgagagtttttagcatgaaatgctgttgaattttctgaaggccttttctgcatctattcagataatcatgtggtttttgtcgttggttctgtttttgtgatggattatgtttattgattttgtgtatgttgaaccagactcgcatcccagggatgaagccgacttgattgtggtggataagctttttgatgtgctgctggattcggtttgccagtattttattgcggattctcacattgatgttcatcagggatgttagcctaaaattctctttttttcttgtgtctctgccaggatttggtatcaggatgatgctggcctcataaaatgagttaaagagaattccctctttttctattgatcggaatatttcagaaggaatggtcccagctcctctttgtacctctggtagaatttggctatgaatccatctggtcctggacttttttggttgctaggctattaattattgcctcaatttcagaacctgttattggtctattcagagatttaccttcttcctggtttagtcttagaaaggtgtatgtgtccaggaatttatccatttcttctagattttctagtttatttgcatagaggtgtttatagtattctctatggtagtttgaatttctgtgggatcgatggtgatatccactttatcattttttattgcgtctatttgattcttctctcttttattctttattagtcttgctattgggctatctcttttgttgatcttttaaaaaaccagctcctggattcattgattttttgaagggttttttgtgtctctatttcctttagttctgctctgattttagttatttcttatcttctgctacttttgaatttgtttgctcttgactgtctagttcttttaattgtgatgttagggtttcaattttagatcttccctgctttctcctgtgggcatttagtggtataaatttccctctacacactgctttaaatgtgtcccagagattctggtacgttgtgtctttgttctcactggtttcgaagaacatctttatttctcccttcattttgttatttacttagtagtcattcaggagcaggttgttcagtttccatgtagttgtgtggttttgagtgagtctcttaatcctgacttctaatttattgcactgtggtctgagaggcagtttgttgtgatttytattcttatacatttgctgaggagtgttttacttccaattatgtggttgattttagaattagtgtgatatggtgctgagaagaatgtatattctgtttatttggggtggagagttctgtagatttctattaggtccacttggttcagagttgagttgaagtcctggatatccttgttaattttctgtctcattgatctgtctaatattgacagtggtgtgttaacgtctcccattattactgtgcaggagtctaagtctctttgtagatctctaagaacttgctttatgaatctgggtgctcctgtattgggtgtgtatatatttaggacagttagctcttcttgttgaattgatccctttaccaatatgtaatggccttctttgtccttttttatctttgttggtttcaagtctgctttatcagagactaggattgcaacccctgcttttttttttgctttccatttgcttagtagatcttcctccatccctttattttgagccttgtgtgtctttgcatgtgtgatgggtctcctgaatacagcatgctgatgggtcttcactgtttatccaacttgccagtatgtgtcttttaattggagcatttatcccatttacatttaaggttaatattgttatatctgaatttgatcctgtcatcatgatgctagctggtcatttctcccattaatttatgcagttttyccatagcattgatggtctttacaatttggcatgtgtttgcagtggttggtactggttattcctatccatgtttagtgcttcctgcaggagctcttgtaaggcaggcctggtggtgacaaaaatctctcagcatttgcttctcgctaaaggattttatttctccttcacttatgaatcttagtttggctggatatgaaattatgggttgaaaattcttttctttaagaatgttgaatattggcccccactgtcttctggcttgtagggtttctgccgagagatccgctgttagtctgatgggcttccctttgtgggtaacctgacctttctctggctgcccttaacattttttccttcatttcaaccttggtgaatctgccaattatgtgtcttggggttgctcttcttgaggagtatctttgtgrtgttctctgtatttcttgaatttgaatgttggcctgtcttgctaggttggggaagttctcctggataatatcctgaagagtgttttctaacttggggccattctcccagtcactttcaggtacaccaatcaaatgtagatttggtcttttcacctagtcccatatttcttggaggctttgtttgtttcttttcactcttttttctctaatcttgtcttctctctttatttcattaatctgatcttcagtcactgatatcctttcttcacttgatcgaatcagctattgaaacttgtgtatgcttcaggaagttctcatattgtgcttttcaactccatcaggacatttaagctcttctctacatggttattctagttagccattcatctaacctttttttcaaggtttttagcttccttttgatgggttagaacctgctcctttagcttggagaagtttgttattaccgaccttctgaagcctacttctgtcaagtcgtcaaactcattctgcatccagttttgttcccttgctggtgaggagttgtgttcctttggaggagaaaaggtgttctggtttttggtattttcagcctttctgctctggcttctccccatcttcatggttttatctacctttgtcctttgatgttggtaacctacggatggggttttgtgtggatgtcctttttgttgattttgatgccactcctttctgtttgttagttttctttctaacagacaggccactcagctgcaggtctgttggagtttgctggaagtccactccagaccctgtttgcctggatatcaccagcagaggctgcagaacagcaaatattgctkcctgatccttcctctggaagcttcgtcccagaggggcaaccgcctgtatgcggtgtctgttggcccctactgggaggtgtctccaagtcaggctacacagggatcagggacccacttgaggaggcagtctctctgttattggggctcaaacaccatgctgggagaaccactgctctcttcagagctgttatgcagggacgtttaagtctggagaagctgcctgctgcctttttttcagatatgccctgcccccagaggtggaatctagagaggcagtaggccttgctgagctgcagtgggctccacctagctcgagcttccctgccactttgtttacactgtgtgtatagaaccacctactcaagcctcagcaatggcggacgcccctccccctgccaagctcccacatcccaggttgatctcagactgctgagctaccagggaggaggtctctgtgggcgtggaacctgctgagccaggcacggaaggggatctcctggtctgccagttgtgaagaccgtgggaaaagtgcagtatttgggcaagagtgctcctccaggtacagtcactcacaacttcccttggctaggaaagagaaatccccccaccccttgtgcttcccgggtgaggtgatgccctgccctgtttcggctcgccctccgtgggctgtacccactgtccaagcagtcccagtgagatgaatcaggtacctcagttggaaatgcagtaatcacccatcttctgcgtcaatctcgctggaagctgtagactggagctcttcctatttggccatcttggaagcgtggtccacttcccatcctttaaactaaggaaaactttagttttgggagaatcagtcagaattgtaaatctttttctcaccattgtgtttctgtcctttgtggaggctttttgttaagactgtacagatcagatttagtaacctttagggaaacttaagcaatatatttaactttatgcatgattcatggccttcattatttcttataatgtttctcagttatcatttttttaaccatctgaaaatttgttttgaagggctcttttctcatttaatataagcacaaatctcttaattgaatacagtatttactaagttcagacttgtgctggttaaactgaatgatttgctaaaacttgtgaatgaactaaatgctttcagaaaattttcagtaagaaattgtttgcctaagatgagttcttattctttctttttaagaatattgattcctagaaaatgcatgtttctgaccataagtgttcactaaaaataaagcttaaatttcttatcttaacacaattttctttctgtacagtatctataaccatagcacttaatgtattgcaytaagaatatttgtgttttccactacaaatgcttaaaatactttccccaacatttgaaaaatttatattaaagatatttttctaatttttatcatgagttttttgcatcattttgaataactttttttcaaatgatttcagactgccatatagagtatctgaagtatatgattccttctttgatttattctatgattcattttagtaagtattatgataagtrctaaaatataataagaattacagctctgatccaaaagaatttatactccaatgttatatttgggtaaaaataaaataagcaattacagcatagtattatctagaactgcaagggatctgagattctaccctagttgcaaactaactagttagcctgccatagtttcatagatgctgacagaaggcacaagacgcttgggtcaaagagaaatataaacatgctattatcgcttcattaaaaaaatataaaatggctttttttgcttgtttttacttccccctctacttttcttctgtttctctgtaaagcaatattttttggaaggattatctgtaactgatgtatctaattatgcttcttttctctccaaacccattccaaacaaatcttcgcctcaccactccactgggaggattatctgtaatttgtgtatctaattatgctccttttctcaaagccaccaattatttccatattgctatatccagtggttaatggcagtgctcatcatgcttgacctagcagcaaaatttgactcagatgaacacactcatttctcattttcttcttttgccttctgtaagagtattcttttctttctaccttcctgtttattattatttttagccttttcttaaagtaatgagaaataatatacaatacagaaaactgtacaaaataaaaatgtaatgttacattgatttatcacaaagtgaacattcatgtaacaaccactcacgtaaagaaatagttatcaccaatacctcaaaaattccccttcttctccttcccatccattattttctacctgtctccaaaaagaaacgacttttagtaatcatttccttttctttgtaatttagtttgacttgatctattaaaaactttatatataaagggattattcaatgcatattttttgtgcctgacttcttcaagtcaacattttatttgtgagatttaaccatgttgtttcattcagctttagctcatttattttcactgctatatgatattccactgtatattaatatgccattatttatccatttcataattgctgaacttttgagttgctgacagtttttgcaatcagaaataatactgctaaacaatcttgtacccatctcttaatgtaattgtacatatgtttttatttggtatatagttaggagtggaattgctgggtcatgtggtatgcatatattcaactttggtagataatgccaaaatgtttttcaaaatgatttatccatttatcctcccatcagcatatgagaactccagtttttcttccccaaacctgatattactggttttaaaattttagccgtagcattttaataaacgtggttttaatttgtgttttcctattaatgaggttgaacatcctttcatatgtatattgaccatttgaatatcttcttttgtgaaagtcttgcttgagattcttactcatttttctatttggtttatctgcttttgtgatttgtatagcttcttttcacatattagatataagcccttttttggttatgtgtgttacaaacatttcttcccattttgtagtttaatttgcactgaacattgtgggatagatgctgttggtatgctacccacattgccttggtattcacttttgtgcaggaagacttcttgcttgaagcagctgagactctgctttctgaagaatttctctggccataagagaggctggagggtattagggaattgatgccctggcaacagctcttaaccaacactgaataggagttgatgaataaataccccattttccttacctctggagatagcttctgaaacttactctattccatctctcagatgtctccatctgagagatggagacaaattggttacttgatcattaatgtctcctgtacaggtatcctttccttctctgtcttacttccccactcccttgcttgtttttgctggaattactttttaaaataaattatttgctctcaaattctagtttctcagagttggcttttggagaacctatcttgagttagtaatatcttttgataaatagaaattcataatttaaatggatctagtttatcagttttttttcccttcatagttagtgtttgctctgtcctgcataagaagtctttacctactctaatatcttgattgtacccatggaattttaattttaatttatgaagatgattgaatgataacatggagacactaatgctattgtttattacrtatagttcccaagaggagagggcatgtcaggcaggaccacctggggaagtactagggttggtcgagaggcagaaggagcaaggagaaacatgggcaaaaatgccaggaagttgctaggtagggaagycacctgttgggcaggaagtaaaacacagatgttgaagtttgtgattggagagttygtaatatgattttcacatgcctgcaaaagccagactgcaagggagatgtaaacaactttagctattagtttcaccgtgtgattaatggatgccaaatcatcaattacaaaatctataaaagttaattagaacacacaaggccatgaagatattcttctttattaattccagatattttattgttttaccttttatacttagatatacaatccatctggaattaatttttgtgtgtaggttgagggaagggccatgtttcttttcttcccatatggattcataattctactggtactatttacggaaaagactctcctttccccactgttccgcagtcaacctttgtcrtaaatcgagtgcccatatatatgtttaggtctatttctagactctttattctgttccattggactctgtttttacgtcaataccatcatttcttaattactgtaattttattagaagttgacattcattcattagttagtctttccatcttcttcttcttcagtggtgtgttagctatttttggaattatccccctgcccttttttgagacagggtttcactttgtcacccaggctggtgtgatcactgcttactgcaggctcaacctcctgggctcaagtgatcctcccacctcagcctctatgtagctggaccacagacatgtgccaccacacccagctaatttcttaactttttttttgtagaggcagagttttgccatgttgcccaggctggtctcaaactcttgagctcaagtgatcctcctacctcagactcccaaaatgctgggattaccgacataagccattgcacctagcatgaattattcttctttagtgatagtgatgatagttgttttctgtttagtgaattttatttatttttaatcttccagttagtttcagagatccattgtaagagaacatgacataacccatttggggctaacaacatttattatggcattttttctaaattgrtgcatatggtcacagaacagtccaggtattgtgcagtggggctatagaccacggtacctcaaaaagaaacatctggctaggcatggtggctcatgcctgtaatcccagaactttgggaggccgagatggctggatcatctgaggtcaggagttcgagaccagcctagccaacatggtgaaaccccatctctattaaaaaaaaaaaagaaacatcttcatatcaagtacattatgtcataattgtagtcctaaaactctacttcatctgtcagtattggtaaattagtccaggcacaggatcattcctcattcctccaggtttggtaaaactgcycaattctagagtgcaatttaatttatataaaatttattaataaaatttggaatgttgatattgctttattttggcaaactataattcctagtggaattatgaaaagttttacttgaacaaacaggaaccaatgagggaaatcagtgttgttctataactrtctgggaggtttggattcagccttttaaaatatcatctatctacaaatactctttgtgcctttttcagttaatcttagtctcttggtgctgctcaggattggactgcatctccttttgctattcagtttaaattgaacccaagagattgaaatagaaatgaaaattggatacaaagagatgaactcttctyatttccagacttttgggaaaccggtgtgctaggttaattatggtgggtcaataattttgtatcattctttaggcttgcattgcggctaggctgatatataaaaatatatgggatatggaaagagtaagaatgttcaagaggaaaacccattgttctattaaatatttakggtgtccayycaaatttgggtttttatcttaacaggtcaatgctgctgaatcaaagataacaaatttaatatacttaaaacataccttggaacttgtggatcctttaaaggtaatttatgtgtgtgtatcgtacaaaacatgtccagcattattttttaactttttgttggaaaaaaatttcaaactcggaaaattgcaagaataacatggcgaatttcccatattttttttctttgtacatactttacatacacatacacaytgttagccttattatgcttactgaaccatttaagaataaattgcagcacctaagtactaaggtactaagtacttaggagactaaagtctcccaacaaaaagatgttctcttatataatcataatattattatcaaattcagaataattaatactgatgcaatactattttataatatgtatcccatactcaaatttttaaaattgttctaataatgttctttatagcatttttttcctgatatagggtccaatccaggatcatatcttatatttaatgtcatgttttttaaaactcctttgaagtggagaagtttctcagcctttgttcatgatactgacattttgaagcataagggtcaactttttaagtagaatttcctcaatttatgtgattgctttctcctgattaaattcatctrtgcatatttggccttaatactctatgatgtatcctttttagtgcatcacatcaagaggcacataatgccatttcctcattcttggtgatattaactgatcaatttcttcaccataaattcagattttcttttgtaattaataagttattaatctatggagagttattttgagaatgtgtaaataacccaatcctcatcaaacttccacccattgattgtagaattaattgatggctcttacctgaagtaattattactctgatggttacaagatgattattttctcattaacttttaaatactacactgtgtaaaacttgtttttattgaagtgataaagggaactgcttttgaaaaagaaataatgaaaaatatggaataactttgttatagagattattctaataaatattaacatggtttggctgtgtctccacccaaatctcaccttaaattgtaagaatccccacatttcaagggcggggactggtggagataaytgaatcatgggggtggtttctcccatactgttcttttggtagtgaataagtctcacaagktctgatggttttataaagcagagttcccctgcacatgttcttcttgcctacyggcatgtaagatgtaactttgctcctgatttaccttctgccatgattgtgaggcctccccagccatgtggaactgtgagtcaattaaacctttttcctttataaatttcccagtcttgggtatgtctttattagcagctgagaacagactgatacagtaaattttaccagtagagtggggtgctgctgtaaaggtacctgaaaatatggaagtaactttggaactgggtaacaggcagaggctggaacagttcggagggctcagaagacaggaagttgtaggaaagtctgaaacttcctagagacttgctgaatggctttgaccaaaatgctgatagttatagggatagtaaggtccaggctgaggtggtctcagatggagatgagggatttttgggaactggaataaaggtcactcttgctatgcaaagagactggcagcattttcccctgccctggagatctgtggaactttgaacttgagagagagggtatccagggggaagaaattcctaagcagtgaagcattcaagaggaagcagagtataaaagtttggaaaatttgcagcctgaggatacaatagaaaagaaaatcccattttctggggagaaattcaaaccagctgaagaaattcgcataagtaacaaggaggcaaaagttaataatcaccaagacaatggggaaaatgtctccaggtcatgtcagagacctttatggcagccccttccattacaggcccagagacctaggaggaaaaaatggttttctggccccgcttgctctgtgcagcctagggacttggtgctctgcgtcgcagttgctccagctatggctaaaagtggccaacacacagctcgggccatggcttcagagggtgcaggcctcaagccttggcagcctccatgtggtgttgagcctgcaggtkcacagaagtcaagaatagtttgggagcctccacctagatttcagaggatgtayggaaatgcctggatgtccaggcagaagtcttcttcagggacgggaccctcatggagagcctctgttaggacagtgcagaaggaaaatgggcaaaagcccycacacagagtccccacttgggcattgcctagtggatctgtgagaagagggccactgtcctccagactccagaatggtagatccaccgacagattgcaccatgcacctggaaaagccacagacactcaacaccagccttaaaagcagctgcagggttcagggggctgtaccctgcaaaggcacaagggtggagctgctcaaggctatgggagttcacttcttgcatcagtgtgacctgtatgtgagacatggagtcgaaggagatcattttggagcttttaggtttgactgtcccactggattttggacttgcgtggggcctgtagcccctccattttggccattttctcccatttggaatgggtgtatttacccaatgcctgtaccccagttgtatctaggaagtaactaacttgctttccagttttataggctcataggcagaagggacttgccttgtctcagatgagatttggactgtggacttttgagttaatgctgaaatgagttaagactttgggagactctttggaaggaatgattggttttgaaatgtgaagacatgagatttggcaggggctaggggcagaattatatggtttggctgtttccctacccaaaactcaccttgagttgtaataatycccacatgtcaaaggcagggccaggtggaggtaattgaatcatagggcagtttcccccatgttctcctggtagtgaataagtctcasgagatctgatggttgtttaaaggggagttcccctgcacatgttcttcttgcctgctgccatgtaaaacatgactttgctccttattcaccttctgccatgattgtgaggcctccccagccatgtggaattgtgagtcaattaaacctttttcctttataaattacccagtcttgggtatgtctttcttagcagcatgagaaaggactaatacaaatatgtatagttaaagtaatgtggcaaaagacttcaaaaatgttttcacctttcttgtaatgaaataaatggaataaatcaccagaaaaatattgagagatttcatgaaacacaaattttaaactttggtatgtcaaaagcaaagtaaaaggcaaaggtaggaaaaatttataacaaatgacagtttattagtctgttttcatactgctataaagaactacsaaagactgggaaattcataaaggaaacagatttaattgactcacagttcagtatrgctgggtaggcctcaggaaatgtacaatcatggcagaaggagaaggggaaacaaggcacctttgttacaaggcagcaggaaagagaaggaatgcaggaggaactatcacacacttataaaacgatcagatctgatgagaactcactcaccatcatgagaacagcatgasggaaactgcccacattattcaattacctccatctggtctctccctggaaaagtgaggattatgggaattctagggattataatttatgatgagatttgggtggggagacaaaccctaactgtatcagacagacaaaatactaatttctgtcatcataaaactcatgtaatttcataggaaaatattgaaatgccaatggaaatatggaaaatgacccaaagaaggaaatcaaggtgattaataaatggtaccaaaaatgttaacctcatcattaatcaaagcaataccaattaaaaccatagttcttatctgtcaaagaagcagacattttcatttatcttaaaggatgtaactcatttctaattagagatctatgagacagacaacttattaaacagctggtaaaaatacagatttcacatactttacaaggaattgtgctggaaatgtttgcaacatctattttttgatcctgtaacactacttctagagatttgtctgaaagaacttttcagaaacattggccaatatttatgtccaacaatggtcattacagtattatttatttatatcagtgagaaattataagtagagtagaactgcagtaattacaggaagagactatttgctttccatagactggaatattatgaattattaaacatttttgccttgaaaagttttttatatgtatgatatagtatcagttgagcatccctaacccaaaagttaaaaattttagatgctccagattctgaaactttttaagtaccaatgtgatgtcacaagtggaaaattttacatcttgaccttatgtaatgtgttgcagtcaaaatgcaggtagtcaacacagtttattcagcatcctaaagggaaaaaagaccctcccagctatcttcatctgtaatatatctttcctgtgcaytcccagattcttctatgcaaacattcccacaaagggtaacacaatgacacagctacaggtcagatgtgccaatggcaagtttccatgatgctccacatagggccaagactgatgtgcattactgtttttttgcttattgcctgctttgtctagtggttaagataacaaaaacaaaaaacaaaacaaagaaaatgtcagaaaggcctgcagtaacagtgataagaaaaagaggaatcacttacgtttatatgtaacacagaaagtcaagctattggagaaactggataatggtgtaagtgtcaaaggtcttaaagaagcctgtgctgttagaatgactgccagatatgacctaaagaaacaaacggataaactgttgcagttctatgctgaaagtgatgaacagaagctaatgaaaaatagaaaaacactgcataacattttaaaaaaaagaaagaaagaatggatccatctgccttgcagtgaacacatgccacttaatggtatactgatcatgaaacaagtgaagatgttatcacaatgaaatgaaaattgaagggaactgtcaatattcaacaggctggttgcagaaatttaagaagaaaataacattaaatttttaaagatttatagtgattgagcatctgctgmtcatgaagcattggagaaattcattgatgagtttgccaaggtcattgctgatgaaaatctgatgccagaacaaatcgataatgctgattaaacatcattgttttgacattattgcctcagaaagacactgactacagctgatgaagcagcccctgtgggaattaaggatgccaaggacagaaaacaactatgctgggctgtgctagtgcagcagacacacgtaagtgtaaacgtgctgtgataggtaaaaccttgtgtctttgctgttttcaaggagtgaatttcttaccagtttattattatgctaacaaagaggcctgaatcaccagggacattttttttccaattggtctcacaaacattttacaccagcagctcatgctcactgcagggaatctggattggatgatgattgaaatattttgttattccttgacatctcttctgttaatcctccagctgcaattttcatcaaaaataatgtttatgccatatattttcacctaaatgtgacttcattaattcagccatgtgactgtgacaagagtatccttagatcaatgaagagtaaatacaaaaacactttttaaaaattttttaatttttattttagttttgggggtacatgtgcatgtttgttatgtgggtaaacttgtgtcttggaggttatgttgtacagattatttcaccaccgagttactaagcctagtacccaatagttattttttctcctcctcttcctcctcccaacctccaccctcaagcaaacgccagtatctgttgttcctgtctttgtgtccatgagttctcatcgtttaactcccacttttaagtgaaaacatggggtatttgattttccgttcctgtgttaatttgctaaggataatggcctccagctccatccatgtccctgcaaaagacatgatcttgtttttatatatatatatataactgcatagtattccatgatgtatataaaccacattttctttatccaatctgtcactcacgggtatttggttgattccatgtctttgctatattgtgaacagtgctgcagtgaacattcgtgtgcatttgtctttatggtaaaatgatttatattcctctgcatatatacccagcaatgggattgttgggtcgaatggtatctctgttttcagctctttgaggaattgccacactgctttccacaatggttgagctaatttacattcatacaccaacagtgtataaatgttcttctttctctacaagctcaccagcatccgttgttttttgactttttaataatagccattctgactggtgtgagatggtatctcattgtggctttgattcacatttctctaatgatcagtgatattgagcttttttttcatatgtttgttgtccacatgtatgtctttagaaaagtgtctgttttgcttactttttaatgaagttgttttattcttgtaaatttaaaaacactttcttgaacagcgtgctagcatcagtgaacagaagcatagatgtggaagtttttttagagttgcagtcttgctctgtgcccaggctggagtacagtggcacgatcattgcacaccgcacccttgaacttctaggctcaagtaatcctccgacctttcctgagtagctgggagtacaggcatatgtcactatgcccagataattttttaaaattttatagacaggggtctcgctatgttacgcaggctggtcttgaactcctgggctcaagcaatccacctgcctcatcctcctgagtcactgggattacaggtgtgagtcaccacacctgacaatggaaggtttttgaaaggagtttagtatgaagaatgccatatatgctgttgccagtgcttggaacatagttactaaagacgtggttgtgcatgcctggcacaacttctggcctgtgatgctgttcaatgatgatgataaaacaaggtggtgactttgtaggattccatatgtcaagtgagaaaaaattatgtctgacatcctaaaatatgcaaaatgcatactttcagagtctgtcagtaagctggaagaactgggtgttaaagtttgtatttatttatttattatttgagatggggtctcactctgtcacccaggctggagtgcagtggtgcaatctcagctcactgcaacgtttgcctcccaggctcaagccatcctcccacctcagcctcctgagtagctgggaccacaggcaygcaccaccatgcccagctaattgtttgtctttttgatagagacggggtttcgccatgttggccacactggtatcgaactcctgagctcaagcaatttgtccgccttagcccctcgaagtggtgggattacaggtgtgagccatggcgccaggccaattgacatttttaacatcaataatgaggccccagctgttcattaatcaayggatgatgaaatagacaaaatggttctgattcaaggtgatcatgacagtaatgacgatgaagatgatgttgtaacactgcagaaaaaacgcctacagatatggtaaaaatgtgtgatgggcttattgaagatctacagtttttgttaagcaaaataaaattcctatttttactgtataagaatggagcagcacacattcataacagaacaagaaatcatgtcaattataaaatcaaagagaaatttctatgacaaaaaccattattaatgaagcagatgactctagaggaaacatttctaaaagcgggccagcaaaatgcctccgtatccttagaatacccacttcctggtcccttaactgtttctgatgtttcatctcacttagaaaaataaaatacagcttacagtaacctcttaatcaaaatatagcattataggtggatactggaaattattagttgttgctgtcatttaagagctgatgcaggtactctgggggtgctaccgtgctgttagcctgaacacattttttcactatattaatggtatgtcaggttttttttttactgttaagtacttatgggtaaataagdgttaaaaaatgattgcttattggtagcatataaattcagagttgggaatgatagtgatgccaaacaatcacmaattgtccacctaagtgcctgaaayagtgacacctttgctttctggtgkttccatgtacatagacttctatgtgcaaaattatttaaagtgttgtataaaattacctcaggctatgtgtataaggtgtacatgaaacataaatgaatttcatgtttagactcaggtttaatctccaggatatctcattatgtacatatgcaaatattccaaaatctgaaaaaaatccagaatctggaacttctgatcccaagcattttgggtaagaaatactcaacctggattaagtcggggttggggaaggagcacacaatgatataaaattatttattttagatactgacaggaaatataatatttagaatgtttatctttggacaatagtagatttaatttttttctttcaattttggtgaattttttagtttttatctgtctgtgcatattattttctgttcataagcaaaaaaagttatcaccattgcttcatatcaaatttaaaaaaggagataatggccaggctaaatatgctttctcttcttcttttctgtttatttagttagtgaccccctcatagttttcattaarcaaaataaaatccctatttttactatataagaattgagaaattgctctatttatgaatatacaaagcacttttttggtctaatgtatatctaacctaaattttggaattatatgtagagtactctaaatgtacaacagtagttgtttaagtacctatatatgtaagttgtcgggtgttaacaattagtagagaggcaagaaaaataaaatttataataagcagtggatggcactaattagccatgtactctttatttggaaaaagggaaagatacagtctatcctcagctagatagctacaaatatattttatgagtatataaatgaggaaatgaagaaagcacttggtaaactataaagtattaaacaactgtaaaatgatatgtttgaatgatcttgtaattgattatccttaacttttttattttattctttaatagattgctatgaagaactgtaacacacctttattaagagcttactatggttccttggaagacaagaggtctttgtcactcaaccgttaataaaaaataagattattctcttcttcctgatcataactgattttaaagactctaattgtattctatggaacaattacttgagttttggttaacagaatctttaacctattcatcaaaattctaattgtacatttcacattataagtagaakaaatagggtaacaacacattgattatttgtgttaaaggacaattagaatagcatgaaaacttgaaatccaagcacaattttaatatttccttttaaagccattctccatggaaagacttgcaaataataaaaatatatttctttattttgttaaatcatgaagggtctaatgtaacaaaaaatagtagatataaatattgaatacaatctaaatgctgtttaattttaacagtattaaattattagcagtagttgtggactgaagaactactggttcaatccagaccttggttctgaactgaaaagatttgtgatacttaagaactattattctattaattgaagatttatcccgtgtgaggccacacattgaagttaataataaaactggcttaattacaaataaaatatagaatggaatgaaggaaaagttgaggaaaatatgtgttaccagatttctggtttgcataatcactgaactttaccactggtaattgtgaggttcctgttacgctgtctacatatgtgtttagtgtctcttgcctctaccgaaggcagggatcatatgttattcttctctgaatctcttcacctagcacagtgcttgatacatggtgtacattgatgtttattgagtgaatgagcatgaagccacaatttttatgacagttctttagagatgtattttgtacccacaggcacatcagtatatgtaatttgtgagctctattagcagatgtagaattgtttttggggtcctgatgctgttttagactagtcctgactgatgaaacagtttaaatatgaaatagtcacagctctaacttaagtaaatttaaatatttgttgcttaattagttatttcaaaataactttcaacaaaaatttgctatcatcaattgtgattcaaattataaattaaaataactctttgacttattgcctataatgtttttcttttggccttaatattaggtttggaatcatacttgaaaagattaaaacagtaattaatgatgatgcaagatacatgaaaggatgcctaaacatgaggactcagaagtgctatgcagtgaggtctaacataaatgaatttcttgacatagcaagaagaacatacacagagattgtagatgacatagcaggtaatttmtttatttgataatgttttttgtagggataaaacagccttttcaggacatgctgtccttttttgctgctgatgactagccatacatattttaaatttatttttcgttaccaaaacataaggttagcatgtagtgccatttaaggaaacagcatatgtggcagccttcatactaaactccttttgaaaaccttccattgccaagtgcaatagctcatgcctataatcccagcactttgggaggccaaggagggctgatagcttgagtccaggagtttgaggctagccttggcaacatagctagtcttttgtagagacaagacgttgtctctacaaaaactgagaaaatttgccaggcatggtgatgtatgcctgtagtcccagctactccggaggctgaggtaggaggatcacttggatcacttgagcccaggaggtcgagactgcagtaagttatgattgtgccactgtgctcagcctgggcgacagagtgagatctgtcttgaaaaaaaaaaaaaattattagagtttgaaagagcaacaagacctcctatttatgtataaaataagaatttaaaaaccatgtgactctttaaaacagagtgatttttctcattaaaatttattcattttgttttgtttttgtttttcttgtttctggtcaccaggaatgatatcacaacttggagaaaaatayagtctwcctttaaggacaagttttagctctgctcgaggatttttcatccagatgactacagattgtatagccctacctagtgatcaacttccttcagaatttattaaggttcattttagartggttaggaaattagtgtttctgattttayagaattacatctacatatttttgggacttcttgagttttgcaagccaaatttctgaatgttctrtatcttctcctrttcctacccacccacctaactaatgtactaatctaagagtgatttagatgcttttgcagaaataccaaactcagtgttttccacagttctgggagcttggtgtaagaaaaaaaggaaaatgaagaaagaacatccaaaagctgtttatgataaaagaaattaggaaaataccacaccatttgcctgttaaaggtttaaaaagtcctgaagtaaataaatctacttaacttttaaaaatctaatatttccaaacctttgtaccacaggaataatttttcctatatagctcctttacaatataccagtttgggaaagtctaacccactctaatctttgttctatctgcttagggggtactttttgataagaacaaaccatttagctttcaggcttttagagcttgagtacgattagagattgagttgaggttcagatataggacaagggctgcgacaggggtcagagatggagtgaggatcactgatgtccatcatgcrtgttacttggtaataagatgtagtgtttttaacattttaagacctatcagagtagtcatcccagatgaactaggtcaaaatatcctgctttttaaaaatgaatgtatgggttaaaaaatttggctttatcctttgaagtgatctacctcttacatttcacaaatattatttagaactttctttgtgataccatatctcaaagagtaaaatkattaacctaaatacccatatttctgttgtttaaaatcttacatttcatagtagtgtgcatttatcttgacatttgttttttaatctccaagcagatttctaaagtgaaaaattcttacagctttacatcagcagatttaattaaaatgaatgaaagatgccaagaatctttgagagaaatctatcacatgacttatatgtaagagcatttgaagtatttgaatattgaattaaattggtttaawttgagaaactgttacaattgtattagtttaatttttatctaattacagacaattgtagaattatgcatgttagcaaaggaagtctgtctttgtgattagaatcactgagcctcacagaagcttcggggaagatctaattgcaaacaaatacttttataattgatatttctgtaatgtgcattctaccatgatgtagaacttggcacatcaggggcttacctgggcttcgttcagtttattattttcctatggtctgtaagtcctcagcttcttataccttgatattaataattcaatagcaatatcacaatagtgtcagttcttttgctggtcatgaaatagtagcaatacagccagaaagaagaagtagaagatttagaacacttattaggctgaagtaataaagagaaaggttgggctttcaagacaatttcaaggcatgtaccaccaacattttaatatatagtaagttttgggtacatatttatctttgcaagagaaaaactttttgcactatatcacagtataactctgccttataaaaacttaaataattatattattcagatattgtgtctgtgtgcatgtgtgtgagtgagagaacaagaacgagagagaaagaaaaaatggatgagagagaaaatgcatatagtttttgtgttgaacttaacatttgcaaattcacaaagtgattagcaaatgggatctttccaagtataatgagggcttgatttgacctatatcaaatattcttaataataaaaacttattttattaatatcatataaaagcagttatttcaaaaatgttatgttaatacacaagaaratagattctttgccactaagtagctgtgatcttgagcaaaaacttcaatttcctcatctctaaaatgagacagatgaacaataggctttatctatagtgtataactcagatgtgaatatyattttacttcaggcaatgaatttaatattattttacgattacaatgtatgtcccttttgaaaaaacattattacatgtcttaccaaacgtgttttcaggatagtgtgcaaactgcttagtgagatttatgaacatattcattgcttatataaactatctgacactgtgtcaatgctggatatgctactgtcatttgctcatgcctgcactctttctgactatggtaagttgctttctttggaataaacatattgcatagttaaatttgtattcgattcaaacaatttgatataatagttatgacatttaaaatttttaacttgaaatagagtctcttgcctctggtcctagactaagacacaaaataaagaaagtgagattacccttaaaattttttttgaagtaaaaattattctctcagaaattggcaaaccaaaaagaaaaaattgcaagaaactaaagattccccaaataagaaagactgtaagagctgtctccttggtaaaaatgacagtgatctaaatttataaagttcaaatctgaatacttattagaagcagcgtgataaacgttaatagagagaaatgcatctccagagtgagcattttaatccactagctctttagatgtgaacataccaaaattaggaattatgtaatttatttttatatcccaagtctataaaaaggccatgaatataaatgttaagtaattttctcatgttaaatgaatacttcgagttagtgctttgacatttcttatctaacttaccagtaataaccatactccagtatgcaaatttactggactagtatgtgataattatggttgaataattgtagacttcattacattaaaaacattgaaatttctaatgtaaatcagcagtaaaatttctaaaatgttatgttaatttacttttatgggatgtatcttaagattttttcatatttcttatggaaatattaactttttctattggtattttataggccaaaacttttcaaacttttatatctcctttgcatcaaaactctactttaggggtcagatattccaatggtagttttgtttttaaactattaagagatttagtcttgcttcattttagtttgagaaggatcattctgaaactccatatctataaataatgaatttttgaaaatacttaaaatttttttyctaacctcacttttatgatgaatgttttcaagtttatgcattttagataaaggtatggaacattttggttttcacatatgctttcaccctcttcctcctccccccacttcaggtggtatccatagagacctgatccttatttatttctatagattagcagattatttgtgttgatcttctctattctcattctctgaaatttccttttatacaaaatttctccatgggcttagaaagaattatttttatatttgattttattctataatcatacctcaacttatgagctaggtgtttgaaaccagcctgggcaacatagctagacctcatttctaaaaaaaaaaaaaaaaaaaaaaaaaatcggtgagaagtggtggcaggtgcctgtactcccagcttcttgaaaggctgaggcaggcaggaggatggcttgagcccaggagtttgaggctgcaataagctatgattttgccaccgtattccagcctgggtgatagaccaagaccctgtctctaataaatacataaataaatgctaagcgtaccaaatttgaaataatattaaagtagggaagtagtgtttaaggtagagtaagtaaatatgcaactctgtattaccagtaaccaactatgatttttaaagtacaatcaatgagtacttggttcttttttatttttatttttatttttttttgagacagagactcactttgtcagccaggctggagtgcagtggcacaatctcagctcactgcagtcttcacctcccaggctcaagagatcctcctatctcaaccccacaagtagctgggactacaggcatgagccattacacctggctaattttttttttttttttgtagagatagggtttgaccatgttgcctaggctggtcttgaactcctgagctcaagcaatcaagcaatctgccctcctccgcctcccaaatgctgggattaccagcatgagccatcacgcctggtctgcttggttctttttaatctacaaaaagctgaaaattttataaactattttggagctcaggacagtggtaaagaactaaattctagagttctctagaagtgaataaaagttgtgatagtgattagartgtgtccattataatttagaagaatttgggtggggatttgggataatatagtaccttaatgttattattccaaattgaccartgtgaaaatcactaagatatagacaatacatacacactacaaaatctttagacacaaatatattaatctttaaaaaccattctattttttttcttaagttcgaccagaatttactgatactttagcaatcaaacagggatggcatcctattcttgaaaaaatatctgcggaaaaacctattgccaacaatacctatgttacagaagggagtaattttttgatcataactggaccaaacatgagtggaaaatccacatatttaaaacagattgctctttgtcagattatggcccagattggtaagttatggctttatttataatgacsagttttacactcttttcagaatgctttgtgcctaatttttttagggccatgtgcctaattaacccaagaacagtttggagcagattctgttacctaaaagtataacagtgtgtctgttgtgtaaactataactttactatttgatatttattaagctccatccaatttcaattgcattgcactaaaatttttttgggatactacagaattgggaacattcttactataactattaaagttgcatcaaatattactaaattgaatcatgcaattatttctggttcaaaaacaaagtttgttgtgagaaaaagtgaaatgagtaggttaagctgttgcctttaataatccatgtgagttttttccaaaattattaaatataatattgagcagagaaacatttcccttaacttgaggggtaccaataacttggccatagcagttgatatattatacatacacatgtgcatacatgcatctaaatggctgtcactgacccaacattgttacctatttcttaatatggaggcccagcttaactcctaattctgaaaactgggtttccttgagaactatatgaatcagagatgagatacttggccaaaatgaagtggttcttaagcagggttggttttgatcccttacctcccaactcccagaatttggcaatatctggaaaaatttttggttgtcacagctgaggggagtgtagagtccaggaatgctgttaaacatcctacaatgcacagaacagctcttcctctccacgctcccctgctttcctcaccccaccatacacacacacataagaaagatttattgagcccaagatactagtagtgtcatgggtgagaaaccttggtctaatgtaatgaattgtaaggagaacaaagcaataataatattggtgatacagtataaattcacccttagtactgggacaatcagagacaaatgagttaatgaagagtaaatattttattgattttgtaggtttattggaattaaaaggacattttagctaatttccttcgccttataagaatactgtctgattcatgtaagacataatacttcgatttgaattagctatgaggagctaatatatatgtatatatgtatatgtatgtatgtatatatatgtgtatatatatgtgtgtgtgtatgtgtgtatatatatatatgtgtgtgtgtgtgtgtgtgtgtgtgtgtgtatatatatatatataccagccaggaggcttctgtaataatctagataagaaaggttgagaaactttttgatggaggttaagagagcagagaaaatacaaacatataccacttaataatatacgctatgtgtatatatatagggtatatatataccttctatatataatataaatatatatattatatacattatatatataaaatatgtatataataccgtatatatactacgtagtatatatagactcacactgggggtgtgtgtgtgtgtgtgtgtgtgtatatatatatatataaaggtatgtaacattttggttttcacatatactttcacccttttcctccacctcccacctcagttggtatcctgagtgtgtatatacatatatatatatatatgtatatatacacacacacacacaaacactgggtacatatatatatacatataaccttcacatttatttcacatttatataatgaaggtaatatatatgtatatgtaaagtattatatgtattatatgtatatgtattatatattacatatgtattatatataatatatattatatattattatatattatatattatatattattatttattatatattataatatattatatattatatattataatatatatacctgatatatttaaggtattatatataataccttatatattatatatataataccttataaggtattatatataatattatatataaaatatatattatatattatatataatatatattatatataatatataaatgtatatattatatattatacatatatattatatacatatattatatataatatatattttatatattatatatgtatatatgtaatatatataaccttcacatttatttcagttatataatgtgaaggtaatatatatatgttattttgtgtatatataaagtattatatataatgtattatatattatatagtatatatagtatatataatgtattatatattatatagtatatatagtatatataatgtaktatatatagtatatataatgtattatatagtatatatactatataatgtattayatattatgtatagtatatgtaatgtattatatattatatagtatatgtaatgtattatatgtattatatagtatatattatatatgatgtattatttagtatatataatatatatgatgtattatataacatatataatatatatgatgtattatatagcatgtatagtatatatgatgtattatatagcatgtatagtatatatgatgtattatatatagcatgtatagtatatatgatgtattatatatagcatgtatagtatatatgatgtattatatatagcatgtatagtatatatgatgtattatatatagcatgtatagtatatatgatgtattatatatagcatgtatagtatatatgatgtattatatatagcatgtatagtatatatgatgtattatatatagcatgtatagtatatatgatgtattatatatagcatgtatagtatatatgatgtattatatatagcatgtatagtatatatgatgtattatatatagcatgtatagtatatatgatgtattatatattatatatggtatatatgatgtattatatattatatatggtatatatgatgtattatatattatatatggtatatatgatgtattatatattatatataatatatatgatgtattatatattatatataatatatatgatgtattatatatattattatctattatatacgatgtattatatgcaagttattatgtataatatataatgtattatatattatataatgtataatatataaatatataaatatataattatgtataaatatagaaatatatacattatacattatatacattataatgtataatatataaatatattatatataaatgtatacattatatataaatatattatatacattatatataaaatatgtatatagttattataccttatatatactaaacagtatatatatatactcacactggtacatatatatatatattatatatatatatattaccttcacatttatttcacatttattctcctagaaactccataagaaagttgtatttgaaatctaagttctgctctctgagggcaggacccatgtctgtttatttaccctaacacatagaagggcttcaataaataggtattgaatttctataaaatgaggaaagtcaggctcaaagacttgcccaagatcacccagtataaatcctttaccttagtcttccccacttgccccattatgccgtttgactctgtgtctccacccaaatctcaccttgaattgtaatcccacgtgtcaagggagggacctggtcggaggtgattagatcatggggggcggtttccccaatgttgttcttgtgatagtgaattctcacaagatctgatggtttaaaagtgtttggcagttcccaccttgctctctccctctcctgctcgcataygaggacggtccttgctttctatttgccttccgtcatgattgtaagtttcctgaagcctccccagccatgcagaattgtgagttaattaaacctcttttgtttataaattactcagtctcagggattttatagcagggtgaagcagcagactaatacaccccagtagctaatattgagtgttcactatgcccatcactgctgtatataccttgcatgataatacgcatttcacgtttatctgcctggaaactggaagtgttatctggttaacactcataaaaatatgataaagattattaactccatgttatagatgagtaagtcaaagtattgagaaggaatttgtccaagattatatagtttgtaagaggcagcacaaggattcaaacccatgcagcctgacaaataatctttgccctaaattagcaaattgtccccacccttctccagaatcttaagaaggtagcaggtcattcctgttttcttggaaatggacagtttgtttatgtttttgtttttgtttttagccagaaagttctgattcaaattctggctctatcacttcattatttattttcagcaaacatttatcatgagattatgtgtcagaagccactctaggttcataattcatccttttaggaaaacaagcaaaaaaatagagtagaatgggggagatacatctttctagtttttataatttattgggttattttgaaaattaggaagagtggatataaaatatctagtatgtcgaatggtataggtgccgttattataattactactgttatgattattacttttattttcattaatattaatctgacttttggtttcttttcttgctactccttattcctcagagttaagccctattctttaccctttttttgtttttaatcttggagtaatctggctttggtttttttgctgctattatttcaccattttacctatacagaattctgtatatgtggtacgtttccctttcaactatttgtatattttatcttcttataatgttagaatgcattttagattttattctatattgagactggtgcattaatcagattgatttgttttcaaaaaaygaatattttagatgagttagcacaataacttcttgggcagaaacagtcttgtgggtgaaaattcaccttttttttctttttattaaatgttttgcttttattttgcttctgaatgtttctccatgtttgtaatcacagatatttctttatatctttttataatgattttattaacttcagctttataggcattttcttcagattttcatatttcttttttttaatttattttatttttgacataataattgcacgcatttaagagatacatagtgatgtttgaatacataccatgtataatgattagatcagtgtaactggcatattatattcataagctttataagcattcccttcatattttaatattttgaatgttatcattcaagtaagttatttaaaatttttattgtgtttataactgtctgtttgttatgtacttgaacatttactgccttatttgaacttctggataactttgtacagtaggtagggcaactttttttttttttttttttgagacggagtctcattctgtcgcccaggctggaatgcagtggcgcgatctcggctcactgcaggctccgcctcccgggttcacgccattctcctgcctcagcctcccgagtagttgggaccacagtttccccgcaacacgcccggctaggactgggaaagtttaagtgctgtctaagcttttataataagggatagaactggggtcatgtcttctaatgccrtatctagtgttctttctaccatataatccttgtaaataatctgagaagtacaaaatgttattagtaattatattttataaacacatttcagtttatcttgaccttatattttacaggatcatatgttccagcagaatattcttcctttagaattgctaaacagatttttacaagaattagtactgatgatgatatcgaaacaaattcatcaacatttatgaaagaaatgaaagaggtacccaaacaaaacttttcttatgttaaaaacattaaattctctcactaatggccagttatcacataaaatatttttatactaaaatatgcagatgttgcttatacccttttctaagagccagagggcagtcaaagacagcctcctaatttctgttttatgtggaaatggaagacaatgtttaagtgaaaatataattttaagagaaagagctagcattattaagtaataaaagtgtgcctaaatgtttttataggaaatacgtaaaagacttcagaaaatgataactggttcagtaccattttgcatagtatttattgttcttcataggcttgattttaaaacaaaagattactgtgttagaagggtttcaaaaatcatcctcttctttgttctcatagaattttcactccctgtaccaaagtatcacctatttctgattgagcaaacgtcaagtaggctttagaactgaaggaattaagtgtaactcttgggatatctgtattatgaatttaggatcactgtttagttggaaaattttcttcaagtagataggtggtgactaaagttatcatttgtcccatgatttatataattatttattgtgtattgaatatctataatagatcgtagcaatatattaggcacttaaggtatatttttaaatggtcctagcactcaaaaagcttagtctcatagaaaggtaaaatgtccatcaaagttactattgtgtcataatrtaataaagataaaattctatttttgagaaagaggttaataatcttcagtggaaaagagcacttctgtcaatttaagtcttagtctccattggtcatggatttaaatttatttgttaaaccaagaatcaagacttaggtattttttcttaaatttttctttacttcatctttacagggtatagagtaatacttaaataaatttgagagatggttttggatactttatagcagtaattgattagtcatttgtggagaagaaaatgaccatctttgtgcttagtttaaacatttaatttattgcattttttcactgtatctaaagcatcaatattttagataatggttatttactctgttgtctcatatacatatgcatatgtctatttatgtacacatcagctattctactggaattattagtcatgagatttttagaaaagaaaactattattttctgctcagcaggatgtctctaagaatacatttcagatgaacttataaagagactgggtttctcctcattttttcctgtgatattgacagctgtttggttacaatgaataaatattaaaattatatatttcagatagcatatattctacataatgctaatgacaaatcgctcatattaattgatgaacttggcagaggtactaatacggaagaaggtattggcatttgttatgctgtttgtgaatatctactgagcttaaaggtattcttttattttaagtatattgattttgagtccttctttatgtatccttttattattattgaattttatggacacccacaaatagcttttaaaacaatttagatagtaaacacatatcatcgcatttatatttttrttccttcatttccaatgaaagtgggaatcattagtttgataaccatgatatagataaggaaaagatgaaatcaagaaattcaaataatgcaaaattagtcagttggctttaatttcatcaaattcagtagcaaaatatgaaggtctttcagtaattgcctccatgtgcaatgatgttgactatgatgttacaacaggaaggaaagcactaggcaactcaggtaactttacagaaaatctattttacctacctaagtaaattttattcctttaaagaaagtagtttttcacaaatcaactatgtaaaacattgatttttgctctattaaattaatttataaaatatctttttaaatggtcactcacaatatatacagatatgaacaaaactgaaataaaaatactttttcttatttaagataccttaaaatgtccctaagatgaagttatttaccttaaatgaaagtccataatgatttatttatttttattatatttatttattttttgagacagggtctcactctgttgcccatgctggagtgcagtggcgcaatcttggctcactgcaacttccacctttcaggctccagcaatcctcctgccgcagcctcctgagtagctgggactgcaggcatgcaccatcatgcttagctaatttttgtatttttagctgtgacggggtttcaccatgttacccaggctggtcttgaactcctgggctcaagtgatccactcacttcagcctcccaaagtgctgtgattgcaggctgagccgtcatgcccagctcgtaatgatttattatatagaatgagaaaaatctattttatgcttaaaagtatgtgataaatcaaaagtaatggtaataaataatattagtctttgtaattttgaatgtgtcagtttcaatttctcatataaataaagtgcatatattacttaagattaaaagctaattagtgcctctgatggttaattttacatgtcagtttgactgggccacagagtgcccagacatttggtcaaacattgttctggatatgtctgtgagggtgtttctggatgagattagaattggtaaactgagtaaagcagattgccctmcctaatgtgggtgggtcccactcaataaatgcaagcctgaatagaacaaaaagccttccaatgagtaagaggaaactcctccttcctggctgccttcagtatggaagatctgttctttactaccttcagactcaaactgaaacattggctttttctgggtctggaacctgccagctttggactggagttgtaccattggctctcctggacctatagctagcccattttagaccttggtacttgttagccttcataaatcacatgagccagtttcttatgatgaatctcttcacacgcacacacatacacactctctctctctctctctttctctctctcactctcactcctgccccaccccctctctattggtcctctttctctggagaaccctaatacaaatcttggttctggtatgatctgacaatagtggtaagtaaaatatcactatcgtatactcttaatcaactgcttgtaagcagcagagatccaggtgattttatatatgatacttccaaacatttttggcaaactaatgaatataatgaaattggctggttgctcctagtgtcactagacaaagttgggaaagcaaaggatgaactcaaggattcaaattgccagctcgggcccccacccaagggacttccagtcactgcccatcacatacttggtgagggcctgcctgtcactaccaggaagaaccaggcatcacatgtgtccctagatcacagcaggggggctgtaagaagggcagggtttcttaacctgggatccatggatccctgggctgcatgaatctgaaaacttgagttcagaagcctcaacttagatgggamaaaagcctctttatggtcactaacttctactcgaaattgagccttttcttccaggtgaatgcaggcaaacaagcacaccagggttagcaggaactgtgttttccctagctagaaaccacaggtgttttccaattctgtgacagtggctgtagacaccaggaaatgtgcatcacttcctcactgcttccaaaagcaggacttaattagccttgctgctatttaatgcattatttaatgtgttaacttagaagcatgtgtgttactttttaactaaaacattttaaataacaaaaaagcaccaaattgccagctcattgctgcataaatgacttgaaagcacctaaatgtgccctgaaggaaatccttatctcctatagtcacagggttgagattgctgaaaatcaaacccagaatctcatcctatgccagaattacaacacaagttgaactcccagctttatagggtatctcctgttaaagtgagggcattagttgggaaggaatgggagactaccagttggaataggaatgtgtagggagacactgatgaacctggggacatttaggcyctaaattctgatgagttgtctttgccagtagaagagaccacttcaccgcatctgaggggattaacctagcattacctgaggaaactgtaatggcatcccagccaatgctgagtctcctcaagtcgcacttccaccacatttctttgcytctagacctataactagatctctaaaggtgaggtacaaaatgtgactataaggagatacattgcactctgaaagaactacttgaattttctactttatacagacagaaatccatggaacatgcatgggaatgtattctaagggtgtgggataagggtggaaggaacataaagttggattaggctgaagtttttgatatgggcttactaagccaggtgtgcatttaakgttgcaactcaaagagttagaaagygatctaacagtttgattgactggctgaaaaacagaccaaaagttggcccaccatgaatgagttgccttggtttaatgcagggattcaaagcttagggaggttggaatgttagagtgggtttgtcatttaagatcacttacccatcctggaagagtccaaatgacataccttttaccatgactatgagaaataaatttgtgagaggagccctggcagccttgaagagctctgttgtcactcttctatataggacagacattacggcccaccataaggcctttactgcaggcactgaattgggaaacccaaatgcaataggaataattggatcccagggtggtaggggccaagttgtggcactcagccaccaaggacaaggtggaaaagttactgtaatgggaagcagagttaaagcagcaatcagaataatctgacttacatagacctatggctttggataggagggctactaaattctgacttgatctgaataagcataaaagttctaggttgaggttttatgcatgagatcagcaacaggagcctgcagtcaccaagactgacctggctatagccattactgcatgcccagtctgtcggcagcagagacgaacattgagtcccctttatggtaccattccctggtagcagattgattacattgtaccacctccattatattcatattggaacagacacttattctggacatcagtttgccttctgtatgtgtaatgtttctgccaaaactaacatccatggacttaaagaatatcttatctgccattatggtattccacacagcatttcttctgatcaaggaacttacttcacagcaaatgcagtgctgcaaagggcctgtgctcatggaattcactgttttgactgtgtttaccaaccatcttgaagtagttggcttgatagactggtggactagtcttttaaggactcaattacaacaccagctaagtggcaatacctttcaggactagggaaaggttttccagaaggctgtatatgctttgaatcagcttccaatatatgatgctgtttctcccattgccaggattcatgggtccagcaatcaagaagtggaaatggaagtggcatcactcaccattacccctagtaactcaagggcaaaatatctgcttccagtttctataaccttgctctgctgacatagaggtcttaattccaaaaggagtatgcttccaccaagagacatagtgataactttttgacctggaagttgagactcctgcccagccactttggctgtcttatgcctctgaatcaacaggcaaagaagggaggtattgtgttggctgaagtgattgatcctgattagcaaagggaaattggactactactccacaatgcaataaagaaagaatatgtctgcaatacagaagattccttagggtatctccgttctgtcatgctctgtgttaaaggtctgtggaaaactacaacccaacccaggcaggactatgaatggccaagacctttcaggaatgaagatttggttcaccccactagttaaagagctctgactagctagggcttgctgaagccaaaggaaatacagaataggtagtaaaaggaaaaggtagttgtaattaccaactacaactctcttaccagttacagaaataaggactgtctgtaattgtcatgattatttccacctcatttggtatgatttttttggtgtgtatatatatacatatattaaacaaatattttatttcttcttattctcttataatgtaacataagatgtgttgacttcacgtcatattatttaagtattgccaatttcacattatagtatttaagttatgagatatcaagaagaatgaacatcactcagtgacgttacctccttttctggaaaaggggttagtgctttctcagttgtgctgaagacagttgtatcatattagagggaagtatgacctaattattgtcttcatttgtagattaagtgtggtataaggagatgcctatggatgccaagtttacaaggggtggatttgtgttgaatagttttatgtgtcaacttggcaaggtcatggggtgcccagacatttggtcaaacattctgggtttatctgtaagggcatttctggatgagattagtagactgaatgaagcatattgccttccctagggtggatgggtcccatccaataaattgaaagcctgaatagaagaaaaaggctgatccttctaagaataagagagaacttactgccttcaatctgaaatactgaaagactaaattgccttcagactcaaactgaaacattggctctttctaagtctacagcttgcaggcatttggactggagttattccatcaactctcttgggtctccagcttgctgactgtagatttttgatcttgccagcctccataattgcatgagccaattccatataataaatctctttacacacatacaacacacacacacacacacacacacacacacacacacacacacacacaycctattggtctctttctctggagaaccccatctaatacagtatctgttttcttttttttaatttttttttgagatggagttttactctttttgcccaggctggagtgcagtggcatgatctcagctcactgcaacttccacctcacaggttcaagcatacagtatctgtttccaaagtattctacaatagtttaaaatagtgtttttagtattactttacaatattattttctagtataaataatttaataaaaatgtaatattgctacttattttaaatttaattattattttctaacacagtatccttagtgcctagcacaattcttgcaacagrtagggtctgaataattatttgctaaattgaattaacctgaaatagagtytacaaagttcctctaatagattggtttggcatataacttttaaggacattattgttattgaatatagtctctaccttttaaatagcttactgtgttctaaatatttcctgtagctttataaatttggttttgttttatactccttttgatttgttgagtaggtatttaagaattttcatttttctgtcatatacaaaattattccttcccttgcttttcactttccatagttgatagccattttgccaatcaattatttttactgtcttaatatttaaatttccactgaacacctacctaatttgtcactcataatgtcttaaaacgtaactggttattcagatctctatctgccttagtaaattctgggctggaaatcttgtgctggctgtaagtcacttgaaccactttcatcaaaatcacctaaagtacttacagaaaatgccatttcctggggcgccacattagaactattggttgacaatttttcaggggatatgtaccaagaatttgcatgtttaacaggctctctaagggattactaatgtttgagagccattatcttaatcagtgttctcaatctttctttttcctctaccagtacctaacccaaacacaatgaagtctaaaaactaaaaacttttggaatttgacatacctaagacaatctcttgattccactgccaaaacctacttacaactagggaggctacttttatagttaagttttttaaaaattgaggaaaatattattttttttgcatgtgagttaccttcctaataaatgattacttcaattcatagctttgtttctggtaaacttcatcttttcaatatcttcagatatattttttaggattttattttcagttttgttctctttcccataatgtggcatacacgtctgtgcacaaacataataaacatatcttcttcatttaatataaaatctsaaaacattttaaaatggattgataatgttagcctccaaattattagttttattcctacatctctgccaagctacttagaaaattaamctaaaattttatgttcacatagttaaaatagaattttctagttaatttttaaagtactaatattcattgtctgttatatattccaggcatttacactgtttgctacacatttcctggaactatgccatattgatgccctgtatcctaatgtagaaaacatgcattttgaagttcaacatgtaaagaatacctcaagaaataaagaagcaattttgtatacctacaaactttctaagggactcacagaagagaaaaattatggtactgcatatagaaattatacctatacattcaaatactatatattctcctaagacaaactttcatctcttctttacttggctgttaatctaaggaaattttctcattcttttgagtgcttatattctcttagattgtattttctatgtcaagctcattgtatctatatctagatatagatatataaatctttttaaatttttataagccagtaactatgtaaaaatacagtgacaactgaaaaccctagaagtattagtttccttagaaaatgtaatttatcttatatttgcaagttatataatgaattgaaaattatatattttctacacaatctttcagtagcagggtccttcctctgtttttcttcaggttctgggtacttgaaaattaaatctaaaatcttaaatcttaaaagagaatgtattaccaaaccatattttttttttttttttgagacaaagtctcactctgtcgcccaggctggaatgcagtggcactatctctgctcactgcaacctccacctcccaagctcaagtgattcttctgcctcagcctcccgagtagctgggactacaggcgtgcaccaccatgcccagctagatattcttcaacttgattagatactttctatttaaatcattaagtctcacagattcagagaattttcaattggtctgtacatacaagtttcaaaaattattttagctatggatatgaccctttgagggaaaaaaaccatctttgttttgctatttgaaatgggaaatcaactggattacttatttatatcagatgtttaaaatttatgagcctcaatttcatgatctatgacatgggaataattttttatatatgtagagttgcaaagattcaattaattatcaaatgtgagctgtgtggcacactgcttagcaattactaacgtctcaataaattttgatgttgcttctatttctaaagcaataaatacagtaagctattggtgtacagtagaaagccatatggcatttatacaataaaattaagctctaaaaacatgagaattataattgatcctttgaatttgcatatagattactcaccaactgttacatcttctgagaaattcctgtctcattgatttaggtgggtgaatgtttagctgtagtgttatccctgtgactagctattatcttcccctgcaaaactcatatgccttttgaccttctgttaaccaactatatttgcaaatggaatttcaatattattattttctaactatctcttttgttcctgatatctcagagctatattgagaggtaactgatattctaatttgccctatgtgtcttggataagtawttaaatctaataattggcaagttgtcatccagaattttagaaagcttaattctgagaattattgagtagttcagaagtgmctctagaagggaagtttaaatctgtgactaaaagattaatactagttaaaagaagcataaaaatgccagcagtaacaatattgaagccaaatttaaaacaaataattctaggattaaaagctgcagaggtgtcatcacttccaccatcaattgtcttggatgccaaggaaatcacaactcaaattacgagacaaattttggtaagaaactttgttcttatttgttcttcaaattaaaaaaaatacttttagtgtagatttttattatgacctttgatctaaatatataataattaatataataattaaaatatttaaaattaaaacctaatttctaaacaaagaaaattaattttacttcttaaaactcttttggtttggtctattataatcctcgcagcaaatcagctaacaagctaggagataaaaattaaacagtttagtttmtaaaataattattgctatactaactttatgatgaggaaataaatctattttaagtggacattaaaaatgaaaatcactatgcacaatatttgtataattatatattttttatagttttcaaagcttttctactcatcatatgtaagcctcataactcttcatgaagtaattaggtctttatagtaaaagattaaaaaaggattacttctactcttaattttacaggttcacagaggttaagtgatttgttaggaagcagtaggttcaacactaaactcacatctgttgactcaaaatttggaaaattttggttgctttatataagtgtttttggttttggggttttgtttgtttgtttgtttgtttaagatggagttttgctcttgtcatccaggctggagtgcaatggcatgatctcggctcactgcaacctccgcctcctgggtttaagcgattctcctgtctcagtctcctgagtagctgggattacaagcgcccaccaccacacccggctaatttttttttgtatttttcgtagaggtgggggtttcgccatgttggccaggttggtctcgaactcctgacctcaggtgatccaccaacctcgggctcccaaagtgctgggattacaggtgtgagcaaccgctcccagctgctttacagtgttttaaaaatgcaatgtgttcagtaaactgacctaggtgcagtgtgatattttcttcaataacaattttctgtgtccctcactctttcttaacctgtcttccatttttaattcctctctcctttaagttcctctactgtctctgtgacttcacttgcctaattatctatttgaatctcttagtcagaaattttaactgttctgtactctgaagaagctcttattacctaactctttagagttcatcttaccacatttcaattatggaccacctctctactagccttctagtaggctttgattctcctaatgaagtttgaaaaatattcgaaacaagctatttttatccactgcaaattcatatattctgattttagttgaatattttactggataattgtgatttttttctttttttaattgataatagttgtacatattttggggctacatgtgatattttgatacttgcatgcaatgtgtaatgatcaaatcagggtagttgggatagccatcaccccaaacatttatctttacttcatgttgaaaacattgcaattcttatcttctagctaytttgaactatacgacacatattaactatagtcaccctactgaactatcgtacactagactatttcttcaatctaactgtatttttgtacgcattaaccaacctgtattcatctccttcctcctccaaacccttcctaacctctagtaaccatcaatgagctcttcacctccatgagatcaactcttttagctcaggcatatgagtgagaacatgtggtatttgtctttctgtgcctggtttatttcatttagcatagtgattctttatccatgttgctacaaatgcaaggatttcatttctttcttttttggctgaataatattccattgtgtatatttaccacattttctttatccattcatctgttaatggacacttaggttgatccatatcttggctattgtgaatagtgctgcaataaacgtgggaatatagacatctctttgatatacttattttctttcttttggatagatgcccagcagtaggactgctggatcatatgatagtgctatttttagtcttttgagaaccctccatgctatttttcatagtggcaatactaatttacattcccatcaacagtgtatgtgcattcccctttctctatcctcaccagcatttgttaattgtctgtcttttggataaaagctatcttaactaggtgagatgatatctcattgtggttttgatatatatttccttaatgactggtgatgttgaacattttttcatatacctgttggctatatgtttgttttgttttttaatcttttatttcacttatgttgttccctctgctaagaatttaattcctcttcctccatctacctcatccatatartttttatttaacatttttacctagctcagatgtgaacttccccaagaaacttccctgaatttttttccagtggarcaatgtactcatttcttgttcttaaaggccccttttcacaacaactatgatgtagttgcmataatatatccacattgcctattttttgtttatttttattttactttattttagattgagggggtacatgtgcttgcttgttacataggtatattgcatactgctgtgagttgggctcctagtgtacccaatagccagatagtgaacattgtaaccaataggtaatttttaacccttgccacctcctaccttcccccttttgtccccagtgacagttatttccatctttatgtccatgtgtacccattgtttagctctcacttataagtgagaacatgcagtatttggttttctatttctgagttagttcatttaggataatggcctccaactccatctatgttgtgtaaaggacatgatttcattcttgtttatggctattagtattccatggttttctttatgcagtcaactattggtgggtgtttaggttggttctatgactttgctattgtgaatagtgctgtgatgaactaggtacaggtgttatatatgtgtatgtatatatatatatatatatatatatatatatatatatatatatatatatatatatatatatagttcttttagttctttgagaaatctccgtaaggttgaactaatttacattcccaccacctgttggctatttgtatgtcttcttttgagaaacatctattcagatgttttgccaatgttttaattgggtttatttggtgggatttttttgctattgagttgagttacttagatgttttggttattatttctttgttattattttgcttaatttggttgtcagaaggagagcttgaaaatatttcctccccttctgtaggctgtctcttcactttgttaatttttttttttgctatgcagaagctttttaacataatgtaattatataagtgtatttttgcttttattgcctgcacatttgaggttttacccaaaaagtctttgcccacattaatatcctaaagcatttcccaatgttttcttcaagtagtttcatagtttcaggtcttacatttaagtctttaattcattttgattagatttttatatatggtaagaaatatgagtctggcttcattcttctatatatagttatctatttttcccagcactatttattgaagagactgtcttcttggtatcttgttgaaaatgagttggctgtaaatgcttggacttatttctgggttctctgttctgttcaattttttgatgtgtctgtatttatgccaggactctgttgttttggttactatggctttgtagtatattttaaagtcagatagcatgatgtttctaggtttgttctttttgttcagggttgctttgactatttgaagtattttgtggttccatataaattttaggatttttttccacttctgtgaagaatgtctgttattttgatagggattgtattgaatctatagattacattgaatagtattgacattttagcagtatttattcttccaatcaatgaacacatttatagcaatatttattcttccagtccataaatgggatttcttcttgtatttttttcagtttgttcactattgacrtatacaaatgtcactgatttttatatttttggtggagtctttagggttttctaagtataatatgtcatctgyaaaaaggatattttgacttcttcctttccagtttggatgccttttgtttctttctcttgcttaattgctctggctaggacatccagtactatgttgaataaaagtggtgaaagtgggtgtccytgttttgttccagaagttagaggaaagactttccatttttactcccatagtattatttagttgtgggtttgtaatgtatgtcctttattgttttgaggtgtgttccttctacacccagtttgttgagacgttttgtcataaaggaatgttgaattttgtcaaatactttttcggcatctattgaaaagatcacatggtttttgtccttgattctgttaatatgacatatcatatttattgatttgcatatgttttatcattctggcatccctgggatgaattcygtgtaatcatggtgaatgatcttttcagtgtgttgttgtatttggtttgctagtatttggttgggttcttaatttatgtttaacaggaatattggcctgtagttttctttatttgttgtttcatagtctggttttgatatcagggtaatactagcctcatagaatgagtttggaagtgttccctcctctgtaattaattgaaataatttgattagacttgctattcattcttctttaaaaatatctggtataatgcagcagtgaagtcatcaggtactggcttttcttctttttctttttctttcttttttttttgacaggatcttgttctgttgcctggactggagtgtggtggtgcaatcccagcccactgcttacttgacctcctagctcaagtaatcctcttacctcagcctcccaaatagctgagaccacaggtacacaccaccacatctggctaatttttatttatttactgttttgcagagatgggggtctccctatactgtggggttttctttgaagggagattttttattattacttcaatctcattattcattataggtctattcttgttttctatttcttcatgcttcaatcttggtaagttgtatgtctccagaaatttctttctttcttttaagttttccaatttgttggcatatagttgtttacaatagtctctaatgatccttygtatttctgtggtatcaattgttatgtctcctttttcatttctgattttatttgggtcttctctctttttagttggtctagtaaagatttgtttgtcttttgtatttattttagtttcaacttcatttatttctgctttgatctctattatttcttttcttctaccaattttaggtttggcttgttgtttttgctttcctagctttgagaagtaccacgttaggttgttgttgtttttttttaaatgtttctacttttttgttgtaggtgtttattgctataaacgtttctcttagcaatatgttgctgtatgtcatagattttagtatgtcatgtatttttttcaagaatttttaaatttttctttttaatgtcgttattgacccattgattgttcaggggcatgttgtttattttccatgtatttatatatatagtttccaaaagttcattctgttattgatttctagttttattccattgtggaataaaatatacttcatagggtttcgacatttttgaatttattgacacttgttttgtggcctaatgtattgtttatcctggagactgtttcatgtgatgatgagaagaatttgtattctgcagcagttggatgaaatgttctgcaaatgtcagtgaggtccaggcagtctagagtgtagtttaacttcagtgtttaattgttgattttctgtttggatgatctggccattactgagaatggaatgttgaagacccctactagtattgtattgcagtctatatttctctttatatctatgaatttttgctttacatatttggatggtccactgttgggtgaatatatatttataattgttatgtcctcttgctgaattgacccctttattattatagaataacattctttgtctctttttacagtctttgacttgaagtctatcttatctgatataaacatagctactcctgctcttttttggtttttatttatctggaatatcttcttccatccctttacttttagtctagtatgactttgtaggtgaagtgagtttctagttagcatcatacagttagatcttattttatttcttttattttttttgaggcagagttttgctctgtcacccaggctggagtacagtggcttgatctcagttcactgcaacctccacctcccaggttcaagcgattcttctgcctcagcctcccaagtagctgggattacaggcacccgcctgtacacccagctaatttttgtatttctaatagagacagggtttcaccatgttgtccatgctggtcttgaactcctgtttttttaagtcttgtttttttaatccatttagacactcttatgtcttttaattggagaatttaggacatttacattcaatactattactgataaagacttactgctaccattttgttacttgttatctggttgttttgtaagtgctctctttcttcctttttgattaagtaattttttctggtagtatgttttaattcattgctttatatttttaatatatataatatatatacaatattatatatattatatataatatatacatattatatattatatatatataatatataatatgtatatattatatataatatatataatatataatatattatatattatataaatttaaatatatatattttaatttatgattttcatgaggcttataaaatattttatagctataacactttattttaaacagataactacttagttttgaccatagagagaagaaagtaacaaacaatggaaaaactgaaacactccgtactttaacttcattcccctgacattttgattttttcttgtctcaatttacaccttcttatattgtctatttctttaaaggtgtctgtagttactattttcayaaacgtgtctttttttttttcttttttttttgagattgagyctcactctcttgcccaggctgcagtgcagtggcgcgatcttggctcactgcaagctcygcctcctgggttcgcaccattctcctgcctcagcctcctgagtagctgggactacaggcgcccaccaccacgcccagctaataaatgtgtcttatagtctttatgttagagatatgagtagattacacatcacatttatagtattagagtattctgaatttatgtacttacatttaaacttcaagtttgtttgtttgtttgtcttttgcatgttagcattctttcctttcagatttaagagctccctttaacatttcttataatatgggtctagtaatgatgcatttcctcagcttttgtttgtctagaaaagactttttctctccttcatgtttgaaggaaagttttgctaggtatagtattctcagtttgcagtttttttcccttcagcactttgaatctgttattccactccctcctgatctatatggtttttgttgagaagtctgttgccagatgaattggagctgctttatatgttatttgcttcttttctcttgctgcttttaggattctctttgtccttgacctttgagagtttgattattatatcatttggcttgtcttatttgggatgaatatatttggtgttctgtgacmtcttgtacctagatattaacatatttctctaggtttagtaggttttccattttattcctttaaataggcattctactctttgctctttctcaattctctcttgaacaccagtgaatcttagatttgctcttccayggtgtatctctctctctctctctctctctctatactatatatatatatatatatatatatatatgtataaaatctttcaggctgtctttattcctttcattctgtttttttttccctctgactatatcttggcttactgcaacctccgcttcttggattcaagtatttcttgtgcctcagctacccaagtagctggaattacaggcatgtgccaccgtgcctgtctaatttttttagtgagayggggtttcaccatgttggccaggctggtctctaactcctaggctgaagtgatctgcctgcctcagtctcccaaagtgctggtattataggcatgagccactgtgcctggctaatctcactgattctttcttctgcttgatctatttcttttttggagagcctctgtagtttttttaagttcaacaaatgtatttctcagttccagggtttcaaatctgtttgccatttgatttttaaaaactttcatctgtttttttttttttttgagacagagtctggctctgtcacccaggctggagtgcagtggtgtgatctcagctcactgcaacctctgcctcctgggttcaagaaattctgctgcctcagcctcctgtgtagctgggattacaggtgtgcaccaccatgcctggctaatttttgtatttttagtagaaatggagtttcactgtgttggccatgctggtctcaaactcctgacctcaaatgatctgcccaccttggccttccaaagtattgggattacaggcgtgagccaatgtgcccggccaaactttaatctctttattaaatttctctgataaatttatcagttgctttttctgtgctgttttagagttcatgaattttcttaaaactgctattttgaattcttgatcttagagctcacgtatcaccatctcaccacgatgttgatcaccagctccttgctttgttcatttggggagatcatagtttcctgtttgctcttgttccttgtggatatatatctatgtttttgcaatgaaggatcagtttatcttcagtgtctcgcttgttggactttctaggttgtatgtttgcttagaagttctttgcaattgtctgtgattccccttaatcctagattgctgcctcattttcagcactagatggcaccttaagcccagaatttcctcagctctggcaaatgtttgcagtactacacatctcagatggtagggttcttagaggggatacctcagctgtgtggaaaggctggctaggggtttatacccagatgacctgtggcatctgcttcctctagcatggtgctgctgtacatccacactgatttggtgtctccttcgactgaaatgaggagtagttttacaggctggagtttctaattccactcccctttttgtctctagctgccctcaggcggttttctccctccaggcactagtggtgcttcctgtgggtttaggcaggaatgatttttctgcaagggaacccaggatggtggggaagctggctatccacctcaatctcactttttccagagtagaacaaatgagattgggaggaattttctgtgcatgatgcctggcagattggggcacggacattgcagatagagaactttctttctttttatagtctgctcagagtttttcacttctctgtctcccaactatcatttcagcctcagatttggcttctaaaatgttgctggtgttaatctgtgctccagatatttgcttttggttctctgtggggagagcaaaggcagactgcttctactctgccattttgttgatatccagaattgtatttttttttttttagtatatactttaagttctgggatacacgtgcagaacgtgcaggtttgttacataggtttacatgtgccatggtggtttgctgcacccatcaacccgtcatctaggttttaagtcccgcatgcattagatatttgtcctaatgctatccctccctttgcctcccaccccctccccccgctgacaggccatggtatgtgatgagaattgtatttttttctttttatttattatttagcttcttttacrataactcttttgaaacagtttcactcttcctgtactctcaatcacttcactttctacagataatctgcctcctactttttaacaaatttgaggtcatcttgatgagttcttgaacctcccctccttcaaaattttgttttgaatatttctgtttttcttccatctctcttccatcttatctcagaggaagagactgactttcagacagaaggttaactattctaccwtttaaaaaaatctccactaagttattattacttctcagttccctttattctcttttgcatctttaatattttcgtcacaggcttttcctttttctaagagtatgcttagatttctcccctaaaattctgcctgtttactctacttttcaaactattatttcattttctttttactgcaaacttatcaaaagtaacccatgcttgcttctttcatttctcatgtttaaactgagtcttattgtcatcactctccccaaagttttctcttaaataccaactaattataaaatcctttgtccttcttttcacttctgatcttccatgatctctctatggcacttgacactacccttgttttctcttttcttaattctgccctctcttggctatgtggaattattctctcctggatattttcattctcctacctgtttgattatttcttctgtcccttcttcactagtactttttcttttctttttttttcttttttttgaaacaaggtctcactrtgttgcccagcctggtttttaacaaattcctgggctcaagcattccacccgcctcttcctcccaaagtgctgggattacaggcatgaaccaccgcacccagccatcatcattactttttcttattccacttactaaatataaaagtttctaagatttttgcccttgtttcttttctttctaaaatctgcacttggtgatctcatcttttctcacagcgtccatcatcatttctgttcaactctgaatctatatatttttctccatatttctcctacatatcttaatctatgtttaaaagccaaagttaaatttatcatcttctaaaaaaaactcttatctcttcacctttaagtctcccagtgactcaccaaagtcatatatggatcattcctcttaatcacctgtcattaggactatgcagtaagttctctctctctctcaatctatttatatacacttctaccagattgtctcctaatgcatagtttttattatgtagtttgcctactcagaaacttttaatgatttattacaaagtaaagttgaactcctttgtctagtgtaaaaagtcctctgtaattctcaaaatatattttagaattacctgcattagaattgcctgagatacagggtaccatactagattgtcaaggatctcctgtggctcagggatttgccttcttaaccagtttttacgtgattgtaaagcttattggcttctgcttcatgattttcctttgttttctacacctcccttacataatatcactcggtttcacgtaatctacatttctgcaatttcaatcttgtaaattaaattacttgycattactacattgaattacttgccatttcatcatattgacctgattgtgtaccatgctttcaaatgtacctgctctaactgtttcctctgtggaataccccctcttctaggctgttttatctatcaggattaatttcaatactccatcctattcaagcttttcttggcctgagctggaagtgagtttcccttcctctgagtattttatgkctgttttatgggacttttcttaattattataatcagttgcttacaacaagccttttgtttttttaaccattaagactgtaagctccttgagttctgttatcatgtgaggtttacatttttgtatcccccatagatatataaacgtaagcttagaggcctggaacrtagatgatagtagatattcaataactttcttaaaataatagactaattggtaattgatctgtgtaccaaatagatagatgggtgaatatatggtaatcttattctacctcataaaatcttactcatttttcctatagtgaaaagtaaaaaaaaatctggagttgcttgctattatgagttgaagggattatatttcagggaaactcactaagactttccataaaaagttaagattaaaaatgctgatttctctatctagttcaggcaaagaggtgaaataagaattttctaggtatatttgcagtcctgaagttctattcaagaccaagcatctaaaggacttctacattcctgttttacatattatttcttgggtatcccgaagtttagtttattaaaaattaaggcatgattttaaatagctattcatattatttatttttaaaatgtaatttacccctcaggcagtattttctcttaggctccagcagtttctatatatgtactctctttaggggcaagcaattttctgatgacccattctgtgtaccagtttatctgttggggaattaaagtaggagatagcagagtagtactctttggcatcatttaaaagtatattaccacatagcaatgaacaatgctgttttcccatacctttttaatgggaaagtgtttgtagagtctatctctggtggattttctattacttttcggtattatgttgagaaatctgacctatttagcataatttttttcattgaaaagtgatttcaagaacataagatctgtgataaagtaacaaatactcagaataaattatgttctttcaaatacaatatttcttttatttcttcttgtatattctttccttgttggaggaaactgatttgttcaaaggaattagttaacccttgagttccatatgtctatggaaggagatagaatattgccaacatgtggtttaaataaaaattatggtatttgtgtatatatatatatatawwttttttttcaatgacagcaaaaccaaaggagtacccctgagatggaaagacagagagctgtgtaccatctagccactaggcttgttcaaactgctcgaaactctcaattggatccagacagtttacgaatatatttaartaacctcaagaagaagtacaaagaagattttcccaggacygaacaagttccagaaaagactgaagaataatcacaattctaatgtaataatatatcttaattcaaggaacctagaatttatttttctccttagagataaggaaaataacatttgccaaatttcatattttaattgaaaattacattatattaacatcacaattgtcatctatatattctatatgaaaaatatttattataacttaacaaatgagaactacttaaaggaatggtttttatgttaggagaaaatacaatacaccacttttttctcacaaaaattcacattattaagacctaagttcatttatacttacaagttatagtttaaaatattattgtaaataccctagtttaataaacacctttctttttaggtctggaaacttttttgagcttttcttttacattctattctgaagtaataatgccctataactcaacaatttattaatcagtacccccacttccaacactggagggttctgaagttcatcagagtaattttggaatcacgctgctaagtgagtaatctcagcataaaggcctaacatagacaagttattcttttcttgggcaactaagtgtctggaattcaagctatacatttgaaacatttatttagtaagctacagtattcataataatttgacccaccaatattattcacagaccacttagggccatattttattctataacatttaatattaatgtttgttgactttattaaacactcagcattctaagtaaatattagtagccaagtatattgaaaaagttataatttaaatggcacacatattattttggaaaagtaaatataaattattttttgttttacattcaattcaatatatattaaatgtcttgttagattacttatattccttattgtcatgttttagaaaaaatatcacaatatttatatttgactattagctatgttttaattcacagcctctgaaatgaattacattttgtgtggtcatttctttttctttatattttttctttttgagacagagtctcgctcttgttccccagactggagtgcaatggcgtgatatcgactccctgcaacctctacttcccagcttcaagcgattctactgccttagcctcctgagtcgctgggactacaagcgcccaccaccacgcctggctaatttttgtatttttggtagagacggggtttcataatgttggccaggctagtctcgaactcctgacctcaggtgatccgcctgcctcggcctcccaaagtgctgggattacagatgtgagccactgtgcctggccttatgtggtcatttctaaaggcagttaggtaatttaggcttgtggcaaatttcaagaagacactgaggaggaaaagggcatggcagattgtttggggtggcaggaaaaaaagagaggaaagcaataaaaggtagaaagggagtaggcagtggggaaaaaaacaggcaagcagagacgagtgcaacatatcaaatatgctgaatatcatttcatcaaatacattaacttctttttagatgtaacctcaatgttagattccacccgacttttaagaaatttttcatcaattaaagcttttgatgcaaaaactgcagccaaatgattaatgtcttttattttagaattgagatactgatataaaaacaggtttatatcttcttaaaattaaattactttttcttataccattttgtgtgtagcagaaacatacaaaaaaccaaatcaaataaagatataattattatgtcatggtactacagaatgaaggtgaatactagggagataatccatttcttaattttaagatctatttgctctactcttttgttcctctttgcctttgcctttttctaatattatagatcattatctcataatccagtctttcaaggtaaatgctcataatgtgttagcaaactcctttaatttccaccacaaagccattattttagcctgttccacctttctcctcatagaataaaatcctacataagatagtctttttcaagtttaggggtaaaatatgggggggtggggatggagaagaaacacagcttattctcatgcctaggaagtaatgcatttatttttacatttacattcaataaaattaatttttttggtgtacagtcctgtgaattttagtacatttatggattcacataaccaccagcaaaatcaggatagagaaccctcccatcattccaaaagacttccttagtgctgttcctttgtagtcaaatctttccctgacccttaactttaacccagcaatcacaggcctgttttctttccctatagttttattttttcccagaatgtccaacaaatggaatccatatagcatgtaaccttttgagactggcttcttttgcataatgcttttgaaatgtatacatgttgctgtgcctttttattgctgacaagtatttcattgtttatatgtgccagagtttgttgtcctttcattcactgagggacatttgggtttttagttcttagcgattatgaataaagctaccataaaccttcctatacaaggttttttgggagcataagttttcatttatctagattaaataggagtaaaatagctgtgtcatacgttaagtgtatgttttatttcataagaagctgccagacttttccagagtgactatatcacttttcattctcatcagctatgtgtgagttccagttgctcctcatgttcactagtacttagtattgtcagctttcttttcttttttcagttgagccattttaataggtgtgcagtgagtaatgctttttaaacaaattttaaagctattctgataatttttttaaccagaagtgatgttttatttcttttttctatttttaactgcttttagcctctctgatagcacattttaaaatctgttccttcaagcaaaagttttagagtaagtattacttttagaaagctataaaacaaatctaattcagtaaatattttctatggaccaggcaacatattaggtgttagaggtacaagagatagggcatttgacttgagaaccttgggtgtaataaagagaaaaaagcacatatattaggattggagcatcatgtgataagtgccataatagaggaatgtttaaggcaatggaaccaaccgtatgtaacctttgtcggtcaaagggaatttagaggataaaatatattgggttttaaggaaggaaaaggcattttagatagatcagcatatgtgtaagtaaagatatgtgaaacagtgagcagcttagtttaactagaggatacagtgcatatgagagagtgaagctaggtgctttctatcagtttctcctataaaccactgtagagttttaaggcatgtttgcccttgggggattggcaagggatggtggtagtagtaatggtggtataacataattagatttgcatcttaataagatcatctgggtgttagcatgaatgattttgaaatgggcagttgaaaccagagtcaaggagaccaaatagtttaagagactattttagtagagttgatgagggttaaaggtagaaatgatgggaacaggacagatgcgtgtgggaggagagaagagttgagtgggcagagtggctgatgagggagagaagacattgatttgaaagatatcatgtcttttgagggaatatagttggagctggaggtcattatcctcagcaaattaatgcaggaacagaaaaccaaacaccgcatgttctcacttatagtgggagctaaatgatgagaacacatggacacatggaggggaacaacacacaccagggcctggcagagggtggagatggaagagggagagcatcaggaagaacagctaatggatgctggtcttaatacctaggtgatgggatgacctgtgcagcaaaccaccatggcacacatttacctgtgtaacaaacctgcacatcttggacatgtacccctgaacttaaaaaaaaaagacaaaaaatgttttaaatgtgaaaacaacaaaaaagatatgttcgagtgcttaccctcagtacctcagaatgtgatgttgtttggaaataagattactgcaaatgtaatcagataagatatgacagctgtctttataagaccacatgaagacagaggggaacaccatatgaagacaaaggattgaagtagtgcagctacaagccaaggaagggaaaccaccagaagctagaatgaggtaaggaagaattcttgtaaaagcttcaaagagaggagggccctggtgacaccttgattttggactcatgggattcacaactgtgagatgagaaagtacgcagtgtgtggcactttgttatggcaactctaggaaactaatacagaagggaagagttcagtaagattctgggtggtgatggatttatcatgttgagaaatatggaagtaatcagaattccagtaggaagaagttcctgaaacttagatgctgcttatttcccaccctttagaataggtatgagccacagtcaataaaagtgaagactagaccaaatttgttaatctttcttagagttgaagacatatgaagagaatgatggaagaaaaggatgaaaattagagaataaatgtcaaaagatttgctgaggtatttggccagacaaatcacttcatctggatcaccaatctagtgtttctttatgtgctagactaaaggtagcttttaggctttctttatattaacttatttttaaccaaaatatataactatttacatgtttctagtaaaggaaatattcatatgaatagcctgtctataatatatacttctatatttatgagcttaaaatatgctgagttataattaaacattttaataaagtgtataagtaagcatttctataattcaatcctataatgtatttttacttcacctaaatgaaagtagagggaaagaaaaagcaagtaatctggttgtattgctccatgtctttgctacttactatttacattctgttctttagacactgtaataataatattcacacagtttatgttagtacagaaccagagtgaacactctttctataaattgtcacactttgatagtactcagactgtgagtggacagtggaaactgctactgtctgccataatttactaagacaggccctaaaatatatagtgataaggtgggaacaggtgctcattgtcaaaaactgtgaagagtctgacatttttaccctaattgcaagcaagcagtttagcctgccatagcttcatgcttactgtcagaagacaagagactcctgggttagaaacaaaggactttattactaatggcattagcaagtagcataagattgatgcttgtgtcgattccacttagatccaccctccaagatatggagtggtccaagtagatgtggacacagtagatttgtgtcacagctgaggagctctgagcttgggaaattccaatcttttataatgagtttccagcaaacttgctcaacctttgcctgagaaacacattgcttttttatactagacaataaacaaacctgctctctgctccaaaggaagacactatctctatctcccaaactgctcgctatacaaacattcttgaaaagctagcccataataaatggaaattagtgcctctgctcctgacaggaaaaacacgagagagatccatagagaactgtcttccaagtctcatgtttgcatatagttatagagaaaaaagtctagtacttagaaaatagccaaaaaattgtctgagaaaactctactttttaagataagtttcgtcgtgatgaaagaacatgcagattgaactgatattttcattttgatgtaatttggatgaaaatagttcatttcactttgtgtaaaatgcatataatttattccattgtatagaagtaatgggcagagtcatgtattgattaaagtgatccaattaagatgttgtgtgaaaatatattttctaaatgaatgtttaatgcaataaaaacttacatgaagtgaatttttattaacttctaagccatacattggtaagcattgttaaggaacttaggacactgacgtatgttagatttctaaattcagatagttttgtagacgagcaggaattagaagtgaaaatattccatctgggagcatattgttggttaatagttgattcctgatggttagtctgcaaagatgtaatagttcacatggatctttgtatcttgttgaaggaatgtaatcaaaccaatttgaaataattggatgtcttcctaaactcagctgtgtctgaagaaaagcaaaatattttacttttgtaatgttttgtaatttggattagtccaaattattaaaacttatttttaatttaaat

SEQ ID NO: 97734 - DNA, 14032 bp, Homo sapiens
atgatgtcgccaagtacctggctaccaggctgttgttattgctgttattattaccacacctcactgcagacctcccccagtcatcccttctattaggggacaagtcatatctgcttttaattttacttgtacgactataaagcaatgaaaatatttccatcaacagcagagaaatacctggtcacttccaagtttgttccagtcccccatctgacttatgtggccccagagtgccacctgctccaggaccatgtgaggcctgacttctggctgggggtggctggcacattctttagcacgtgaggagtctcctcacaggcaggcccgtcacaggcccaggggccatggattcctttgaaggtacccccggtcaaagctgggcaggagccacacaaagatactttccactgtttttctgcaaagaccagctcaattatctagcttcctgctatgcttgttctacaggtgaagttcagattcagtttatttttttcttttttttctggagatagagtcttgctctgttgcccaggctggagtacaatggcatgatctcagctccctgcagcctcaacctcccagactcaatgaccctcccacctcagcctcccacgttgcttgagctacaggcatgtgccaccatgctaggctaatttttatattttttgtagacacagggtttcaccatattgcccaggctggtcttgaacgcctgggctcaagtgatcagcccaccttggcctcccgaagtgttgggatgacaggcataagcctactgtgcctggcccagtttacttcttaaagtattacttgacaaaactagaggacagtacgatcaggggctgccaggggttgggcagagggagggatgaacaggcagagcacagaggatttttagggcagtgaactcggtacaacactgtcacagtgaatacatgtcattacacatctatccaaaccctagaacatacaacattaagagtgaacctgtggacttgagttagtaataatgtatgagtatcagctcatcaactgtgacacaggcagcacactaatgagagatggcagtaaacagcagaaactgagctggggggctgtgaaaaccctactttcttcagtttttctgtaaatctaaaagtgttccaaaaaattaagtctctcagaagccaaacaactactactaaaaatagtactaaacaccaaatttgtgttgaaagaaggaaagcttgggcaggatgcccactcatcatgttatcaacatgccttgaacctccaaggtgtgaggccaagacgtgccctggacactcaggatgctgaatgggggaaggcactggaggctaggccggctggagcgttgaggtcacaaccaggacgccctgggtgagctgccggtcacagacactactatcacactatcctgtacccacccctcactggcttcgccaatcctgattctgtttggtttaagttgtttcccactaccctatgctacaccaaccagaaaccagaagctacacaaagaatgttcagcagagaggcgtttgtgacagggacccacatacttgcttcgtcactacaagagctgagatagggagctgggctggaagccagattgcatgaatgagcccaagggcttcaggaccaatctgctccagaactgctcaatctggggctcctaccttgcccccacgaccgtgccataacacccacaaagcaaggatgtagagtccagccactacctcagtaacaaccacccatcgatgcccaggaaacctccgtcaccacggtcactgccaaaagaaaccaaagggcctgcgaaccctccccacatccatcggtttctccccttctccacggtcaccactaaaagaaaccataccgcatccacactaggagaaacctccccttctccacgatcactgccaaaagaaaccaaagggcctgcaaatcctttcaacatccatcggtttccaccttccaaatgtcaagttcatatacctaacaagaatgcccaggacagcctgcacacggaagaaatgtcccattcgcaatgccatgagctcctttgtgtgaatcactgggatacagcattggagaatgtggcacatggaacagatgcttctactgggaatacactaacaattcaaacaacaaacagaaaagggtttctgaggatggagagaaagagcacttaccctatacaccacttactcgacaactgacagtgtgatatcactggagacttatgattcaattaaaaatattcacatggttccatttcacaaatgagaaaactgaacccatgctgtgattcaacctcacaatttttagactgcaagtccacacagcttctactccgagaggcaaacccaccagacacaagctcctctccaccaccatgatcctggtagacatcactaatcaatcatggcacactcttccactgaatgtgcatcaggcctcaggatctttctcaacccaacactcaagtggcattgccaaataatcaaccactataaaacaaacttttctgacacccacccatcaaaccacacaacagtgaaccagctgaattttgagaatgtgaatttatagtcaattcatgatcatgtgagcttttctggaatgccctgtagctctggaatagacgtacaaaaactacacactgggaatggataacgtaaccaagattgaaggagaagggaaaatacatgatttagggatagctacggtgttaacaagaagaacaccaggctaaccaaagtgggaaaaagaatgaataaggtggctgtgaaggacacttcacagcatccttcaggaagcaaattcaggaatcatggaggcatgcctgatctaattacgaattcaggagctcattgacatgagtgatagagaaggagtcaggtaaaaaaaaaaaataggctgatttaggcagaaggattctaatttcaacattctttctccagtggtcactcacaggcacctgaactgatcttcccttacaatgcatagagctaacagacccactaagggaagaaaaactcatgtgccattttcagcttgtcagtgtaagtccctgtaaaaaacacacactaatttatttggtgaaaactataaaaaacacacctccaggtggttaaaagaataatttttttaaagttgatatgatttacttaaatctgagagtctcaggagaataagggacaagaattttaaaaaagatcacttccatttatatgcaaaccagaactacggctacaatgttatgtatttcagggggaaacaagtcagaaatagacacaattaagattttaagaaaggaagaaccccatccagaactgttagggtgcttgcaatatggggaaaatttatttaaatcttatatattaatttttatttcttgttggttacataaaagttttaggaaagcttacctctcttcactagattttttactcacctctttctgacgacctacaaaccgaattctcctgtagtctttatcatcataaacctggaaaaaaacaaaaagaccatgtgtgacttttacggcctaattctgaaagtcacttcatatcaatcataaatattacaggaaagtgtttttcttaacttttaggccattgatgaaaagtcaaacaagtgcacagtactcggtgtaatcaggggcatttttagcgagatacctgggatgaaaacgggtggtcacctggatcagaaagcagcacagagacatagcccgggaaggtggagctaaggaggagagacaaatcctgaccgaggagaaccgcccccaaccttctttggcatatggcctgagagctttactatccccccattaaatctactagggcacattccagtatacacaggtacctttgttcttcattttggcttagggcttttttgtgccttggactacaaccgacttctcaggttactaaaatttattattgaatattacacaaattctaaacgttctgacccaaataatcggctgccacaaatcgcccatgggcagccagtccacagcaagtgctgcccgctggggagacttcccgttccagagcccgcaggccctggaaggacgagacccaccgctacaggctgccaccaccgtcccgactcgcgggcgtcctccccggcgcgtgagcgacagcacaaccttaccacgacctgcgctgccggcgcagaaccagggccgcggatgcccggcgagcccactgccaccagtcgcccgaggtgcggctggaggaaggtgcatcctgtacccagcggccgttacctggccagtgtgcgtgaccttctccccggtcggcgagacccgcaccccgaaacacctggcgcccaggggcaggctccgcgccgcctcgccacaccggttcagcagccggcagaaggtcatcgccgccgccattttgcgccgctggcctttgacccggcgcaacgtcccgcttagcgctaacgcatgcgcacggcttctggcggcgccaaacacccggtatttatttcgccccggggcggggggagcgcgggtcggggcagagggtgcgccggagctgctctctgattcaggtggtcacccgttttcatcccaggtatctcgctaaaaatgcccctgattacaccgagtactgtgcgcttgtttgacttttcatcaatggcctaaaagttaagcggccccgttgcgccggcaggtgcagcctcatgcagttgcagccgcaggctagagctagggccctgatgaggcaggcaatggtgtgcgaaaccttcagcgattaggagtacccagtggttcttatttagcggacaggcaggggaggatgtaaactgaaaatacattgtttatattcttatggtaaccgataatcatgagacatttaaatatcaaaattattgggtgaaggagtcaactgcttagcagacgagactggaagtgcattctcctcgttcaaggcaagcgttcctgtgtgtggttacggggagccgcagaggaaacgtatattggggatttctgcaacaaagcctagtacaccgactgattttacagcatgcaaatacagcctctaaaaaggcccgttttgcttagagttgacttgggtataaatcccagcttaagctccagcatccagcttttattttgctgtggtcagagcctgaggaccacgtgactccaagaacaaaacactagagatggatgagtggcggggaagatgataaagaggaggaaaggcatgagaaacaagaatgcacatgaaaacctccggtcccaaagatgtcccagcaaacgtggtggtcagaggcagatttgtcctggagctgataaactccagcggcccgcccggtgttcgccgggtcaggtggaaaaagtgggcgctgcgatgaagcgttggggcctgcagggagcgcggagtggacgcagccacgtctgcaactcacccggacacacacaaaaaggaaggcgaatggagttacgggtagatacctgaaaaggcagggataagcgagctaagggtagaatctaggtggcaagtatatgggtgttcaccgtacagttctttccctttttctctatgtccgaagtttttcataatgttggggaaaacagccgtaaccagttgaaactactgcccgtctccactcgtttcccggagcctgtttacatttctcctgtccacttaaaaacatgtcctctttctcagtttgttttgacattggtatttgccagttttttctaaggcctaagtggttgtaatttctttttcgttgcggatatccattttcgttcctggtttttgcattttttttcccgagagcgctccaaacagcacgacgatcccggtggcccgcagagtgcgcgcagtcggggagtgatacgtcgcactccagcgcctgcgcactcgctgctgcgtctctgcgccccgcactggacgtgggcacgccacgtgacccccccccccgccgccatcttccttcctggcagcagcgtccgcgtgccagtgcgcagacgcaggggtcggcgccgggtgagagcgtgcggccgggtaagggagccgtcttctcaggtcaggggtcccgggtgtcttgagagtgggggctgcgagagggtggggccggccaccttgggaccctcgggcgtgtctccccgagtgggctgcggtcagaggagcgtgggccggggcctggcggtctcagagggccagggktgggggrtgcgggtccgaccgtgggcgcccgacctggcgacaggagggggtgtccagcgaccccggggcgggagaactggcggctcccgaacgcgacctcacagcccgcgcgcagggccggctccggtgccgcagtgtcctccgggccctgcaggcccagctcttcccagccggggccgctgaaccctaagggccggggcgcgtggggaagcaggggcgggcgaccggggtgccagagttccgtgctcttccggagcgggggcctgtcccgaaactggcccgagggagggcccctgggtctgggaagagttggagggaggagctcatcagttgaaccgtccttgacctggtgtctgtttggaaagggatgcggcctaagtttaagctycctcccagccaagtgagcggctcctcaacatcgcrgggctttgcacactcacctacacttgcagcaggcgggaaagggaaggaagccaccgtccactgccccttattctcctggcacacttggctgattaaggcagtgttsaagctcaggtcgaggctgcagctggtatgggaacaccctcagwccccgaggkccctgccttcccaagcctcagtgaaacagagaaaaggaagccttaaagagcaggtggaagtgcaggagaagctataactccttttttyctctctcccatagattcaccacaacatggcaaatctttttataaggaaaatggtgaaccctctgctctatctcagtcgtcacacggtgaagcctcgagccctctccacatttctatttggatccattcgaggtgcagcccccgtggctgtggaacccggggcagcagtgcgctcacttctctcacccggcctcctgccccatctgctgcctgcgctggggttcaaaaacaagactgtccttaagaagcgctgcaaggactgttacctggtgaagaggcggggtcggtggtacgtctactgtaaaacccatccgaggcacaagcagagacagatgtagaccctttccctccagagtcacgcacatactcgtcatcgcatcacttgggagaatggttgtatcttatggaaggaattatcacatcaaggagtcaggggaaagtgactggaagcaaacgccctaaaagttacccatcacgtttcagtgtaaatgagtaactatagaagacattgcgttatcttatttccaaaacgttccaactaaaaaacattttcctattaaaatagaccttccgaatagcttagttcattcattctctctgaactcaggctgcaggtagggattggatggtgctgggtgaggctgggcaggacttctctatgtytcygtgaggctgcttagagcctcttggaagaagtggtgttttggtcacccgtcgctgtacaagccaaggcttggtggcttaaatcagccattttacattgytcacgattttgtgaggcatttgggatgggctcagctgagcagtttgtctgatctgtgtggcattaactgcaggacccacttccaagatggcaccggctctcctgtctgrggtctcagtgctcctcaggctgtacgtagcacctcctcaggcagggcccacagcgtggcttgcaytgccccacagtgagcttcccgagagtgtcccgagagacccaagcagatgctacgaggcttcctatgacccagcctcagaaattccagcgtgtcatttctaccgcactctttcagtmcctagggtgagcccagattcagggggaggcaaggagctccccttgctagaggatgaccacacctacaactggtaaggacttggagggatggagtgggctggtccttccctggtcatcgggattcatagttgagtgagccccatgccttgggggagcactgtcatcaacatgaatttgggggtggggagcacagtccaacccagagcagatgctgagatgcgacagccttctcacggctcctttcctcctggccagggacacctccccttctcccagaaaggagttttgtgagacaggagaccacgcaagaagcctagcgcggggggagcgccctcctgcccagatcagcagcaggggcgcagcagggtcacccagaaaggcctggtggggcggcagagggggcagcatggccacatgagggccaaagctcctccccagcacccacatcacttctccagggggagcagacgccggtgtgtgttgctgtgaactctgtgctgtgcccattcaccctcacaaagggcctctgcaagcagcttgacatgggcattgcagcccgcaggcgtctggccagttgaagaaggtggagagcgttattacctgaaagaaaagggaaccagctctgcgaagagcctgcttctgttgtgcagtgaaagggaagccctctctcgagccgttcttaagtgaggagttgatgcactagagtgtctgtcacgggggcccctgaaagtgtcagaagccagaccccactaggagacctgttatgcactggggctgagaatagttcagcaagagagaggactttcctcaagcgtgtgtgtgtgcgtgcatgcatgagtgtgtccacatatatacgcgtgtgtctgcatacactacctgaacaggcagtgtgggagggtgtgatgggtcagtggcaccgctgtagtgaccctcagcagactgcaaccttcagccagcgtgtgctgtccatgtctctgatctctcacggggtgggtgatgtggttttgagaaccacagggtcctgacagcccccagcatggcttgctgatgcttcccgagcacccttagcctgggccctggggtgaggaggagaagaggtgctgctgccctcacacccttactgcgtaggagcgtgtgaaacaggctggtgagtgctgtgtgtgaagcatgccaggccctccaaggcaagaggtcaaggatgctccctgcaggggatgacggccaagctgaaactttggttgcaggggaggcaacccgaggaggggcctgaggctgggcacgggcagggggcatccaagccatcctgcgtggatgaaaactgggtgtgtttctgcagtacgcagtgctctggggggagacctgaccaccggctgcatgcctgcagttgggtgtgatgtgcttacgtgccatgcaaacgtgggcacacagtcgtggcctcttgacaattgcacagacaaatccccagcaaggcagcgtggcacaggagccaacaggaaggaataaagaaggcatggatttcatggcacgcttgatccaacggggaaaggtgggattctgctaattttgcttgagtagaaatctaaggctgataattacctatccaggcttcagtccagaataagtgattaataaaagaattctgcagaaccaggccaggaatcctgggcatcggcactgtggacatctggggctgggttgtgctccgggcccatcctgggcactgccgggtgttcagcatccctgggctccaccacaagatgtcgggagcaccccacacacaagcagggccaaccaaaagtgccccagacactgtcaagcactccctggggggcaacacgtttccccatcaatgaaccagggttgctgccgcctgtcctaactgggcacacctcatgacgagggctgggatgcaggtgcaccactgggaggtgatctcggaagtcaggatggggagtggggatgtgagtcagggagggagaggagcttccagggcacagaaccagagcgacaccgggtgccaccttgttgtgtcccctgagctctggcggaatggaccttggtgtcctgtaggggatgaggactgggggggggggggcgtttatccacagatgctcgtcactggtggttgagggtgaccgtgtggggacttaaatcccaggcacttccaagccacccaaaggtgggctgagcaggtcctcatgggcacagagaaaggcgactgcagagagaggaggagtgggcacgtgggccggcagggtcatcctgtcaggagctgtccctgcactcgcgagacctacgggtggcctggggccctgccagatgccagccctgtcttgccaatgtcctccctgtctcctgaaggtgtggtgccaatgaactgaaagacggattgaaaatactgtgagaagttagaagtgctattcaggtgtacgttattaggttattctctgagggacttttaaagtaagatcaactggggacagcagtgcaagtgaaggaagagtaaatgatgcccagatggagagaagaacataggagctgtctatgcatttccagaaggaggcgaggtgctctgtgggacgctgtcatgtttgtatccacctaggaggctactcacggaccaggtctaactgatggaccacccacctggcagcgtcgctgtcactcacccaggagagtgggaggcgagaccggcactcccagggtccaggtctccttcctgtgccggaccggtgggggctggggcttccctgcctccctgcgagtgggcatggctgtgagacctgctgtggcctatgaggctggctgagggtcaccagcagggtctccgagcagaggtgatgtgctgctttgtggcggaagcactccacgcggtgcattcgttcttcccccagcgatggtggaagtgatcgggaggtggaagagccggtggaagagtgttgatcctgtccattcctcagtgtccagcctccggcaagaagcttccatggaagcctcgtgtttaaaagggggcaggcgcgacccagccctcccacagggttctgggaacccagagagctgggtgctgtggtctcaatgtttgtgtcgccaaaaattcctgtgttgaaacctaatcccccgtgggagtgctttggaacggggccttcaggaggtgactcagtcctgctccagggccttgtgatggggtttgggcctgagaaaagggagtccagagagccagctcgccccatccaccatgtgaggaggagccctgtctgtgagccaggaagccccaccagacacggaagctgccggcgccttgatgctggacttcagcctccagatctgtgagaaaccagtttcttgtctgtaagccgttggtggaattttgttattgcagcccggacagatgagcatgctgcgtggaggcagagcctgcttcccagccgtgtttgtgtccgtacgtctcccaccagcccagcctgcagcgggcactcggccagcgaaggcagaccagcacctccgtgcctgctcatgagaggaggcccgcctcctgcttgctcaccccttttaaggccaagctcccattttgctctgtggactttgctgaacggtcctgcccaagagaaccctcagcacctctggcactggagtgtgggacaagtttgacactggatttttctagaaatacacgttcagcgaagggcagatgtgaagtcagtggtcacacaggctcctggtaaccacagagccctgcaacaaatggtaaccaagcagccctagggcaaacggcgtggctcgccacaagccatctcgaaactcaacgccaagacatatttctgaatattaaatatgcaaaaaaaagttgtacaaccgtgtgcaaagtacgtttccatttaagtaaaaaacataaatctaagcacgtttttcgaagccaccgtatttaggtaactttgtaagaaaagttctgcagcaacacactgcaagacagtggttgtttttacttctcaaggagaggggagaacagacaggtgggagtgaaatgtgaggttccctttctgtgggttttaattttgttgaggagttgtgtttatatcttacttttatattgatacctagaaaaacataaaaattcgtcaacaatatgctttgccaaaataatctgagcaatgaaacaactgtcaaggaaaagtgaagtccctgcccacccactccacgccctcccgtttgccagtcaggctcagccccttctctggggcttccttcccatcgcagccactcaccattttttccgcttactcagattgaccatgtgtctcccacacacagagatgattctcagccccatggagctcgtttccaggccttggagaagaggagctgagggccccgccaggaagctctgggcagaggcttgtgcccaggaagagcccagcctcagggccctgctctccagctggggctgcagctgccttcctttcccatcttgctggtgttaaacagagttcatgggaattactgagctggattccagcgcttcctgccaggaggcagctcccctgggaaacctcctgccccccaacccgagatggctgcacggttgcttctcccgcagctggctgctgcgttcattctctttttcttccttttgggactgcaggctcaccagctcacccagcacataacccggtaaatacttgaactagtatcacctgttgctgagcatgtctttaatcttaaaaggatggagtggaatccacgttctgcctcattaccacgttggcgtgtctgagcttcagtgtggccaactgcatcaaatgatggtctcctccacaagtccatggctgggccactgccagttgttgttgataaagttttattggcacacgccccctcgctcatttatgcatcctgtggtctgtgtgtgtttcctgctgccacagcagagttgagtcattgcctcagagcacagaaaggttttgctctcgggctctttgcagaaagcatttaccaacccacttctattctaggacattcaccgcagcaagtgaaccctctgccatcagagctatgctgtgtgcagctgtgtgtgagcaagggtaattccactctgaaagccgtgtgtgcagagatttggggagccctgagactctcatttctgctctaaagacctttgaacaaccgttacttatttttaaaagtcaaaaagtttaactaggccaggcacagtggctcatgcctgtaatcccagcactttgggaggccaaggcgtgggggttcacttgaggttaggcgttggagatcagcctggccaacatggtgaaaccttttctctactaaaaatacaaaaaaaaaaaaaaatcagccggtcatggtggtgggcacctgtaatcccagctactcaggaggctgaggtgggagaattgcttgaaaccaggaagtggaggttgcagtgagccaagatcacaccactgcactctagcctgtaggacagagcaaaattcggtctcaaaaaaaacaaaaacaaaaggataaataaaaagaagatttagagaagatgccatagtctctccttcctccctattgggagcaacactcgtatgttcacatcacatcacaccttgcacatgtgcacgtgttctgcacatgtgtcttggactgcctggacgcagtcccaggcaggatgacactctccttcccttcattactcaaattatttttgacttgtgttgttgcaaaatttaaatcttgaaagaatgtgctctccctaaatttaaggtgtaaaaccctaagaactcagggaatcagttttcatataaaagtactttggaaaaaactgtgacagatactatttatttattattgtttttctaattataccaaatatagcaattctctttggcttttgttgagtaagtggctgggtgagaaacaaattgtataatattttattattgtgcattacatgcctgtcggctttagaaagacacctctcttgttcatcccagatgaagacaaatttaagattgaaaagtggggaaaggccaggcacagtggctcatccctgtaatcccagcactttgggaggctgaggcaggaggattgcttgaacccagacattcaag

SEQ ID NO: 97735 - DNA, 18155 bp, Homo sapiens
tcttattgttaatttattgtttctggcacttgggcaaaccctgtagttaatactcctcccacactagacactgggtttcaggaggagggagactgccctgctttggtcccagagaggccctctgcagataggcgtggcccctcttcagaggacactaccctagggcactttctctttgaggtggagagacccataaagccttgaccacatcactccatatggggaggagaaggatccctgtcaccttctcctctcttcacggggcccttttgcagccctaggcctcatctgtgggaagggagtccctggcttatactgcccccaccacagctccttgccctggccagaactgctgtcgaagaaaatcaggccggaaggccaagaaggcgctaagggggatgggagggcaggttttccaggctggagtcggttccacccactcgcctgtccacaggcttccttgtaagcaagtcagcagcacagctactcacgctgccatctggacttattttatgtcaatctgtttataaataaaaaccaatatagataccagtgtctttttaatcagttaacagccaaatcactacgcattcattggaccagtcattccccttctcttggtcttagttttctcatacataaaacgaggccgagcacgctggctcatgcctgtaatcccagcactttgggacgccaaggtgggaggatctcttgagctcaggagtttgagaccagcctgggcaacatggtgaaaccccagctctacaaaaaaaaaatacaaaaattagcctgctgtggtggcgcacacctgtagtcccagctgcttggggagctgaggtgaggggatggcttgagcctaggagatcgaggctgcagtgagccgtgttcgcaccactgtactccagcctaggtgacaatttgagaccctgtctcaaataaataaaatggagagcttggaaaaaatgattcctaagcgtccttctaattccagcagtccctaaagaacaggtggtcttccgaatgtccaccagagccccagcatcacacaggccccttggaaagtcagtatgtgaatccagtctccaccctcaaagggctttgctctggtgcagctagacagtagtaagcacagcagctatgcaaagccagagcaggagggagcaatcttacatcagcaactcctaggagcctcagtggctgggcatatcctcacccatatagggtggggaaagatgcaggccagcacagccaggtcaggcctgcactgtaccccttgtgctgaccaggggccaggcacacaactccagggccacacgtcgtgtttataattggagtatagggtttgcaggaggaagagaaggcataggggagcagcaggtcagtgcagtataacctgataataaccaccaccaacacttatatcactgtgtgccacatgagctgcttacatgaattagaactatctcacttactcttcacaacaaacccattttatggataaggaaacttaagctcaggtcacacaggcaggaagtgccaaagcagacatttgactgcaaggctgaggttctagccagcccacctatgtgccaggaagctttgggtgggtcatttcctttctttgggcccatctggctatggggtatttgcatgaggagacttgtgaaggcccttcaagctttcaccagtgacaagttccaatatcataacttacttagaatatattttctacttggccactgtgaggttctaaccatggtcactgtgaaacagtcagggtcaaggctgccaaacaagttgaggccctcattttctaccaactccttgacactggggttttttttttttttttgacagtgtctctgtcgcccaggctggagtgcagtggcacgatctcggctccctgcaacctccgcctcccgagttcaagtgattctcatgcctcagcctcccaagtagctgcgactacaggcacacgccaccatgcctggctaattttttgtagttttagtagagtttcaccatcttggccaggctggtctcgaactcctgacctcaagtgatccgcctgccttggcctcgcaaagtgctgggattacaggcctgagccaccgcacccggccaacactgggatcttgtagactgtgctgttcattcagggtattcccaatgagcaccttgctgaaccctaacaacaaacttctagatgtgaccctcaagacacagggactaaaggtgacactggcatatgtaggcaggccagacatgctgcaaagctgggcacccaccccaccttaccctcttcgccaagagtatgtaacttcctactgagcattgttgtgagaactcattgtgctgagttgtttttctacactatcccactgaaacctcacaacagtcctatagtataactactgtttccctatcttacaggtgcttagagaggttaattccatagctgttaaggggtacatgtcctgctgcctgcaactctctcccgtgggcctttgtctcagatccagctaccattcagactccagacccctgcaggctacactgggcatgtcattaactttgaagactgtcaaacagaaatggcctggctgcagggcagcgggaagcagccctcttcaggggaggagggcagtcctcacagagcctctggtcatcaggagttattctccttggttgcccaggtgacagctcaggtacaagggaatgagacacatcagggagaagggggttggttcactgtggcttagaggcatcattccccaaaggagctcatatctctttgaacaactcaataggcatagctttcagggaccccataagccacatacccaattgagtcattccacataggacgcccaaccttatggctttttaacaagtgtttatagttcacacagaaaactccaagtgctgataatttacaattaggaatcatgcttaccataagtaatgttgcactgaaacagctaacatacttttatctggtttccagacaaaaagaactagaaaggtaaccaaatgtcaagttctgcaggaaaggagaggatgattcacgctgccataacctctggggtcaaaattaaatgttgtttaagaaagaaaaaaacccctcaactttggaaattgtttcaaaagccaaaagccttctaatagtgacccagaatcattaaaagcactcgaacgggcctcagacccagtgcacacatgctgcagtgttggagaggccactccgtgaaccccagcagtccagtagcccaccaggtggaaaggcacaggtgccagaggtctcatggcatcagcttcatgtgctcaccctcaatggggggacagggagatgacactgactttgtgctgagctcaggagggaaacaccaaacactttgggaggtaacagagatctaggccccacctaaggccgaatccatgggagtgtggggcatttttctggaacactccgccctccccagccgtggctccaccctgcctgctggccgtggactgcattgtccagacactctttgtgggggtcttatgggactccttaagattgatccctgaggtgtagcaatggtgggccaaatggacactgttccggccctcacactggtgccacactccctcgttggcaagagcctgaaggtgaatcatccctccttctttaccaccaaaacaaaaagtgtgggaaaccttgagaagagggtcccaacacttctcccctcagcagccctcagctttttgcagcctctttacctaagtaccctgagtcactggacatggtcttgccaccacattccgtcagggcagagccacagcttccagccttcagcccagaggcagtcacagccaagcatcagaactgcggctctgtgcctacagtgccaaagccactgcaggtgctcacagaggctggcagcccacagtacccagggcacagacactaggctggagccactcaagtcagagatactctgcagtaactggggctgggccctgtcagagccaggtggggatctacaggctggaggcagcacgctaggggagggcttgagaccaagggaggctggagtgatgtgggtcccaggacctggaaagctatgtttgtaactctgctccccagagttcgctcttcttgatcatccttgttctctcctgcacctggctgggctcattcctcttccctatccctctgccccttgactggccttcctgggcaaacagcagattgtgaagtgggagctgtggggaagaggggatggcatgcctgctgtgggttcagggattgtggccatgtgggccacccagtggacactgtccagataacatgaaaagaggccatccacagcggctcagctctctgcccctcatctttgggccccacctcacattcataaagaggcttaaattctagggttttttccttcagttcaagatgaggtttgtcagtgaggtcacagacatccagcaagagggttaacggggctgcttatccccccactgggaacccaccactccaagctgcctgcagagcacctatactttctaatactattacctaatactagagagccagagacaccgtaaataaccttgttatcttatatttatgtatttaaaagatggttcataaatgtgtttagtgcttaccatgaaagacaatttttacccccatctccaaaaagaagtagaactgattcagctcacagaaggctgttaaaggcgccagagaaatatgtgatgcagtggcttaaagagactgccaggaagagtggggaaagttgctgcactcaagtcaatttgggaaatttcatgcagaacagccacccaatagcaaggcctctaggtaagtagggagaacgcctctggtcatgttcaggtgtttcgtctgtcaaggtgcttctcccggacagctatttctgcacagttcaacacgacttgagttggccatctcaaaacagctatagcctcagttgctgtgagggcacctcatggatgacagaggcaagaaaggcttgagggagagggggtgaggcagggggagcttggagccgtcattctctaaccctaagagctgtggacacaaagccgagcccaacctggctgctgcccgggcgggcaaggagagggcaccgaatgcactctccccagagcctcgcactgccaccagttgaggcctgcgcccctctcttccccgcacaccatagcctcttttcttgagtgctctacccaaactactgcctcaccccctaggaaacaaacatttggtaacatcttcagaaaggctgctttcaaggaaggcagcttctctacgctgtcaaacagctttcttagttgaagcatctaactgtggcaccatccttactgcccccaattggggcttccagaagcagtgtgggcaagcgctgccagccttctgcagaatgatgagcactggtcagtcctgtgctgataaagactgtgtgtcacccacgtcttggtttctccaacagcaggtaacaacctcatcttcccaaagagatagatagctacgcctgacctatttttcagggctcttctggacagcagcctctgtctccagcacagagaagggcctggcgtcagggggagccctggagcctaccatgtgcctcctgctccatcttgggagcagctgggccctgtcagtactcagtagagcctgggattggtgactgactaaagagggaggtggaggctttaggcagcagcgctgaaagaggtggcaagaggtgacctgcatgggaactggggcctgaagagacatcactaagtggggaagtgtgtcccacagccaagctgcatggtgggtgggccgctgggtctgcttccagtgtgtggtgggacccacagggagctgagttttcctgtttgatttcccgcacccagcctgcctgtggctggccaagaaggcattgttgaacctcatgagatcacagaggtagctgtgcaggccccgcccacttcctataaccctggttctggcygtccmtgtgccaagcctccaagttccctgagagctaccggccaggggtcggsaggctatgggagctcagggmaggcacctcccatgctcccgcgggagccaccaggacatgaaggtcataggcctctcctctcctcctcttcctgtttgacctgaatgcccccaggccaactgcctcaaggattccatttgagaagatgcaggctgggtgtgtggggagcagtagaggggctggtgtgtgcacatatgtgcacagctcaggacagaggctccctggacttggggcgggggcactagggccccaactctaaccctcgttctgccctgttgacctctgctctctggaccaaaaatggaggactcagtctagactagttcttagggtctaggagccaccttaagttatgtttatatgcaaaggccatttttctgagaggccatagctttcatcagtgtgccaaaaagcgtgagatcctctgctctaaaagcctctgccccagcgctgcctagtttcagagcccccgatggcctcacatggggttttagagcaggcagagaagctgcaatggggccaccagccagtcctcagagtcctgggttaaggcctcctctccaggaggccctgtgtaaaggttttctctgttgcctggaggcaggagtgaactggtaggcaggaaaccctgagggtacctaggaggcccctagcctgtgggttggggagggaagacaggacccctggggccactgaaatggtggagctctcagagacctgagttctggtcccttctgccactttttgggcagatcccgtcttcccacaggccctgtgtcttgctcagtccacgtgactctgctttctcatcctaggcctcaggtgggtggcaggccctttcctgcttgccctctgccctccctctctctggccctgcccagtctctgccaatctgtgtacctcccaggagccgggacactccctgagtcctctgggagcccttaagccayactgagaacacagaccctgggagaagcagccagcagtgaggaatcctggaaccccttcccagggagagccttcccatgacccccatgaagagatcagtgcaaacacaggtgtcagagcccttcatggagtcctggggtgaggagtccctgccggagctacccrcagagcagtccctgacggagtactctgacctcgaggaggctccctcggcgcacactctctatgtgggccatctgaacccccagttctcagtgccggtgcttgcctgcctgctgcgagacaccctggagcggctggagatgccggtggcgcgggagcacattgaagtggtgaggcggccgcggaaggcctatgcactggtgcaggtgactgtccacagggacaccctggcctccctcccctggcgcctgcagacggccctggaggagcacctaatcctcaaggagctggcagcccgtgggaaggacctgctaytgagtgaggcccaaggrcccttcagccacasagaggtaagtgggacttttcccaagcaagctccaaagcctcaccccaagggagagcctctgagtgggagtggcctgcagagtggggatggaggggtgtctctggggaagcagggacaaatctgcaaacttgggggctgccactcaaatgaccatggcttgcggctggtactgccagctttctctgggaaaaacagtttgcctcaagctcaagcccgacgtttgtgtgaagaaaggccacgaggggacctcctctccttaggtccttttacattccagcctctgggcctgggagaccctagaagacacaggggccccgattttctccttggcccaactcatttgttcaattgacaaacatgaacaccccctctgtgccaagagtaaggcagggatgagaggcccagccaggcccccaggaagccctgcatctgtggccagagctggacagccacccaccgagctgcaaggtggctgcgctcagagctgtgagagaagacaggaaggtttgccctgctctctggggacagattaacaggggaagtgaaatccaggccgggacttagggagttggacaggcacttgcaagggaggacattccaggcaagggacacagaatatgcagaggaacctgggggcttagagggagtgtcatgtctgcagaagggcaaaccatttggtgtccctggagctcccactaaaggctgcagggggtgctaaggaaggaagttgggccagaaggtagggtaggggccaggtcaccaaggctatcatccaaggcaaggctgaactgctggctttattgggtgggacatgggacgttaggrtaggtcactccatgagacaggtgattttggtttcttttggtgtgaaaatgatggtgtttaaactgttgcagaactaaaaggctctgtggcttacatttcaactcaatttcacatttgtatgaagtttatcctgtttctaagactgataaattcatcttctctggggagctgcagggctggtagggaggtgcctcagtctcctcaccccaacccacgctcatgaaagaattgtgaggagtaacaatctgccttgaagttagcgtcactaaggagggttggctgggcgcggtggctcacgcttgtaatcccagcactttgggaggctgaggcgggcagatcacgaggtcaggagatcgagaccatggtgaaaccccgtctctactaaaaatacaaaaaaattagccgggcgtggtggcgggcscctgtaatcccagctactcgggaggctgaggcaggagaatggcttgaacccggaaggcggagcttgcagtgagccgagatcacgccactgcactccatccagcctgggtgacagggcgagactctgtctcaaaaaaaaaaaaaaaaaaaaaaaaacaggagggttgacatgaaagggtgagcctggaagcagggaggtcagggaggggctcgctggggaggcccagactaggaagtggccccgaggaggctcacaccaagccctcgagcagagcccaaaccatgaaaggagattcaggaggcgcagaagaaagtggggattagggcggacttgtcaatagcccagcaagtagtgggcaaaggtttgaaatcaggaagtgggtggggtacctgggagtccctctccattcagggtactgcagctctgtcacagggtgctgagatacctgctggaatgatctggttctgggcctcaggggcctgtctgcaacccaagtaagaaaaamtgggcccacacatgtcccagcacccagccctgagaagcagaaatctcttcttccccaccaggcatcccacagctcacctgggaagggcccagcttggcagggaaaggagcgctgactggaaccctcgatccagcagggtttcctgcctcggctgcaggagggtgggcagaactgggcccctcggcctggtgaggggcatsaggatgtccgtaagagtcaggctgcagcaggggcctgactgggggttcttgcagtccttctcagggtcagggctcccatttcctggctggacccatacattcattcttgactaccaccctaggagaaggaggaggaggaggaggacagtggcctgagccctggccccagtmcaggctctggtgtcccgctgcccacctggcctacacacacgctgcctgataggccccaggcccagcagctgcagagctgccagggccggcccagcggcgtgtgctccgacagtgccattgtgcaccagcagatcgtgggcaaggaccagctcttccagggtgccttcctgggcagcgagacccgcaatatggagttcaagcggggtagcggcgagtacctcagcctggccttcaagcaccacgtgcggcgctacgtgtgcgccttcctcaacagcgagggcggcagcctgctcgtgggagtagaggacagcggcctggtgcagggcatccgctgcagccaccgtgacgaggaccgcgcacgcctgctggtggactccatcctgcagggcttcaagcctcagatctttcccgatgcctacactctcaccttcatccctgtgatcagtacctcggagaccagcgtccccctcaaggtgagcctgcaggacaggagggcctctgggcctgtcatctgtcatcactcagtaagacgatggcctgcactcctgccaggcagtgctggggcagggacgggactgggggccacaggagaagaggctggggatggcccctgtgccagccctgctggcctgccctaaggaatcagtgagcaatgctgagcagcctggcaggatgggggctgccgaccgtgaggggcggcgcctccagagctgctgttgcccctaccaaggtgatccgcctgaccgtgcacacccccaaggcccagagccagccgcaactctaccagacagaccagggggaggtgtttctgcggcgcgacgggagcatccagggcccgctgtctgccagcgccatccaggagtggtgcaggcaggtacggaagctgaggccagtgggtggggtggagcggagctgaccccagaccccttcagccacccactgagcagcccagggcaagccaccatggttccctgggtcctgcatcaccccgttgaacccaaggggttggaatacaatcacaccacatcccatactccgcgggtaggtggctggtgggaaggaagaggcccaagctctctccttttaaaaatctatgcagtggccaggcgcagtggctcacgcctgtaatcccagcactttgggaggatgaggcgaacagatcacaaggtcaggagttcgagaccagcctggccaacatrgtgaaccctcgtctctactaaaaatacaaaaattagctgggcatggtggcgggcgcctgtagttccaaatactcgagaggstgaggcaggagaatcgatcgaatctgggaagcggaggttgcagtgagccgagatcgcgccactgcactccagcctgggcgacagaccgagactccatctcaaaaaaaaaaaaatcctatgcagtatcctcccttcaggggtgcctgaaacccctcaccctctacttgggcagttaacacactcgatcttgagtgagggagcagagagactggaatgttgagatgtcaccagaaaaccccaaagactatacactgcattttaggggaggccctaaagcggcagagggggcaagacacagtcccaaggaagagctttttcaagagggaaacagagaatggaggacaagggaccaacagtgaggaggcacatggcctgcccagcacggaggaggctcccttccatggctggcagccggcagcttccctcaggctgacacggttgaaggtggcagcaggccgaggggcctgacttttcccctagctgagaaagctctcaggctcctgggctttgccttcctccctcagtttggccccaggtggaggacggacaggcccgagaccaggcgggcttggccacatgcttttcccatgtcccctcagaggtggctggtggagctgggcaagctggaagagaagatgaaggcgctgatgatggagaaggagcagctccagcagcagctgcagcagcacgggcctgtgtcctgcacctgctgtgtcctgtgagggccctggggagcaggcaggacggcacggcactctccacctgagacccagggatttcctgtttgagtgtaaggccaaccagtaaagcccatgcgggctgctgagaggcggacagggactccttcaacatggcacatgagcaggcacccatgtggcttcaaccctgacagacccatctgtgtagccaagaaactgctctcagccctgtccccaaatgaccttactttcagaaasaatgtgtaaaaccctgcccagagctcccctagggctaagctataagggattgtccttctccctaaaatgctcatttggcccaggctgaggtctgtgactccagttggctacacagtgccagaaaggaatctgtcatctcaggaaagcccctcaaagatggcgaggcatatttgatgactgtggttacagggcaagaggccaccctgcagcccccacccctgacttgctggaacttgtgactgtcaaagctccattaataaattacatgcacctgggacaagaatggttctttctaggacactgggtcagccggtcagatgctgcagggtcatgagtcccaggcccagcccacctctgtccaggaggcagaggacagacctgcaagggcagggagcccagcccctcagactccagtccagctctgtcttaaagaccagggaccgtggggcaaagtgctatgcctctgtgcttcagtttcttcatctataagacagtgacaatggccaggggcattttgtcaccatcgggccagtgccctgtgtctacgccagctgtggcacagagcagcacctcacactaagggtctcagttcctttccaagacccctctggtccagtaagaccgttagcttaaaacaaacaaaaaaaaccagactcctccagctgcttcctgcctctggccgtttctcctgctgtctccaccagctgagccagaggctgcaaagccagagtctgatcacactcatgccgcacctgcacccatagccctccaaattcttcaagagcaaagcccaaacttgatggcctacatggttctccaccacctagcccacccaacctcaatgtcttccgccccttatgtaagccacttcagccacgcccaccaacttgtttcatttgcactcctgcctcggggcctctgcgctacatagcggcctatttcctttcctcttcaccttcaagtccatgcttaatttcccacccaccctattttaaagacaccacctcccagcactgccactcccctgctcacttccacccttggtctccatctatgaactaccacactctgtagcttatatttggtgcttcccccactgaataactgctctgggggacaggggtttgggtatggctggcatatggtagacacccaataaatacctgctggtgagacaattaaggatactcctaaatttggggtctgagccaccagaaaatcaccaaaccttgttgaacagggcatttcacaggactagtgttccacagaacacacttcagttgatcccctaaaacttgaagaccctggccacatccacagcagacacagatgagaactttggaacccccagcccctccactcaccagccaggtgacattttctgggtgatcacaactgctctgagacctggttttcccacttagcaaagagcacacaacccctgcctcggctgccattcatgctggttagggaccaatgtgatcacagacacctatatggtggcaggttaccaaactcctgctgctcaccccccgagctgccccaaggtcaccaagactgtttgaaaactacacaaatgtgttactcaagaaggaggagtggcatttctgagcaccttccacggtccaggtaccatgctaaatgctagtccaggcaccacaatcctcggaaatgtttttcgggggaaaagagcagatttctacaaaggaagggtgaagtcaggcttcagcccagctgctccagactgctaagaactgcccagatcccctggactgaagggaagttccctggactgaaggaagttactgaagggaagttacacatagctgtgcctattgttaggtcacattaagaaaggaacgaggaatgtgaccagctttcctccccatgagggagaagcctccggggacgggtcagtaaacactgggcacaggttgccctcctgtaaatccagcttcagccctatcctgtctgccacagccagcgtggcggggctgctcgagctttgcaagctctggagagccatctgggatctcttttttcagaaaccttacattatgtggccagcacttgacaagtgatcagccaaagtgatcttaaacataggggcaggaacttaattactgggaggctttttcacaccacccacacacccagccattgtgggggaccatgatgtcaacaacgggcgtgtcagaccctcagtttggggaatgtttgaaaaaaaacgggccagacgtggtggctcacgcctgtaatcccagcactttgggacgctgagatgagcagatcacggccagcctagccaacatagtgaaaccccatctctactaaaaatacaaaacaattagatgggcgtggtggcaggcacctgtaatcccagctacttgggaaggtgaggcaaacagaatcacttgaacctgcgaggtggaggtggcagtgagccaagatcacgccactgtactccagcccaggcaacagtgtgagactccatctcaaaaaaaagactattgaccaggtgcaatggctcatgcctataatccctgcactatgggaggatcgcctgaggccaggcgttcaagaccagcctggccaacacagcgagaccctgtctattaaaaaaaaaaaaaatttaattagctgggcgtggtgatgtgaacctgtagtcccagctacttggaaggctgaggtgggaggatcttatgagcccaggaggtctgcagcaagccgtgcttgtgccactgcactccagcctgggcaacagagtgagaccctgactcaaaaaaataaataaataaataaataaaatttaaaatgaagacaatctcctggtaccaccaggtgggagaagaggttagaattatgctcaatcagccacgttcaaagtaccataacaagcagttctgctggtgaagacagtctggcccactgctcactggctgtgtatatggggtacccacgtccagtgcctggcagaggaaaggaccaccttcctaaatcatgcttatccctcccctttctcagtcataaatagcaccataatagcacccatgcaccttttcatctcgctctacatgctgagaacctgtatttgaagctttatgaaaaattctggttcctattaaaaagaaagcctcatttcttagtttttaaacaaactctcaggttgtctgctgagtcaaggctgctcacctgcaggagcacccggcactgacaattcagctgactgcacacaagcaagccagcaacgtgctcagacgcttcccatctggccaatgacataaagagaatgagaagcaaagcatgtctcttgttctgccttactgatttatttcttaagttagagtacacatcgagtctggccagaatatagtgccacgtagctatgcctattgctaggtcacattaagaaagtaacttcatattgccctttcaactgcagtaacaccatcctggaagaaaaatggaccctccagtcaaagctgtctatatatgagagggttttagaggaagtttcccccaaaagattctttgttctgtaagtgaccccttgatgcaaggagtgtttcccagccctagaaataggaagcgcagccacaggcatggggattttaaaatcacgcttcagagacagacatcttggtgtttcatgttgacaccaaactgaccgtccctttgaatgaggaccagccacagttggcactgagaattccccccaactcagggcagtatagagattttgtctctggtttcatggcttagtggcaagcaataccctgaggttcccagcaccaagtgttcaaatcctagctaaaatcctctctccatgctcggtaagtccatgtggcacactttataacggtctaggtatccaagggaaagcgacaggcaacgcgctagcatctgcaatgatgcgaggtagttgagaaacaaggtgaccgatggggcactctgcagccccacccaccatcggttcccatcgcgatgttctgccgcaactcaagaactgcaaggagagtgtcacgcaacaggcagacaccacagaggagccagtacacgtgatgggacatgcaagtgacaagtttcccaaatacctttccgcataataaaataatcttaataaaaacataatttaaagaaagtctccaaagccgagtgtaaagtcagagctgtaaactctacccaagtttgaagggtctcttgaagaatcatccctgtttaaaagaaaaaaaaaagtgggaattatatgatgtacattaaagtagaaaagttagaatttctagtcagctgccatgggaaactaagcctgtttttcatggcagagcagtagaaggagcctactgggaataattagacgctaaatttataattcctacagaatcagaccttttcaagacctcacacatcgacttctacaaccacccaatgcaagcattctttctccacagcacctcgtaacagtgtcactaacgggcaattctccacttgcgaggcagtcagaaattccatgtaactgaccaaatatctacctccttcactggtaacagttcttgttgtatcagctccttaagactgtgaaacagcctatagcaaactccctggtcaggggattaatgagtccatccgtgttaaacgcttacctagcacacaggccctcctcctgatactaacttctcatgcctacccaccacctacttaggctatgccaggacagggggtcaaccaaccaaggcaggaggggaaacagctgggatcagcaggtcagaccggcactgacccagcaccagaggcccactggtgatgaacacacggtgtgcaggattcagggaggtccccctgcccaggccttagggcaggagcggtggaaccacacacccatacccctggttcttattccagaccccagatgactgacactccctcatttgatacctcaccagcagaatgcgtacttctgccaacacagtccacacagttatctcaaaggacatttacatttcgtggcagtgcccacagttattgcactttatgaacctacaaaccctgtcacttaatagacaaacattcgacgtctatttggcaattgttccaactttgaaggaattccagaataagcagcaatcaacaaaaaaaagttctctaagcagtgtcagttttaaagtacttcctgatgaaaacctgaggctctgcagaaatgacaagtgccacattgttgtatctgtcccttccttcaagatctccaaaatttacagctacatcaaacaatagggtctaagaattcagaccctccccttccccgccccagaactggtcagactggcaccagaatgtagtaatcagtattgagacaactgcccagtgaccatgctccccaagctgtcatccccagggcaggactgggaggtgcactgcaacttggaggaagggctgcccatttgatacccacaatgacctcactactttcttttctctctcaacctctggattatattcaagacctcaccactttcattcctggcagataaaaattttcagccctaaacttccatgatattcttgcaatcgcagtgtgttatcaccatgtttttaaaaactaaaactttaaagtaccacttacgctacaagatcagtcatgatttattgatggaaacttcagttcggtgatttcagagtcaggggagctgcttccactcctgtcactataggtgtccctgtagaattcagatggtttacgcatcatctcccaccaaaaactcactttacgtccctgtttttgtaaccacggttcctacagggacacttgcctgcacatggcaggaatcacaaagactgtttgctacataatatatttaacatgaaactgcagaaagatttccttcttctagctacaaaagatatacattccatttatacttcagtcacacaccctaccaccaactctgagtactggttctggataaaggtggcaatgggacataaacctacccattgtggcttacttcccaggaaaaactagttccccttaacatggaccagagggtcctacgccaagtgtgatctggtcagcaccaccagagctcagatgctgcagaaagggggacctggccaatatgccagggaaacaccgtgagaaagctccgggaaaggagaggaaactttcaccccaggcgcctgtggcttttttttcttatgactgactgtgacgtgttgctgtaatgaatcagcgaccacctaaaggactagagaagactaatggattactgaagcaaagagtgc
